United States Patent Application Publication US 2006/0048240 A1 - sequence listing, part 3

SEQ ID NO: 8806 - protein, 185 aa, Triticum aestivum
  misc_feature (1)..(185): Ceres Seq. ID no. 12584772
MRSGVSARLLPQAVAIAIAVAVACCMAAAPSSAQGTTTPADASGAVPSCASKLVTCAGYLNTTDTPPESCCDPLKEAATTQAACMCAILMNKAALQAFGVAPEQGVLLAKRCGVTTDASTCAKYTAGAGSDAATAGSTAASSASTGTAASTVAKPTASGGTTHPLSLIAASSFVGFSFIWWTIMA

SEQ ID NO: 8807 - protein, 160 aa, Triticum aestivum
  misc_feature (1)..(160): Ceres Seq. ID no. 12584773
MAAAPSSAQGTTTPADASGAVPSCASKLVTCAGYLNTTDTPPESCCDPLKEAATTQAACMCAILMNKAALQAFGVAPEQGVLLAKRCGVTTDASTCAKYTAGAGSDAATAGSTAASSASTGTAASTVAKPTASGGTTHPLSLIAASSFVGFSFIWWTIMA

SEQ ID NO: 8808 - protein, 101 aa, Triticum aestivum
  misc_feature (1)..(101): Ceres Seq. ID no. 12584774
MCAILMNKAALQAFGVAPEQGVLLAKRCGVTTDASTCAKYTAGAGSDAATAGSTAASSASTGTAASTVAKPTASGGTTHPLSLIAASSFVGFSFIWWTIMA

SEQ ID NO: 8809 - protein, 185 aa, Triticum aestivum; identical to SEQ ID NO: 8806
  misc_feature (1)..(185): Ceres Seq. ID no. 16625342

SEQ ID NO: 8810 - DNA, 934 bp, Triticum aestivum
  misc_feature (1)..(934): Ceres Seq. ID no. 12584903
acaatcgtcccagatctcaagctctcaactcacctcacctcgcatctcaaacagtcttctcttttcggttggcataattgctagaagcagggttctatccatggcaatggtggtgaaggccctcctcgttgccgtcgtggccgtggcagcgcttgcgcagctcaccgtggcagtggatcaccaggtgggcggcagcggcgcgacctgggccaccagcggcggctacgactcgtggtcggggaagcagaagttctctccgggagacagcctcgtattttcgtactcgccggcgcacgacgtcgtggaggtgagcaaggccgactacgacgcctgcacggccagcaaagtcgtcgccagatacaccggcggcaagaccaccgtcaagctcaccactgccggaaagcgctacttcatctgcagcatcaccggccactgcgacgccggcatgaagctccaggtgaacgtcgccgacgtgaccgccggccccaccaagcccaggggccagaggagcgtcgcccctgtcgccgccccggcgccggcaccggaggggtcggccaccgacgagcagctgccgacagtgtcgtcgcctacgggaacaccgacgcccagttcaccgtccggctcgggcgccgctagcatcggtgcgagcgctgcggtggcgctcgccatgggcatggccgtggcgttggccatttgagagggatctggccgatccatgtgtaccaaggcttagttttggagtgctcaagtcttaatcacgtcgatacatttgcggatttgttcttgttattcttggctggcagtggcatgcacattgccttccctgcatgttccttccttcctactagtacagtgctatcagggttcagtgtactactgtgcgatttatttgttgtatttgtctgtcggagaataaatacaattcacattcttt

SEQ ID NO: 8811 - protein, 231 aa, Triticum aestivum
  misc_feature (1)..(231): Ceres Seq. ID no. 12584904
QSSQISSSQLTSPRISNSLLFSVGIIARSRVLSMAMVVKALLVAVVAVAALAQLTVAVDHQVGGSGATWATSGGYDSWSGKQKFSPGDSLVFSYSPAHDVVEVSKADYDACTASKVVARYTGGKTTVKLTTAGKRYFICSITGHCDAGMKLQVNVADVTAGPTKPRGQRSVAPVAAPAPAPEGSATDEQLPTVSSPTGTPTPSSPSGSGAASIGASAAVALAMGMAVALAI

SEQ ID NO: 8812 - protein, 198 aa, Triticum aestivum
  misc_feature (1)..(198): Ceres Seq. ID no. 12584905
MAMVVKALLVAVVAVAALAQLTVAVDHQVGGSGATWATSGGYDSWSGKQKFSPGDSLVFSYSPAHDVVEVSKADYDACTASKVVARYTGGKTTVKLTTAGKRYFICSITGHCDAGMKLQVNVADVTAGPTKPRGQRSVAPVAAPAPAPEGSATDEQLPTVSSPTGTPTPSSPSGSGAASIGASAAVALAMGMAVALAI

SEQ ID NO: 8813 - protein, 196 aa, Triticum aestivum
  misc_feature (1)..(196): Ceres Seq. ID no. 12584906
MVVKALLVAVVAVAALAQLTVAVDHQVGGSGATWATSGGYDSWSGKQKFSPGDSLVFSYSPAHDVVEVSKADYDACTASKVVARYTGGKTTVKLTTAGKRYFICSITGHCDAGMKLQVNVADVTAGPTKPRGQRSVAPVAAPAPAPEGSATDEQLPTVSSPTGTPTPSSPSGSGAASIGASAAVALAMGMAVALAI

SEQ ID NO: 8814 - protein, 198 aa, Triticum aestivum; identical to SEQ ID NO: 8812
  misc_feature (1)..(198): Ceres Seq. ID no. 16611839

SEQ ID NO: 8815 - DNA, 473 bp, Triticum aestivum
  misc_feature (1)..(473): Ceres Seq. ID no. 12585230
acgtcgaaaccacgaccaagccaaaccaagcaagcaaccaagaagagattggtggatgagcctgaggtacatgatgagcatgagccgggtgggcgcgcgggcggcgctggccgtgcgggacaccgtcggcaggtccgccggcaaggccgacagggcgcaggcgccagcgcagcagcaggccatggccagggccggcagggcgccggcggagtcggcgcgggccaaggcaccgctggccaggagggccgccgaggagcggcggaggcgggcggcgcaggaggagtcgctccgcaccgtcatgttcctctccatgtggggccccaacgcctagcaccaaattagtattaccgattagcagtgtgcgtgcacatggtttacgtgccgtgtggttaagtgactctaagtttgcaaatctgtgcgtacaagccgaatgtaaagtaatacagttttgctaaagcacgtctaaatgtgcc

SEQ ID NO: 8816 - protein, 113 aa, Triticum aestivum
  misc_feature (1)..(113): Ceres Seq. ID no. 12585231
TSKPRPSQTKQATKKRLVDEPEVHDEHEPGGRAGGAGRAGHRRQVRRQGRQGAGASAAAGHGQGRQGAGGVGAGQGTAGQEGRRGAAEAGGAGGVAPHRHVPLHVGPQRLAPN

SEQ ID NO: 8817 - protein, 109 aa, Triticum aestivum
  misc_feature (1)..(109): Ceres Seq. ID no. 12585232
RRNHDQAKPSKQPRRDWWMSLRYMMSMSRVGARAALAVRDTVGRSAGKADRAQAPAQQQAMARAGRAPAESARAKAPLARRAAEERRRRAAQEESLRTVMFLSMWGPNA

SEQ ID NO: 8818 - protein, 91 aa, Triticum aestivum
  misc_feature (1)..(91): Ceres Seq. ID no. 12585233
MSLRYMMSMSRVGARAALAVRDTVGRSAGKADRAQAPAQQQAMARAGRAPAESARAKAPLARRAAEERRRRAAQEESLRTVMFLSMWGPNA

SEQ ID NO: 8819 - protein, 86 aa, Triticum aestivum
  misc_feature (1)..(86): Ceres Seq. ID no. 16625343
MMSMSRVGARAALAVRDTVGRSAGKADRAQAPAQQQAMARAGRAPAESARAKAPLARRAAEERRRRAAQEESLRTVMFLSMWGPNA

SEQ ID NO: 8820 - DNA, 1372 bp, Triticum aestivum
  misc_feature (1)..(1372): Ceres Seq. ID no. 12585444
catctcaacgaagaaaaggagcggccgaatctccagccccacgatttccccacgcgcacccaccaccgacccggcccccaaaaccctacgccgcgcaaaccctagcggcggccgccgcccccctcctcatcagcaatgtccggcatcctgcggctcgccggcgccgccagatccttctcccgcgcgttggctccggccgcgccgcaccaccgcaggctcgcggcatcggcggccgccctggcggaggacgatgcgtgctggaccgagtgggaggaggaggaggaggaggcgcggcggcagcgcgcccgcgcatcggcgaccgccgcggagtcttgcccggcggacggcggtcccaggggcgtgcagtgggtggtgatgggccgccccggcccgcagaagcacgcccacgccgcgcgcctcgccgaggtcctcgccgtgccgtacatctccatgggcacgctcgtcaggcaggagctcagccccacatcctcgctctacaagaagattgctaattcggtgaatgaagggaagcttgtgccagaggatatcatatttgggttgctgactaagcgtctcgaggagggatactacaagggtgaaaatggatttatccttgacggaatcccacgtacccgtgtgcaagctgagattcttgatgagatcgttgacatcgacttggttctgaacttcaaatgtgctggtaactgtttcatgaagaagcgatctggaggcgacatatgttcccactgtgggcagcattttggtgtcagcagtctggtgtctagggagcgtaatctctcccttggaagctctacatggcctgctcaggcacaacatgcttctgttataggcctggaaaacccaaggatggagaagctgcgtgcttatgctgagcagaccaagcagctggaagattactacaagaagcacaggaaacttgtggagttgaagacatccgctcgccctggtgaaacctggcaggggctcgtagctgcccttcacctccagcatctagacccatccccaacaccacacaaactcaccgtgtaattatcatccactgagtctaaggatctacattgtgatcctcacctgcgacatacgtagtatgtttctaagttttgtgagttctggctgaggagtcagtcggctgtggtgctttggtctttatctgttataggtataatgtaaggctctggtctttactgttatagataaaatgtaagcgattttgtagacccgcttgcttatatgtttgtaacggagagctttgaacttgcaagtgcaagtgtgcggtgtgccaggctccgctgtgctgttgttttgagtaccagttttgatcaatatataagttactgtgaatgttgtgcgc

SEQ ID NO: 8821 - protein, 304 aa, Triticum aestivum
  misc_feature (1)..(304): Ceres Seq. ID no. 12585445
MSGILRLAGAARSFSRALAPAAPHHRRLAASAAALAEDDACWTEWEEEEEEARRQRARASATAAESCPADGGPRGVQWVVMGRPGPQKHAHAARLAEVLAVPYISMGTLVRQELSPTSSLYKKIANSVNEGKLVPEDIIFGLLTKRLEEGYYKGENGFILDGIPRTRVQAEILDEIVDIDLVLNFKCAGNCFMKKRSGGDICSHCGQHFGVSSLVSRERNLSLGSSTWPAQAQHASVIGLENPRMEKLRAYAEQTKQLEDYYKKHRKLVELKTSARPGETWQGLVAALHLQHLDPSPTPHKLTV

SEQ ID NO: 8822 - protein, 224 aa, Triticum aestivum
  misc_feature (1)..(224): Ceres Seq. ID no. 12585446
MGRPGPQKHAHAARLAEVLAVPYISMGTLVRQELSPTSSLYKKIANSVNEGKLVPEDIIFGLLTKRLEEGYYKGENGFILDGIPRTRVQAEILDEIVDIDLVLNFKCAGNCFMKKRSGGDICSHCGQHFGVSSLVSRERNLSLGSSTWPAQAQHASVIGLENPRMEKLRAYAEQTKQLEDYYKKHRKLVELKTSARPGETWQGLVAALHLQHLDPSPTPHKLTV

SEQ ID NO: 8823 - protein, 199 aa, Triticum aestivum
  misc_feature (1)..(199): Ceres Seq. ID no. 12585447
MGTLVRQELSPTSSLYKKIANSVNEGKLVPEDIIFGLLTKRLEEGYYKGENGFILDGIPRTRVQAEILDEIVDIDLVLNFKCAGNCFMKKRSGGDICSHCGQHFGVSSLVSRERNLSLGSSTWPAQAQHASVIGLENPRMEKLRAYAEQTKQLEDYYKKHRKLVELKTSARPGETWQGLVAALHLQHLDPSPTPHKLTV

SEQ ID NO: 8824 - protein, 304 aa, Triticum aestivum; identical to SEQ ID NO: 8821
  misc_feature (1)..(304): Ceres Seq. ID no. 16611583

SEQ ID NO: 8825 - DNA, 902 bp, Triticum aestivum
  misc_feature (1)..(902): Ceres Seq. ID no. 12586454
aaaccacgcgaaggggaaacccaaattccatcccgacttctctacctctccggcctccacccaggagagccctaagccggaagcaccttacccttaagctctcttgacctctccccatggcgtccgcgtggtgcctcttggcgccggccgccgcgccggtggcggcgccgggcgctctcggcgtctccgcctccgaatccagaggcgtcttcgtcgcgcgggcggcggtccctgcgaggatgcggcgcaggtggggttcgctcgtggtgtgcgtagcccccgacgaggagaagattacgcggcgctcgcccctcgatttccccatcgaatgggagaaacctaagcctgggaggagacctgacatcttcccaaagttcagccctatgaaaacaccattgccccatccattaccagctgatgatcctttggatgatgatgaggaagaagaagaggaagaagcccaacctcaagaagaaccccaggaggatgatcctgacaaagaggatcctgaggaagatgacccagacaagccaattgagtaattttggatgaggtggcctgtggtagatagaaaccgtgtcgtattttccagagaatatgtggggtttgagctattcagaaatgttagtttgtgtcggcttatataggctctagacataagtttgctcagcaaggacctttgagcttttctgaagctatacaaattttgttccactagtttcaatatgaatttatatgtattcttctgaaaggtatttgcctatacgacacaataagctgttgaatgttcagtagttatgttcactgatttgatactccaatgtgctgaaagtgcattataagcaattaggtagttgtaatattggcaataacttggcatcagttagaatgacacattggtc

SEQ ID NO: 8826 - protein, 141 aa, Triticum aestivum
  misc_feature (1)..(141): Ceres Seq. ID no. 12586455
MASAWCLLAPAAAPVAAPGALGVSASESRGVFVARAAVPARMRRRWGSLVVCVAPDEEKITRRSPLDFPIEWEKPKPGRRPDIFPKFSPMKTPLPHPLPADDPLDDDEEEEEEEAQPQEEPQEDDPDKEDPEEDDPDKPIE

SEQ ID NO: 8827 - protein, 100 aa, Triticum aestivum
  misc_feature (1)..(100): Ceres Seq. ID no. 12586456
MRRRWGSLVVCVAPDEEKITRRSPLDFPIEWEKPKPGRRPDIFPKFSPMKTPLPHPLPADDPLDDDEEEEEEEAQPQEEPQEDDPDKEDPEEDDPDKPIE

SEQ ID NO: 8828 - protein, 141 aa, Triticum aestivum; identical to SEQ ID NO: 8826
  misc_feature (1)..(141): Ceres Seq. ID no. 16625345

SEQ ID NO: 8829 - DNA, 1242 bp, Triticum aestivum
  misc_feature (1)..(1242): Ceres Seq. ID no. 12586696
cgttcgtcagctcgctcaggcgcagcgcggctaaggctgcagcttcctttcctgctggggccagggggctcgttttcagctttctaaactgcgtctgtcttcaaaggggttttgggtgagagagacacccttcgtgtgcttccggtggtggagaagaagagttggcgcgtgccatgtcgcggtcgcgcacggtgcgtatctactgggacgatcccgacgtgacggactcgtccagcgaggacgacgagggctgcgccgctcggagggtgggaaggatggtgcgggagcttccgccggccccggcgccgctggtgcaggcggcggcggcggctccttcaccggagcagtgcagcgcgggagacgacgacctgccaaggcgtgttggtggatgtacccgtgcgcggaagaggctggccaagggcggcggctccgctgcgcagagcaccaagttccgcggcgtcaggcggcggccgtggggcaagtacgcggcggagatccgcgacccgtggcgcggcgtgcgcgtctggctcggcactttcgacaccgccgaggaggccgcgcgcgtgtacgacaacgcggccattcagctccgcggcgccaccgcgacgaccaacttctccacctcctccacgaattcggagggcgcccaggaggacctgacggcggccgggtacgagtccggcgcggagtcctcgcaggcggtgtcgtccccgacgtccgtgctccgcaaggtgccgtcgatgtcgtccttggcggaggacaggggcgactcggaggcctgtcaaggcgacgccgctgccggcagcagcctcagcgttccggaggagctgggcgagttcgtgccgttcgaggacgcgccggtctactccagcagcagcttctgggacttcgagccgcagtcggggttcctctacgccgagccgtcctcagccgaggaggcctcgtgggacgcgtccgccggcggcgagccgtgggccgcgccggtgcaggagaacgactacttccaggatttgcgcgacctgttcccgctcaaccagcttcccgcgattttctagatgggagcggcggagcttgcttccctatcttttttggtgtatgtcgagactcgagagtattttgtcgtgtacgtgtggtgtgtccccgtgtatttgtaacatgtccgtgtgcgttgctgctgtctgtgttgagtcgacgagaagaggaatgtacgatccgggtagagttttcactgctgtgctgggt

SEQ ID NO: 8830 - protein, 293 aa, Triticum aestivum
  misc_feature (1)..(293): Ceres Seq. ID no. 12586697
MSRSRTVRIYWDDPDVTDSSSEDDEGCAARRVGRMVRELPPAPAPLVQAAAAAPSPEQCSAGDDDLPRRVGGCTRARKRLAKGGGSAAQSTKFRGVRRRPWGKYAAEIRDPWRGVRVWLGTFDTAEEAARVYDNAAIQLRGATATTNFSTSSTNSEGAQEDLTAAGYESGAESSQAVSSPTSVLRKVPSMSSLAEDRGDSEACQGDAAAGSSLSVPEELGEFVPFEDAPVYSSSSFWDFEPQSGFLYAEPSSAEEASWDASAGGEPWAAPVQENDYFQDLRDLFPLNQLPAIF

SEQ ID NO: 8831 - protein, 284 aa, Triticum aestivum
  misc_feature (1)..(284): Ceres Seq. ID no. 12586698
MYPCAEEAGQGRRLRCAEHQVPRRQAAAVGQVRGGDPRPVARRARLARHFRHRRGGRARVRQRGHSAPRRHRDDQLLHLLHEFGGRPGGPDGGRVRVRRGVLAGGVVPDVRAPQGAVDVVLGGGQGRLGGLSRRRRCRQQPQRSGGAGRVRAVRGRAGLLQQQLLGLRAAVGVPLRRAVLSRGGLVGRVRRRRAVGRAGAGERLLPGFARPVPAQPASRDFLDGSGGACFPIFFGVCRDSRVFCRVRVVCPRVFVTCPCALLLSVLSRREEECTIRVEFSLLCW

SEQ ID NO: 8832 - protein, 259 aa, Triticum aestivum
  misc_feature (1)..(259): Ceres Seq. ID no. 12586699
MVRELPPAPAPLVQAAAAAPSPEQCSAGDDDLPRRVGGCTRARKRLAKGGGSAAQSTKFRGVRRRPWGKYAAEIRDPWRGVRVWLGTFDTAEEAARVYDNAAIQLRGATATTNFSTSSTNSEGAQEDLTAAGYESGAESSQAVSSPTSVLRKVPSMSSLAEDRGDSEACQGDAAAGSSLSVPEELGEFVPFEDAPVYSSSSFWDFEPQSGFLYAEPSSAEEASWDASAGGEPWAAPVQENDYFQDLRDLFPLNQLPAIF

SEQ ID NO: 8833 - protein, 293 aa, Triticum aestivum; identical to SEQ ID NO: 8830
  misc_feature (1)..(293): Ceres Seq. ID no. 16625346

SEQ ID NO: 8834 - DNA, 812 bp, Triticum aestivum
  misc_feature (1)..(812): Ceres Seq. ID no. 12587328
aacaacaacaacaacatccaaaatccaaacccaagccaagaacacacgctgttctgaatctgtccatcagtctccgcttccactgattcgtccagccgagaagaagaagagctgcagaagatgagcaagctctggaccatcctcacccacctccacaccctcgcagggcctggcgtgatgctcctgtacccgctgtacgcgtcggtgcaggcgatggagagcccgtcgaagctggacgacgagcagtggctggcctactggatcctctactccttcgtcacgctcgtcgagatggtcctcgagtccctcatctactggataccgatctggtacgagctgaagctgctgttcctggcgtggctggcgctgcccaacttcaggggagcggccttcatctacgacaggttcgtcagggagcagctcaggaagcacggcctcaccaaccaccccggcagcggcatcagcagcagcaagaaggagaacggcggcaagtcgtcctcgccgttgacgtcccccaaggagaaggagaacgccaagagcaggttcctctcctttggcgctcccaagaaagaccactgaagtagattggggcagtaaccagagatccctgcggctagcttcttggcttgtggtgtttttttggtttgtttgagattttagcttgtggtcttgggagtattacatgtcttgtccaaaaaagttgtactagcactccatagatgaggccctcggttgcaggctagctagatggtggcttgtggtgttgtagtattattacatatatctgtcccgaaaaatgttccggggttggg

SEQ ID NO: 8835 - protein, 152 aa, Triticum aestivum
  misc_feature (1)..(152): Ceres Seq. ID no. 12587329
MSKLWTILTHLHTLAGPGVMLLYPLYASVQAMESPSKLDDEQWLAYWILYSFVTLVEMVLESLIYWIPIWYELKLLFLAWLALPNFRGAAFIYDRFVREQLRKHGLTNHPGSGISSSKKENGGKSSSPLTSPKEKENAKSRFLSFGAPKKDH

SEQ ID NO: 8836 - protein, 133 aa, Triticum aestivum
  misc_feature (1)..(133): Ceres Seq. ID no. 12587330
MLLYPLYASVQAMESPSKLDDEQWLAYWILYSFVTLVEMVLESLIYWIPIWYELKLLFLAWLALPNFRGAAFIYDRFVREQLRKHGLTNHPGSGISSSKKENGGKSSSPLTSPKEKENAKSRFLSFGAPKKDH

SEQ ID NO: 8837 - protein, 121 aa, Triticum aestivum
  misc_feature (1)..(121): Ceres Seq. ID no. 12587331
MESPSKLDDEQWLAYWILYSFVTLVEMVLESLIYWIPIWYELKLLFLAWLALPNFRGAAFIYDRFVREQLRKHGLTNHPGSGISSSKKENGGKSSSPLTSPKEKENAKSRFLSFGAPKKDH

SEQ ID NO: 8838 - protein, 152 aa, Triticum aestivum; identical to SEQ ID NO: 8835
  misc_feature (1)..(152): Ceres Seq. ID no. 16625348

SEQ ID NO: 8839 - DNA, 1083 bp, Triticum aestivum
  misc_feature (1)..(1083): Ceres Seq. ID no. 12593058
acaaagccagctcacctcacaccctatcacactcgacactcgtcagtggtcatagttcatcactgcacagctctcccactcggccactctcactcccacgccgacactcgccataatgcgccgcctccacctcgccgccgccgtcctcgccgtcttcctccccctcgccgtctccgcggccgggggcaaagcagcggcagctaaggcgcccgttgccccgccggccccgccgaacatcacggcggccatggcgaagggcgggtgcaaggcgttcgcggccctggtggcggcctcgccggacgcgcactccacgttccagtcggccggggacggcggcgtgacggccttctgccccagcgacgacgccgtgaggtccttcatgcccaggtacaagaacctcagcgccgacggcaaggcgtcgctgctgctgttccacgccgtgcccgtgtactacgcgccgcggagcctcaagtccaacaacggcgtcatgaacacgctcgccaccgacggctccgccaacaacttcaacttcacggtgcagaacgagggcgagcaggtgaccatcaagacggacgcctccgaccacgccgcgcgggtcaagtccaccgtctacgacaaggaccccatcgccatctacgccgtggacacggtgctcgagccggtggagctcttcgagccggcggagtccccggcgccggcgccggctcccgcccctgtcgccgacgcgcccaaggcccccaagaagcaggcgcgccaccggcctgtagcggacgcgcccggaccggccgccgaggacgcggcgcccgccgaccagaggaagaactctaagaagagcgcggcgtccgccgccccgtgtctgccatgggccgcagtcctgcctgtcgtcgtggccgtggccgccgctctggcttagccgcttgtcctccttcgcggtggacctgcacgggaggtagtggtgtgtcggtggattgcgttgcgtgtgtcctttgtgtctgtcggtcagtgcgtgtgctcgtgcagtgaaatttctatctttactctttcttgccacattaatgttgtttagtataataatttgatgtg

SEQ ID NO: 8840 - protein, 265 aa, Triticum aestivum
  misc_feature (1)..(265): Ceres Seq. ID no. 12593059
MRRLHLAAAVLAVFLPLAVSAAGGKAAAAKAPVAPPAPPNITAAMAKGGCKAFAALVAASPDAHSTFQSAGDGGVTAFCPSDDAVRSFMPRYKNLSADGKASLLLFHAVPVYYAPRSLKSNNGVMNTLATDGSANNFNFTVQNEGEQVTIKTDASDHAARVKSTVYDKDPIAIYAVDTVLEPVELFEPAESPAPAPAPAPVADAPKAPKKQARHRPVADAPGPAAEDAAPADQRKNSKKSAASAAPCLPWAAVLPVVVAVAAALA

SEQ ID NO: 8841 - protein, 221 aa, Triticum aestivum
  misc_feature (1)..(221): Ceres Seq. ID no. 12593060
MAKGGCKAFAALVAASPDAHSTFQSAGDGGVTAFCPSDDAVRSFMPRYKNLSADGKASLLLFHAVPVYYAPRSLKSNNGVMNTLATDGSANNFNFTVQNEGEQVTIKTDASDHAARVKSTVYDKDPIAIYAVDTVLEPVELFEPAESPAPAPAPAPVADAPKAPKKQARHRPVADAPGPAAEDAAPADQRKNSKKSAASAAPCLPWAAVLPVVVAVAAALA

SEQ ID NO: 8842 - protein, 177 aa, Triticum aestivum
  misc_feature (1)..(177): Ceres Seq. ID no. 12593061
MPRYKNLSADGKASLLLFHAVPVYYAPRSLKSNNGVMNTLATDGSANNFNFTVQNEGEQVTIKTDASDHAARVKSTVYDKDPIAIYAVDTVLEPVELFEPAESPAPAPAPAPVADAPKAPKKQARHRPVADAPGPAAEDAAPADQRKNSKKSAASAAPCLPWAAVLPVVVAVAAALA

SEQ ID NO: 8843 - protein, 265 aa, Triticum aestivum; identical to SEQ ID NO: 8840
  misc_feature (1)..(265): Ceres Seq. ID no. 16625350

SEQ ID NO: 8844 - DNA, 967 bp, Triticum aestivum
  misc_feature (1)..(967): Ceres Seq. ID no. 12593285
actcttccccttctctcagatccgaaaactcggggagactggtagttggctgttcggatcggtccatccatctcagtggcagtctggtaattggggacgaggtatgggcctcctcgacaagttgtgggacgacaccgtcgcggggccccaaccggacaccggcctcggccgcctccgcaaactcgccgcccgccccgccgccgtcaagatcaacgatgtggctccgggcgccgcgacggtgatcccacatacgacgccggccggcggcgaggatgcgccgatgaaagtcacacgcagcatcatgattaagcggccggcggggtacccctcgtcgccgaggagcgcggccagcacgccgccagcctcgccgctaggatccacgccgcccatctccccgttcgcgggcggcggtggtcgcttcagaaggaaatcatcatcagatgcgtacgagagggctacaccacctggggcgtcgaccagtcaccctcctccaccctttgaagtgtaactgaccagcacgctcatgctcgtttttgctcctctcccgctctacttaatgcaagcccgaggaggaagagaggacgtatcagagaaatcgagaaacgccaaggatctgcctttcctctactgtgatagtataatatagatgaatgtgtagtgttctgtttctactatatatgcagtgcatgcgtgtatggttatgtgtagagaaggtgttgaaagttgctgctgctgtgctgtgctgtgttagtatgtacttaggtcacccctgggctggcacgcagctcctcgtttgtgttttgtctactatgttgtggaggcctcgtccttccatcacgttcgtgtgtggtgcggatggaagctgtaatgttaagtagggggatgagatacggtgtacgtaatatgtgtaattttgcttgatggtgttatctcgagtagttcccggtgtttgcttgaacttttcagt

SEQ ID NO: 8845 - protein, 168 aa, Triticum aestivum
  misc_feature (1)..(168): Ceres Seq. ID no. 12593286
LFPFSQIRKLGETGSWLFGSVHPSQWQSGNWGRGMGLLDKLWDDTVAGPQPDTGLGRLRKLAARPAAVKINDVAPGAATVIPHTTPAGGEDAPMKVTRSIMIKRPAGYPSSPRSAASTPPASPLGSTPPISPFAGGGGRFRRKSSSDAYERATPPGASTSHPPPPFEV

SEQ ID NO: 8846 - protein, 134 aa, Triticum aestivum
  misc_feature (1)..(134): Ceres Seq. ID no. 12593287
MGLLDKLWDDTVAGPQPDTGLGRLRKLAARPAAVKINDVAPGAATVIPHTTPAGGEDAPMKVTRSIMIKRPAGYPSSPRSAASTPPASPLGSTPPISPFAGGGGRFRRKSSSDAYERATPPGASTSHPPPPFEV

SEQ ID NO: 8847 - protein, 134 aa, Triticum aestivum; identical to SEQ ID NO: 8846
  misc_feature (1)..(134): Ceres Seq. ID no. 16611868

SEQ ID NO: 8848 - DNA, 757 bp, Triticum aestivum
  misc_feature (1)..(757): Ceres Seq. ID no. 12598353
aaggagggaaagacgactattttcctccgcctcgatcccatcgccgtctcccccccacacctcgatcccgccgccgccccacccaccatggcgcgggcgaagccgtcgtcggcggcggcgaagaagagccaggcggcgcagcagggcggcggggccgggcacgcggcgccgtccgggctcgcgcggtacctcgacccggaggcgccgtgggacaaggaccggctgctggacgccgtgcactggatccgccaggcggtgggcctcgcctgcggccttctctggggcgccgtcccgctcgtcggcgccgcctggatcgtcctgttcgtggccatttcttctggcataatttactggtactatgcgcacctattgaaggtcgacgaggaagaatttggaggccatggcgcgctgcttcaggaggggatgtttgcatctttcaccctttttcctgctttcatggatttctttgtgtacagtttggctcacttttgatgagaagctcctttgttgaacatacccttgatttgggatcggattggcggaaaaaaattcaccagaactctgtagattattgaagagccctagaacagcattgtatgaaatcggttcaggcagtcatgttgtctctgaatcccagtgtaattttgatagaacatcttagcataccagttgttggcagaacatgttcagtatgcttgacatgtaactattggatatcattctcctgcgtcgattcaataaaatgttttaacatgtg

SEQ ID NO: 8849 - protein, 190 aa, Triticum aestivum
  misc_feature (1)..(190): Ceres Seq. ID no. 12598354
GGKDDYFPPPRSHRRLPPTPRSRRRPTHHGAGEAVVGGGEEEPGGAAGRRGRARGAVRARAVPRPGGAVGQGPAAGRRALDPPGGGPRLRPSLGRRPARRRRLDRPVRGHFFWHNLLVLCAPIEGRRGRIWRPWRAASGGDVCIFHPFSCFHGFLCVQFGSLLMRSSFVEHTLDLGSDWRKKIHQNSVDY

SEQ ID NO: 8850 - protein, 163 aa, Triticum aestivum
  misc_feature (1)..(163): Ceres Seq. ID no. 12598355
KEGKTTIFLRLDPIAVSPPHLDPAAAPPTMARAKPSSAAAKKSQAAQQGGGAGHAAPSGLARYLDPEAPWDKDRLLDAVHWIRQAVGLACGLLWGAVPLVGAAWIVLFVAISSGIIYWYYAHLLKVDEEEFGGHGALLQEGMFASFTLFPAFMDFFVYSLAHF

SEQ ID NO: 8851 - protein, 134 aa, Triticum aestivum
  misc_feature (1)..(134): Ceres Seq. ID no. 12598356
MARAKPSSAAAKKSQAAQQGGGAGHAAPSGLARYLDPEAPWDKDRLLDAVHWIRQAVGLACGLLWGAVPLVGAAWIVLFVAISSGIIYWYYAHLLKVDEEEFGGHGALLQEGMFASFTLFPAFMDFFVYSLAHF

SEQ ID NO: 8852 - protein, 134 aa, Triticum aestivum; identical to SEQ ID NO: 8851
  misc_feature (1)..(134): Ceres Seq. ID no. 16611911

SEQ ID NO: 8853 - DNA, 1230 bp, Triticum aestivum
  misc_feature (1)..(1230): Ceres Seq. ID no. 12598859
actcacaaatagcaccatacacgacacggacacgtacgcaaaaccttcttcccaaatctaaacccctctcttctccaaatggccaagagaaacctcctcctcctcctggcgctaatggcgctcgccacaagcatggaagccgcgtcggctaccacgagcacgaggaagctcatgttcctggtccagcccaagccgaacctcctcacgtaccacaacggcgccgtgctgcacggcgacatccccgtctccgtcctctggtatggccgcttcacggcggcgcagaaggccatcgtatccgacttcctcctctccctctcctccgcgccgcgcgcgtccccggcgccgtccgtgtcccagtggtggagcagcatccaccagctgtacctctccaaggcggcggccgtcggcaagcacggcgccggcgccaccaaggccgcccgggtggtcctgtccggccaggtctccgacgaggcgtgctcgctcgggaagagcctgaagctgtcccagctcccggcgctggcggcgaaggcgaggcccgccaagggcggtatcgcgctggtgctcacagcgcaggacgtgggcgtggagggcttctgcatgagccggtgcggccggcacgggaccgtggacgccaagtccggcacggcctacgtgtgggccggcaacccggcgacgcagtgcgccgggcagtgcgcgtggccgttccaccagccggcgtacgggccgcaggcgccgccgctggccgcgccgaacggcgacgtgggcatggacgggctcatcatcaacgtggcgagcatggtggccggcgcggtgaccaacccgttcggcgacgggttctaccagggggagcgcgaggcgccgctggaggccgcgacggcgtgcccgggggtgtacggcaagggcgcgtaccccgggtacgccggccagctgctggtggacggcgccaccggagcgagctacaacgcccacggtgcgcacgggaggaagtacctgctcccggcgctgttcgaccccgccacctcggcctgctccacgctggtgtaggagtacggcggcacagtggtagcgacaagtgatgtcagtccaatccgctagctgcccgtctagccaagagtgtattgggtacaactagtactgtaccgtagtgcatatatgtgtaaatagttcgtatatgagcttgtgtttggatcttctcatgctaaataaaaaatgtaaatcagcctttgtact

SEQ ID NO: 8854 - protein, 357 aa, Triticum aestivum
  misc_feature (1)..(357): Ceres Seq. ID no. 12598860
SQIAPYTTRTRTQNLLPKSKPLSSPNGQEKPPPPPGANGARHKHGSRVGYHEHEEAHVPGPAQAEPPHVPQRRRAARRHPRLRPLVWPLHGGAEGHRIRLPPLPLLRAARVPGAVRVPVVEQHPPAVPLQGGGRRQARRRRHQGRPGGPVRPGLRRGVLAREEPEAVPAPGAGGEGEARQGRYRAGAHSAGRGRGGLLHEPVRPARDRGRQVRHGLRVGRQPGDAVRRAVRVAVPPAGVRAAGAAAGRAERRRGHGRAHHQRGEHGGRRGDQPVRRRVLPGGARGAAGGRDGVPGGVRQGRVPRVRRPAAGGRRHRSELQRPRCAREEVPAPGAVRPRHLGLLHAGVGVRRHSGSDK

SEQ ID NO: 8855 - protein, 321 aa, Triticum aestivum
  misc_feature (1)..(321): Ceres Seq. ID no. 12598861
MAKRNLLLLLALMALATSMEAASATTSTRKLMFLVQPKPNLLTYHNGAVLHGDIPVSVLWYGRFTAAQKAIVSDFLLSLSSAPRASPAPSVSQWWSSIHQLYLSKAAAVGKHGAGATKAARVVLSGQVSDEACSLGKSLKLSQLPALAAKARPAKGGIALVLTAQDVGVEGFCMSRCGRHGTVDAKSGTAYVWAGNPATQCAGQCAWPFHQPAYGPQAPPLAAPNGDVGMDGLIINVASMVAGAVTNPFGDGFYQGEREAPLEAATACPGVYGKGAYPGYAGQLLVDGATGASYNAHGAHGRKYLLPALFDPATSACSTLV

SEQ ID NO: 8856 - protein, 309 aa, Triticum aestivum
  misc_feature (1)..(309): Ceres Seq. ID no. 12598862
MALATSMEAASATTSTRKLMFLVQPKPNLLTYHNGAVLHGDIPVSVLWYGRFTAAQKAIVSDFLLSLSSAPRASPAPSVSQWWSSIHQLYLSKAAAVGKHGAGATKAARVVLSGQVSDEACSLGKSLKLSQLPALAAKARPAKGGIALVLTAQDVGVEGFCMSRCGRHGTVDAKSGTAYVWAGNPATQCAGQCAWPFHQPAYGPQAPPLAAPNGDVGMDGLIINVASMVAGAVTNPFGDGFYQGEREAPLEAATACPGVYGKGAYPGYAGQLLVDGATGASYNAHGAHGRKYLLPALFDPATSACSTLV

SEQ ID NO: 8857 - protein, 321 aa, Triticum aestivum; identical to SEQ ID NO: 8855
  misc_feature (1)..(321): Ceres Seq. ID no. 16612164

SEQ ID NO: 8858 - DNA, 1217 bp, Triticum aestivum
  misc_feature (1)..(1217): Ceres Seq. ID no. 12613701
aactgggaccaatgtgggcggttgtataaacgagtaggcgtgccgcacagagcaagcaagaggccgcgcgcagcacagtgccgcagccgctgcaagacgcaaagagagagccaagccttttccctttcggaaaggacagacagagtcgaggtaccgcggctagggatggggttcctcccgctgcttcaggtcgtcctcctggccgccgcggcggcggcgagggctccggcggcgcgggcgtggggcgaggagggccacttcatgacctgcaagatcgccgagggttttttgacgagcgaggcgtcggcggcggtgaaggggctcctgccggagtgggccaacggcgagctcgcggcggcgtgctcgtggccggacgccgtgcggcgccaaatgccgtggtccagctccctgcacttcgccgacacccccggcgactgcaagttcagctacgccagggactgccacggcacgaaaggggagaaggacatgtgcgtggtgggaggcatcaacaactacactgccgcgctccaagactcatcaagcccgtataatcggacggagagcctgctgttcctgtcgcacttcctgggcgacatccaccagcccatgcactgcggccgcaccgccgacctcggcggcaacaccatcgtcgtcacttggtacaacacgaccaagaccaaccttcacaaggtgtgggatgagaaggtcatcgaaacggccatgaacaggttctacaaggacgaccgaagcgccatgatccaggccatcaagctcaaccttaccaacgagtggtctaaagaagagaatcagtgggcggcgtgctatactcgaaccacaacctgtgctgacaagtacgcagaggagagtgcggagctgtcgtgccccgcgtacgtgggcgctgagcaaggctccaacttggaagatgagtacttcttctcggcgctcccggtggttcagaagaggattgcccagggaggcgtcaggctgggtgcgatcctcaaccagatcttcagtgggaagaacaacagcagcattcagagcagctaaggtccattagacgaaactaacgaatgagattgtgcaaggggttagcccaaacgttatgaaggagaataaggttatcatgttcgtctgaccatgttgacttcatactatgtaagtgagttggtcagtgcgtacttctgtaatcgaatccagtatttcctgaatgtgatgat

SEQ ID NO: 8859 - protein, 348 aa, Triticum aestivum
  misc_feature (1)..(348): Ceres Seq. ID no. 12613702
NWDQCGRLYKRVGVPHRASKRPRAAQCRSRCKTQRESQAFSLSERTDRVEVPRLGMGFLPLLQVVLLAAAAAARAPAARAWGEEGHFMTCKIAEGFLTSEASAAVKGLLPEWANGELAAACSWPDAVRRQMPWSSSLHFADTPGDCKFSYARDCHGTKGEKDMCVVGGINNYTAALQDSSSPYNRTESLLFLSHFLGDIHQPMHCGRTADLGGNTIVVTWYNTTKTNLHKVWDEKVIETAMNRFYKDDRSAMIQAIKLNLTNEWSKEENQWAACYTRTTTCADKYAEESAELSCPAYVGAEQGSNLEDEYFFSALPVVQKRIAQGGVRLGAILNQIFSGKNNSSIQSS

SEQ ID NO: 8860 - protein, 293 aa, Triticum aestivum
  misc_feature (1)..(293): Ceres Seq. ID no. 12613703
MGFLPLLQVVLLAAAAAARAPAARAWGEEGHFMTCKIAEGFLTSEASAAVKGLLPEWANGELAAACSWPDAVRRQMPWSSSLHFADTPGDCKFSYARDCHGTKGEKDMCVVGGINNYTAALQDSSSPYNRTESLLFLSHFLGDIHQPMHCGRTADLGGNTIVVTWYNTTKTNLHKVWDEKVIETAMNRFYKDDRSAMIQAIKLNLTNEWSKEENQWAACYTRTTTCADKYAEESAELSCPAYVGAEQGSNLEDEYFFSALPVVQKRIAQGGVRLGAILNQIFSGKNNSSIQSS

SEQ ID NO: 8861 - protein, 261 aa, Triticum aestivum
  misc_feature (1)..(261): Ceres Seq. ID no. 12613704
MTCKIAEGFLTSEASAAVKGLLPEWANGELAAACSWPDAVRRQMPWSSSLHFADTPGDCKFSYARDCHGTKGEKDMCVVGGINNYTAALQDSSSPYNRTESLLFLSHFLGDIHQPMHCGRTADLGGNTIVVTWYNTTKTNLHKVWDEKVIETAMNRFYKDDRSAMIQAIKLNLTNEWSKEENQWAACYTRTTTCADKYAEESAELSCPAYVGAEQGSNLEDEYFFSALPVVQKRIAQGGVRLGAILNQIFSGKNNSSIQSS

SEQ ID NO: 8862 - protein, 293 aa, Triticum aestivum; identical to SEQ ID NO: 8860
  misc_feature (1)..(293): Ceres Seq. ID no. 16625366

SEQ ID NO: 8863 - DNA, 1424 bp, Triticum aestivum
  misc_feature (1)..(1424): Ceres Seq. ID no. 12615230
ctaaaccacccctgaaaaccctcagacgaacgaaagacctagcgctcctctcccttcgtctctcgcgactggcggcggcggtcgaacgaggccacccgacggcggcagagcgagtaggtgctttccaagcttcgccagaggtgtaaacccttcgctagaggcctcagtccctttcccgcgcggcttgagcaagatgagcaagatggcgatcagggttcccaagtccatgcgcgccaagcgtgagctcctcaagcacgcgcccaagctcgttgagaatggcaagaagatgcttattcttcatggtacaaagaccagcgcagttttgaactctgtgctggcagatcttttccacctgaagcgtgatcatgctgtcaagtacaccaagaagaacgacagcatcaggccatttgagagcgggggtgaaacttccctggagttcttctcccttaaatctgactgcagcctcttagtgtatggttctcattcaaagaagaggcccaacaatcttgttctgggaaggacttacgatcaccacatatatgacctcgttgaagtgggagttgagaactacaaatccatagaatcctatgcatatgataaaaagttggcacctaaacttgggacaaagcctttctttgctttcattggggagcactttgagagtgttgaaggactgaagcatttgaaggaaatgctgcttgatcatttcaaaggagaggtggtagagaatctgaaccttgctggtgtagatcggatattcgtgtgcacagcaatttctcctactaccgtctacatgatgcactgcgctctccgtctaaaaaggtcaggcacatctattcctagaatggagctggttgaagttgggccttcagtggacctggtacttaggcggcaccgacaagcagctgaaagtttacagaaagaagctatgaaggctcctggtcatgctaagaaggtgaaaaatgtcaccaataatccagttgaaggcaagcagggcaggatctacattccagaccaggaggtctcaaaattgaccgtaacaagcaacataaagggtctgaagcgggagcgccgtgacgccaagaaaaacaaggagcactcgaagaagcaaaaggtggccgaaaaccctgagtgaccactggagaaggctagtatctgtaaccggtcagtttaaggactttcggtcgataggttcagtggtaaatagtccagtaccatcttttaaggctatcaaacctgtgtacggacttaggcatcagtatcgaggcagcctctctatcagacataagcatgaaattttggagcaacatatgctacaagtattttttttactgttgttattcgcccctgatattagccaatcagagacgactgttgtgatgacatggttaagtttggttatcatggacattatgccttttctg

SEQ ID NO: 8864 - protein, 313 aa, Triticum aestivum
  misc_feature (1)..(313): Ceres Seq. ID no. 12615231
MSKMAIRVPKSMRAKRELLKHAPKLVENGKKMLILHGTKTSAVLNSVLADLFHLKRDHAVKYTKKNDSIRPFESGGETSLEFFSLKSDCSLLVYGSHSKKRPNNLVLGRTYDHHIYDLVEVGVENYKSIESYAYDKKLAPKLGTKPFFAFIGEHFESVEGLKHLKEMLLDHFKGEVVENLNLAGVDRIFVCTAISPTTVYMMHCALRLKRSGTSIPRMELVEVGPSVDLVLRRHRQAAESLQKEAMKAPGHAKKVKNVTNNPVEGKQGRIYIPDQEVSKLTVTSNIKGLKRERRDAKKNKEHSKKQKVAENPE

SEQ ID NO: 8865 - protein, 310 aa, Triticum aestivum
  misc_feature (1)..(310): Ceres Seq. ID no. 12615232
MAIRVPKSMRAKRELLKHAPKLVENGKKMLILHGTKTSAVLNSVLADLFHLKRDHAVKYTKKNDSIRPFESGGETSLEFFSLKSDCSLLVYGSHSKKRPNNLVLGRTYDHHIYDLVEVGVENYKSIESYAYDKKLAPKLGTKPFFAFIGEHFESVEGLKHLKEMLLDHFKGEVVENLNLAGVDRIFVCTAISPTTVYMMHCALRLKRSGTSIPRMELVEVGPSVDLVLRRHRQAAESLQKEAMKAPGHAKKVKNVTNNPVEGKQGRIYIPDQEVSKLTVTSNIKGLKRERRDAKKNKEHSKKQKVAENPE

SEQ ID NO: 8866 - protein, 302 aa, Triticum aestivum
  misc_feature (1)..(302): Ceres Seq. ID no. 12615233
MRAKRELLKHAPKLVENGKKMLILHGTKTSAVLNSVLADLFHLKRDHAVKYTKKNDSIRPFESGGETSLEFFSLKSDCSLLVYGSHSKKRPNNLVLGRTYDHHIYDLVEVGVENYKSIESYAYDKKLAPKLGTKPFFAFIGEHFESVEGLKHLKEMLLDHFKGEVVENLNLAGVDRIFVCTAISPTTVYMMHCALRLKRSGTSIPRMELVEVGPSVDLVLRRHRQAAESLQKEAMKAPGHAKKVKNVTNNPVEGKQGRIYIPDQEVSKLTVTSNIKGLKRERRDAKKNKEHSKKQKVAENPE

SEQ ID NO: 8867 - protein, 310 aa, Triticum aestivum; identical to SEQ ID NO: 8865
  misc_feature (1)..(310): Ceres Seq. ID no. 16625368

SEQ ID NO: 8868 - DNA, 1237 bp, Triticum aestivum
  misc_feature (1)..(1237): Ceres Seq. ID no. 12615444
acccctattccccatccctacgcccgcctcctcctcctcctccgcatcccattctcccccaaatcggccgagtaaaccctagctaaaccccgacctccgccgccggcgagcgagatgaacttcaagggcgcgcggatgccgagcgcgccggcgggcgcgggcgcgctggtcaagctcgggctgctcggcggcgccgcgctctacctcggcaacaagaccctctacaacgtcgagggaggccaccgggccatcgtcttcaaccgcctcgaggggatcaaggacaaggtctaccccgaggggactcacatcgtcatcccgtggttcgagaggcccatcatctacgacgtccgcgcgcgacccaacctcgtcgagagcacctccgggagccgggatctccagatggtgagaattggtcttcgtgttcttacacgacccatgccagagagactaccaactatgtacaggaccctgggggagaactacaatgagagagtgttgccttcgatcattcatgaaacactcaaagctgtggttgcccaatacaatgccagtcagctaatcacacagagagaggctgtgagcagggagatcaggaagattctgacagagagggcgaagaacttcaacatcgctctggatgatgtgtccattaccagtctaagctttggtaaagagttcactcatgccattgaagccaaacaggttgctgctcaggaagctgagcgtgccaagttcattgttgagaaggctgagcaagacaagaaaagtgcaattatcagggcacagggagaggcaaagagtgcagagctgattggcaatgccatcgccaacaaccctgctttcgtggcgctcaggcagattgaagccgccagggagatcgcccacaccattgcagcctccaacaacaaggtgttccttgactcgggtgacctgctgcttgggctccagtcgctcaagatgttgaacaacaacaacaagaaatgagaccgtctctgtcacgcatgttgtggttgccgccagtcttgtctacattggaagaagagtacttttgagaggaacgaacgcttagtttctagcattcccgacccgaaaacaagaaagacgcccttgctactgtgaattatttgtgcacttttcaagtgaacctgtcagctgctaccgctgtgcgtagcttataacgtctgggcggttatgtggtgattatattggccttttcatgttcatcttggcttgttcc

SEQ ID NO: 8869 - protein, 289 aa, Triticum aestivum
  misc_feature (1)..(289): Ceres Seq. ID no. 12615445
MNFKGARMPSAPAGAGALVKLGLLGGAALYLGNKTLYNVEGGHRAIVFNRLEGIKDKVYPEGTHIVIPWFERPIIYDVRARPNLVESTSGSRDLQMVRIGLRVLTRPMPERLPTMYRTLGENYNERVLPSIIHETLKAVVAQYNASQLITQREAVSREIRKILTERAKNFNIALDDVSITSLSFGKEFTHAIEAKQVAAQEAERAKFIVEKAEQDKKSAIIRAQGEAKSAELIGNAIANNPAFVALRQIEAAREIAHTIAASNNKVFLDSGDLLLGLQSLKMLNNNNKK

SEQ ID NO: 8870 - protein, 282 aa, Triticum aestivum
  misc_feature (1)..(282): Ceres Seq. ID no. 12615446
MPSAPAGAGALVKLGLLGGAALYLGNKTLYNVEGGHRAIVFNRLEGIKDKVYPEGTHIVIPWFERPIIYDVRARPNLVESTSGSRDLQMVRIGLRVLTRPMPERLPTMYRTLGENYNERVLPSIIHETLKAVVAQYNASQLITQREAVSREIRKILTERAKNFNIALDDVSITSLSFGKEFTHAIEAKQVAAQEAERAKFIVEKAEQDKKSAIIRAQGEAKSAELIGNAIANNPAFVALRQIEAAREIAHTIAASNNKVFLDSGDLLLGLQSLKMLNNNNKK

SEQ ID NO: 8871 - protein, 194 aa, Triticum aestivum
  misc_feature (1)..(194): Ceres Seq. ID no. 12615447
MVRIGLRVLTRPMPERLPTMYRTLGENYNERVLPSIIHETLKAVVAQYNASQLITQREAVSREIRKILTERAKNFNIALDDVSITSLSFGKEFTHAIEAKQVAAQEAERAKFIVEKAEQDKKSAIIRAQGEAKSAELIGNAIANNPAFVALRQIEAAREIAHTIAASNNKVFLDSGDLLLGLQSLKMLNNNNKK

SEQ ID NO: 8872 - protein, 289 aa, Triticum aestivum; identical to SEQ ID NO: 8869
  misc_feature (1)..(289): Ceres Seq. ID no. 16612149

SEQ ID NO: 8873 - DNA, 1207 bp, Triticum aestivum
  misc_feature (1)..(1207): Ceres Seq. ID no. 12615854
aacaacagccaatccatcccatggaataataaagaaactggggcaccccactgcgtggccggtggcgaccgacggcgacccccgccctcaccgtaccctgctacgctccggcgagtccggccgaccgcctccgccacctttcgccgcacggcgtgaccgagtggacgggctcgacggcgggcatcggccggcgcgcgagggcgggagggatcggcgatgagcttcgcggatctggagtccggggcgctgcaggcgccccggagggggaggggcgccgacgccacgcgcgcgctcgtcttccagatcaccaccgcggtgtcctcctaccgccgcctcctcaactcgctcggcacgcccaaggacacgcccgccctccgtgatcagctgcagaagactagtcataaagtcctgcaattggcgaaggatgcgaaggagaaactgacgagtgctgctgaagcagacaagagcactggaactagtgcagacaagcgggtagccgacatgaagcttgccaaagattttgctgcgacgatggaggaattcaggaaacttcagaatcttgcaattcagagggagatggcatataagccggttgttccccagggtgctcagccaagctatactatgaatgatggaagatctgattttgataaaatgcctgaacagcgcgcattgcttgcagaaccaaacaggctagaggtgttgcaattggataatgaaattgttttcaatgaggctatcatcgaggaaagggaccaggcgattcaagacatccaacagcagattggtgaagtacatgaagcatttaaggatcttgctacgctcgtgcattcgcaaggaggcataatagaggaagtcgacagcaacattgaaaactctgcagccgcgaccagtgaagcgaagaaagaaatcggcaaagcgtccaagactcagaagtcaaattcatccttgctttgcctgcttatggtgatctttggggttgttttgcttatcgtgataatagttttggcatcttgagacacggatgcttagaggcctattggtgcactctgaggagccatattacgtgcaagattaatcctcgctgtgcgccgaagactgtcgctaactgaagtgtacattttctttttctcccctcttttttccttgtggtttgttagtgcgtattcttatgtggcgtgagtcctttttttttccagcggcttgc

SEQ ID NO: 8874 - protein, 266 aa, Triticum aestivum
  misc_feature (1)..(266): Ceres Seq. ID no. 12615855
MSFADLESGALQAPRRGRGADATRALVFQITTAVSSYRRLLNSLGTPKDTPALRDQLQKTSHKVLQLAKDAKEKLTSAAEADKSTGTSADKRVADMKLAKDFAATMEEFRKLQNLAIQREMAYKPVVPQGAQPSYTMNDGRSDFDKMPEQRALLAEPNRLEVLQLDNEIVFNEAIIEERDQAIQDIQQQIGEVHEAFKDLATLVHSQGGIIEEVDSNIENSAAATSEAKKEIGKASKTQKSNSSLLCLLMVIFGVVLLIVIIVLAS

SEQ ID NO: 8875 - protein, 171 aa, Triticum aestivum
  misc_feature (1)..(171): Ceres Seq. ID no. 12615856
MKLAKDFAATMEEFRKLQNLAIQREMAYKPVVPQGAQPSYTMNDGRSDFDKMPEQRALLAEPNRLEVLQLDNEIVFNEAIIEERDQAIQDIQQQIGEVHEAFKDLATLVHSQGGIIEEVDSNIENSAAATSEAKKEIGKASKTQKSNSSLLCLLMVIFGVVLLIVIIVLAS

SEQ ID NO: 8876 - protein, 161 aa, Triticum aestivum
  misc_feature (1)..(161): Ceres Seq. ID no. 12615857
MEEFRKLQNLAIQREMAYKPVVPQGAQPSYTMNDGRSDFDKMPEQRALLAEPNRLEVLQLDNEIVFNEAIIEERDQAIQDIQQQIGEVHEAFKDLATLVHSQGGIIEEVDSNIENSAAATSEAKKEIGKASKTQKSNSSLLCLLMVIFGVVLLIVIIVLAS

SEQ ID NO: 8877 - protein, 266 aa, Triticum aestivum; identical to SEQ ID NO: 8874
  misc_feature (1)..(266): Ceres Seq. ID no. 16625369

SEQ ID NO: 8878 - DNA, 516 bp, Triticum aestivum
  misc_feature (1)..(516): Ceres Seq. ID no. 12615861
  misc_feature (404)..(404): n is a, c, t, g, unknown, or other
  misc_feature (410)..(410): n is a, c, t, g, unknown, or other
  misc_feature (414)..(414): n is a, c, t, g, unknown, or other
accgagaagaccaaaccgaactcagcaacctcgaccatgtccatggcgaccaccgccctcctccggctcgcgccgctgccaccgcacccccggctcctcgtcccgagcttcagcaagcccaccctcctcgcgcccctcggcagcggccgccgcgccctgcggctcgcgagggccgccggcgacgggctcgcggaccagaccgtctacaacggcgtgtacgggccctggtccgtggacgacgcggacgtgcgcgaggtgctgctgtaccgggccgggctggtcacggccgccgcgtccttcctggtggccgcctcgggggcgttcctgccggaggggaacgcggtcggcgacgccgtccggcggggcgccgacctcttctactccgccaggaccggcgggctcgngctgancatnaagctgatccacatctacgtcacccccatcaagcggttcctccaggcgctgtgggcggtcggcgtgctcggctccgtcggcacctacgccctcgccgcacgg

SEQ ID NO: 8879 - protein, 172 aa, Triticum aestivum
  misc_feature (1)..(172): Ceres Seq. ID no. 12615862
  misc_feature (135)..(135): Xaa is any aa, unknown or other
  misc_feature (137)..(137): Xaa is any aa, unknown or other
  misc_feature (138)..(138): Xaa is any aa, unknown or other
TEKTKPNSATSTMSMATTALLRLAPLPPHPRLLVPSFSKPTLLAPLGSGRRALRLARAAGDGLADQTVYNGVYGPWSVDDADVREVLLYRAGLVTAAASFLVAASGAFLPEGNAVGDAVRRGADLFYSARTGGLXLXXKLIHIYVTPIKRFLQALWAVGVLGSVGTYALAAR

SEQ ID NO: 8880 - protein, 171 aa, Triticum aestivum
  misc_feature (1)..(171): Ceres Seq. ID no. 12615863
  misc_feature (134)..(134): Xaa is any aa, unknown or other
  misc_feature (136)..(136): Xaa is any aa, unknown or other
  misc_feature (138)..(138): Xaa is any aa, unknown or other
REDQTELSNLDHVHGDHRPPPARAAATAPPAPRPELQQAHPPRAPRQRPPRPAAREGRRRRARGPDRLQRRVRALVRGRRGRARGAAVPGRAGHGRRVLPGGRLGGVPAGGERGRRRRPAGRRPLLLRQDRRAXAXHXADPHLRHPHQAVPPGAVGGRRARLRRHLRPRRT

SEQ ID NO: 8881 - protein, 160 aa, Triticum aestivum
  misc_feature (1)..(160): Ceres Seq. ID no. 12615864
  misc_feature (123)..(123): Xaa is any aa, unknown or other
  misc_feature (125)..(125): Xaa is any aa, unknown or other
  misc_feature (126)..(126): Xaa is any aa, unknown or other
MSMATTALLRLAPLPPHPRLLVPSFSKPTLLAPLGSGRRALRLARAAGDGLADQTVYNGVYGPWSVDDADVREVLLYRAGLVTAAASFLVAASGAFLPEGNAVGDAVRRGADLFYSARTGGLXLXXKLIHIYVTPIKRFLQALWAVGVLGSVGTYALAAR

SEQ ID NO: 8882 - protein, 160 aa, Triticum aestivum; identical to SEQ ID NO: 8881
  misc_feature (1)..(160): Ceres Seq. ID no. 16625370
  misc_feature (123)..(123): Xaa is any aa, unknown or other
  misc_feature (125)..(125): Xaa is any aa, unknown or other
  misc_feature (126)..(126): Xaa is any aa, unknown or other

SEQ ID NO: 8883 - DNA, 1314 bp, Triticum aestivum
  misc_feature (1)..(1314): Ceres Seq. ID no. 12616332
atttcaatttttgccccatcggcggagcaaaacagggtgtgggagtgttcgcttttcaggtgggctcggtcggagccgtcggaggagatcgccgccatccatggaaacgctggccagcgccatgcggcgcgacaaccgccgcttcaagaccccgccctcctcctccgccgccgccgcctccgccggcagggtccccctcgtcatggccttcctcgcctgcctcgcctgggtgtacgtcgccggccggctatggcaggacgcgcagacccgggcgatcctctccggcctcctcgagaagagcaccggcagtctccccaaggagatctcggtggacgacaagctgagggacctcggatgcactgggattgggaggaagatcgccgaggcggagatggacattgccaaggccaagagcgagggctacctgtggggaaatgggactggtgccggtgctgggggttccgaccggaagaagttcctcgcggtcattggagtttacaccggctttggctcccggctcaagaggaacaccttccgtggctcctggatgcccagaggtgatgctttaaagacgcttgaggaaaagggtgtggttattcgttttgttattgaccggagtcctaatcgaggtgatagcttggaccgtaatattaacgaagaaagcagaaagacaaacgatttcttgattctggaaagtcacgaggaagctgcagaggaattacctaaaaaagttaagtttttcttcagtgcagcaatagaagcttgggatgcagagttctacgtcaagattgacgataacattaatcttgacttggctgggttaattgagatgcttaacgcccgtcgaggtagccaagggttgtacatgggctgcatgaaatcaggagctgtcgttagtgaagaggagcaacaatggtatgaacctgaatggtggaaatttggagattcaaggacgtattttcgccatgctgctggttctttatttatcctctcaaacaatttggctcgctacatcaacataaacagtgcatcgctgcagagctatgcgcatgatgacatatcagttggttcatggatgatggggcttaatgccacttacgttgatgacgaccgtctgtgttgcctcagtccggtacaagagaaagtatgttcctttggatgagcggaaggaccagccgcccccccttctgatggtggtgtcctgatgaagaggtgtttttgtacattagccattttgtacacacctatagcaggcagcctatgtgaatgattgaatgaatgcaagaaatatatgaagaaactactttgagatgt

SEQ ID NO: 8884 - protein, 386 aa, Triticum aestivum
  misc_feature (1)..(386): Ceres Seq. ID no. 12616333
FQFLPHRRSKTGCGSVRFSGGLGRSRRRRSPPSMETLASAMRRDNRRFKTPPSSSAAAASAGRVPLVMAFLACLAWVYVAGRLWQDAQTRAILSGLLEKSTGSLPKEISVDDKLRDLGCTGIGRKIAEAEMDIAKAKSEGYLWGNGTGAGAGGSDRKKFLAVIGVYTGFGSRLKRNTFRGSWMPRGDALKTLEEKGVVIRFVIDRSPNRGDSLDRNINEESRKTNDFLILESHEEAAEELPKKVKFFFSAAIEAWDAEFYVKIDDNINLDLAGLIEMLNARRGSQGLYMGCMKSGAVVSEEEQQWYEPEWWKFGDSRTYFRHAAGSLFILSNNLARYININSASLQSYAHDDISVGSWMMGLNATYVDDDRLCCLSPVQEKVCSFG

SEQ ID NO: 8885 - protein, 353 aa, Triticum aestivum
  misc_feature (1)..(353): Ceres Seq. ID no. 12616334
METLASAMRRDNRRFKTPPSSSAAAASAGRVPLVMAFLACLAWVYVAGRLWQDAQTRAILSGLLEKSTGSLPKEISVDDKLRDLGCTGIGRKIAEAEMDIAKAKSEGYLWGNGTGAGAGGSDRKKFLAVIGVYTGFGSRLKRNTFRGSWMPRGDALKTLEEKGVVIRFVIDRSPNRGDSLDRNINEESRKTNDFLILESHEEAAEELPKKVKFFFSAAIEAWDAEFYVKIDDNINLDLAGLIEMLNARRGSQGLYMGCMKSGAVVSEEEQQWYEPEWWKFGDSRTYFRHAAGSLFILSNNLARYININSASLQSYAHDDISVGSWMMGLNATYVDDDRLCCLSPVQEKVCSFG

SEQ ID NO: 8886 - protein, 346 aa, Triticum aestivum
  misc_feature (1)..(346): Ceres Seq. ID no. 12616335
MRRDNRRFKTPPSSSAAAASAGRVPLVMAFLACLAWVYVAGRLWQDAQTRAILSGLLEKSTGSLPKEISVDDKLRDLGCTGIGRKIAEAEMDIAKAKSEGYLWGNGTGAGAGGSDRKKFLAVIGVYTGFGSRLKRNTFRGSWMPRGDALKTLEEKGVVIRFVIDRSPNRGDSLDRNINEESRKTNDFLILESHEEAAEELPKKVKFFFSAAIEAWDAEFYVKIDDNINLDLAGLIEMLNARRGSQGLYMGCMKSGAVVSEEEQQWYEPEWWKFGDSRTYFRHAAGSLFILSNNLARYININSASLQSYAHDDISVGSWMMGLNATYVDDDRLCCLSPVQEKVCSFG

SEQ ID NO: 8887 - protein, 353 aa, Triticum aestivum
  misc_feature (1)..(353): Ceres Seq. ID no. 16611610
METLASAMRRDNRRFKTPPSSSAAAASAGRVPLVMVFLACLAWVYVAGRLWNDAQTRAILSGLLEKSTGSLPKEISVDDKLRDLGCTGIGRKIAEAEMDIAKAKSEGYLWGNGTGAGAGGSDRKKFLAVIGVYTGFGSRLKRNTFRGSWMPRGDALKTLEEKGVVIRFVIDRSPNRGDSLDRNINEESRKTNDFLILESHEEAAEELPKKVKFFFSAAIEAWDAEFYVKIDDNINLDLAGLIEMLNARRGSQGLYMGCMKSGAVVSEEEQQWYEPEWWKFGDSRTYFRHAAGSLFILSNNLARYININSASLQSYAHDDISVGSWMMGLNATYVDDDRLCCLSPVQEKVCSFG

SEQ ID NO: 8888 - DNA, 1144 bp, Triticum aestivum
  misc_feature (1)..(1144): Ceres Seq. ID no. 12616903
agcatcggctagccaagtccagtaagcatcagcaaatctgacgtaccccattcgtgccccgtctccactcccgctaccgactccggcgaccaccatggccactcgccggagccccgccaccacccaccaccgactcctcctactcctcctccccttgctgctaatcggctcgttcctcctccccctctcgtccgcctaccgccccggcgacatcatccccatgctccgctccggccagtaccacggctcgaggtcggtgtggttcgacgtcatcggccgccactgcccggtcttcgcggtcaaccgggaggtgctgatgccgatccccaagccgacggggttcaccggtgcggatccgtataagataacatttcagattggacacgaaaagttccatgttccttggctttatgttattaatcgcaaaagctctgaagttccactgattgatttccatttaaaatacactggaaacgatttgcttggtgttacggctaaagtagtggacatgcctcaccattttgtggaacttcatcctgacataaagaagaatttctgggatccacagaattggccaaaatatgtacttgttagttatacatgggaggaacaatcagagatagatgttactgcaggattctatgtgttatttggatctggccttgttctttcgttcatccttgcaatctatgtattgcaatcatctcaagataaattaacaaggtttgtacgagaagcggtttctgatagcagtctacctgaaggaggggttgcaaaggttgagtgatgtttccgcgaggggctgttggattatcaacaaatgtccacttatggaaacaccgacaaagacattgtgaacttgagctttcttgggagcgtggacaatagcatgcatctgaagaaccggtgaaccatagcgagttaaatgagagatgaattataggtttttccttgctataacggaacatttagcaaactgaagtatgtgcagttgctagctcattacagttttgatatatgacctgtgtgatttcaatgttgcaagaatttgtcttctacatctacattttgtagaatgtgtaagtagaaacaggcaccgtgtacacctctacagaggaaaagattggtgcaaatgttcattctt

SEQ ID NO: 8889 - protein, 230 aa, Triticum aestivum
  misc_feature (1)..(230): Ceres Seq. ID no. 12616904
MATRRSPATTHHRLLLLLLPLLLIGSFLLPLSSAYRPGDIIPMLRSGQYHGSRSVWFDVIGRHCPVFAVNREVLMPIPKPTGFTGADPYKITFQIGHEKFHVPWLYVINRKSSEVPLIDFHLKYTGNDLLGVTAKVVDMPHHFVELHPDIKKNFWDPQNWPKYVLVSYTWEEQSEIDVTAGFYVLFGSGLVLSFILAIYVLQSSQDKLTRFVREAVSDSSLPEGGVAKVE

SEQ ID NO: 8890 - protein, 188 aa, Triticum aestivum
  misc_feature (1)..(188): Ceres Seq. ID no. 12616905
MLRSGQYHGSRSVWFDVIGRHCPVFAVNREVLMPIPKPTGFTGADPYKITFQIGHEKFHVPWLYVINRKSSEVPLIDFHLKYTGNDLLGVTAKVVDMPHHFVELHPDIKKNFWDPQNWPKYVLVSYTWEEQSEIDVTAGFYVLFGSGLVLSFILAIYVLQSSQDKLTRFVREAVSDSSLPEGGVAKVE

SEQ ID NO: 8891 - protein, 156 aa, Triticum aestivum
  misc_feature (1)..(156): Ceres Seq. ID no. 12616906
MPIPKPTGFTGADPYKITFQIGHEKFHVPWLYVINRKSSEVPLIDFHLKYTGNDLLGVTAKVVDMPHHFVELHPDIKKNFWDPQNWPKYVLVSYTWEEQSEIDVTAGFYVLFGSGLVLSFILAIYVLQSSQDKLTRFVREAVSDSSLPEGGVAKVE

SEQ ID NO: 8892 - protein, 230 aa, Triticum aestivum; identical to SEQ ID NO: 8889
  misc_feature (1)..(230): Ceres Seq. ID no. 16625371

SEQ ID NO: 8893 - DNA, 1233 bp, Triticum aestivum
  misc_feature (1)..(1233): Ceres Seq. ID no. 12617583
gcggctgcgggtgcgcgtgcagaggggacgacagagagagaagaggagccaacctccgccgccacggcttccgcgtgctaggaagacgaagcagagcggcagcaaagagagggaggccgcgatggaggtgggcttcctggggctgggcatcatgggcaaggcaatggcggccaacctcctccgccacggcttccgcgtcaccgtctggaaccggaccctctccaagtgcgacgagctcgtcgcgatgggtgccgccgtcggggacacgccggcgtccgtcgtcgccaagtgcaagtacaccatcgccatgctctccgatcccagcgccgcgctatctgttgttttcgacaaggatggcgtgctcgagcaaatcggagagggcaagggctacgtggacatgtccactgtcgatgctgcaacttcttgcaagataagcgaggcggttaaacaaaagggcggagcttttgttgaagctccagtttcagggagcaagaagccagctgaagatggccaattggtcattcttgctgcaggcgacaaggcactatatgatgatatggtccctgcatttgatgtacttgggaagaagtcgttctttctgggggagatgggaaatggagcaaagatgaaactggtggtcaacatgatcatgggaagtatgatgaatgctttttctgagggactctgtttggctgacaaaagtgggttgagcccccagacgcttcttgatgtcctggatctcggtgcaatcgcaaatccgatgttcaagatgaaagggccttcaatgctgcagggcagctacaatccagcatttcccctgaaacatcagcagaaggatatgaggctggctctgtcgttgggagatgaaaatgccgtgtccatgccagtggcagctgctgccaatgaggcattcaagaaagcaagaagcttgggacttggtgacctggattttcccgcggtgcacgaggttctgaaaggcactggtggttcaggctaaagcgtgattgggggctgaatgtttaaaaccacatgccatgggcatgcagatattcttgtagttcgtccaacccatgtggcttatcatcgtactattgatatgtacattcaacagttgatgctggattgtgctgtacgatgttttttttctagcaaggcttgtgcatgaacgaaccattgggatttgggacttgaatgccgccacgccagatggaaatataagtgcaagttctgtct

SEQ ID NO: 8894 - protein, 331 aa, Triticum aestivum
  misc_feature (1)..(331): Ceres Seq. ID no. 12617584
RLRVRVQRGRQREKRSQPPPPRLPRARKTKQSGSKEREAAMEVGFLGLGIMGKAMAANLLRHGFRVTVWNRTLSKCDELVAMGAAVGDTPASVVAKCKYTIAMLSDPSAALSVVFDKDGVLEQIGEGKGYVDMSTVDAATSCKISEAVKQKGGAFVEAPVSGSKKPAEDGQLVILAAGDKALYDDMVPAFDVLGKKSFFLGEMGNGAKMKLVVNMIMGSMMNAFSEGLCLADKSGLSPQTLLDVLDLGAIANPMFKMKGPSMLQGSYNPAFPLKHQQKDMRLALSLGDENAVSMPVAAAANEAFKKARSLGLGDLDFPAVHEVLKGTGGSG

SEQ ID NO: 8895 - protein, 291 aa, Triticum aestivum
  misc_feature (1)..(291): Ceres Seq. ID no. 12617585
MEVGFLGLGIMGKAMAANLLRHGFRVTVWNRTLSKCDELVAMGAAVGDTPASVVAKCKYTIAMLSDPSAALSVVFDKDGVLEQIGEGKGYVDMSTVDAATSCKISEAVKQKGGAFVEAPVSGSKKPAEDGQLVILAAGDKALYDDMVPAFDVLGKKSFFLGEMGNGAKMKLVVNMIMGSMMNAFSEGLCLADKSGLSPQTLLDVLDLGAIANPMFKMKGPSMLQGSYNPAFPLKHQQKDMRLALSLGDENAVSMPVAAAANEAFKKARSLGLGDLDFPAVHEVLKGTGGSG

SEQ ID NO: 8896 - protein, 281 aa, Triticum aestivum
  misc_feature (1)..(281): Ceres Seq. ID no. 12617586
MGKAMAANLLRHGFRVTVWNRTLSKCDELVAMGAAVGDTPASVVAKCKYTIAMLSDPSAALSVVFDKDGVLEQIGEGKGYVDMSTVDAATSCKISEAVKQKGGAFVEAPVSGSKKPAEDGQLVILAAGDKALYDDMVPAFDVLGKKSFFLGEMGNGAKMKLVVNMIMGSMMNAFSEGLCLADKSGLSPQTLLDVLDLGAIANPMFKMKGPSMLQGSYNPAFPLKHQQKDMRLALSLGDENAVSMPVAAAANEAFKKARSLGLGDLDFPAVHEVLKGTGGSG

SEQ ID NO: 8897 - protein, 291 aa, Triticum aestivum; identical to SEQ ID NO: 8895
  misc_feature (1)..(291): Ceres Seq. ID no. 16612237

SEQ ID NO: 8898 - DNA, 1442 bp, Triticum aestivum
  misc_feature (1)..(1442): Ceres Seq. ID no. 12618056
acctcagatcaatcactcttccctcccactactcccaccgcgttcacccgccattgcctgtcgaagctacgagattagttactagtatgatggagctgcgcaagtactggggcgtgggggggaggaggtgcggggcgtgcgagggggcggcgccggcggcggtgcactgccgggattgcgccgggtacctgtgcacggggtgcgacgcgcggccggcgcacgcgcgggctggccacgagcgcgtctgggtgtgcgaggtctgcgaggtcagccccgcggccgtgacgtgcaaggccgacgccgccgtgctctgcgccgtgtgcgacgccgacatccaccacgccaacccgctcgccgagcgccacgtgcgcgtgcccatcgcgcccatctgctcccccgaggccgccgcggtggcggccgaggccatgatgttctgtggcgccggtgacggcgaggcgcgggcggatcaggacgacgtgcccgagcagctgcaccaacacggggggatgctgaacctcaacgtggaggccggcaaggagggccggaagatggactacctcttctccgacctcgtcgacccctacctcgctgtcgactttacgcgcttcgcccacgctgacagcgtcgtgcccagcggcgtcgccaccggcgccgtacccgccgtcgtggacctggacttcgcgtgcgggatcggcgccaagccgccggcgacctacagctcctcgtacacggccaacgcctccggcgcgcacagcggctcttcatcggaggtcagcgtggtgccggaggccatctgcggcggcgtcgggagcttcgagatcgacttcacccggcccaagccgcagccgtacatgcccgcgtacaccgcggcaccgccgagccatggggtgagcgcgcagcaggcgtggccggtggacatggggtacttgacggtgccggagcgtccggtggcggtgaccggggagggcagggtggcgaggctgatgcggtaccgggagaagaggaagaaccgccggttcgagaagaccatccggtacgcgtccaggaaggcctacgccgagtcgcggccgcgcgtcaagggccgcttcgccaagcgcaccgaccaggacgccgacggcgacgacgtggacgcggaggcccatgccgtgccgtcttccacgtcctacttgctcgactttggctacggcgtcgtgccgtccttctgatccgccggcccggcgccccggccggcggccttgtacttgtaccattgatgcatgtacagtagtacgtaggggactagtaatccatccatgtactcctcctgagctagttcgatcgcgcttttgatgtactagtaatactgtaaactgtaacagtagtagtactttggccaatatgctcgtttatttttggatggccgaaactagtagcccaaacatttggatcatcaatcattattt

SEQ ID NO: 8899 - protein, 400 aa, Triticum aestivum
  misc_feature (1)..(400): Ceres Seq. ID no. 12618057
LRSITLPSHYSHRVHPPLPVEATRLVTSMMELRKYWGVGGRRCGACEGAAPAAVHCRDCAGYLCTGCDARPAHARAGHERVWVCEVCEVSPAAVTCKADAAVLCAVCDADIHHANPLAERHVRVPIAPICSPEAAAVAAEAMMFCGAGDGEARADQDDVPEQLHQHGGMLNLNVEAGKEGRKMDYLFSDLVDPYLAVDFTRFAHADSVVPSGVATGAVPAVVDLDFACGIGAKPPATYSSSYTANASGAHSGSSSEVSVVPEAICGGVGSFEIDFTRPKPQPYMPAYTAAPPSHGVSAQQAWPVDMGYLTVPERPVAVTGEGRVARLMRYREKRKNRRFEKTIRYASRKAYAESRPRVKGRFAKRTDQDADGDDVDAEAHAVPSSTSYLLDFGYGVVPSF

SEQ ID NO: 8900 - protein, 372 aa, Triticum aestivum
  misc_feature (1)..(372): Ceres Seq. ID no. 12618058
MMELRKYWGVGGRRCGACEGAAPAAVHCRDCAGYLCTGCDARPAHARAGHERVWVCEVCEVSPAAVTCKADAAVLCAVCDADIHHANPLAERHVRVPIAPICSPEAAAVAAEAMMFCGAGDGEARADQDDVPEQLHQHGGMLNLNVEAGKEGRKMDYLFSDLVDPYLAVDFTRFAHADSVVPSGVATGAVPAVVDLDFACGIGAKPPATYSSSYTANASGAHSGSSSEVSVVPEAICGGVGSFEIDFTRPKPQPYMPAYTAAPPSHGVSAQQAWPVDMGYLTVPERPVAVTGEGRVARLMRYREKRKNRRFEKTIRYASRKAYAESRPRVKGRFAKRTDQDADGDDVDAEAHAVPSSTSYLLDFGYGVVPSF

SEQ ID NO: 8901 - protein, 371 aa, Triticum aestivum
  misc_feature (1)..(371): Ceres Seq. ID no. 12618059
MELRKYWGVGGRRCGACEGAAPAAVHCRDCAGYLCTGCDARPAHARAGHERVWVCEVCEVSPAAVTCKADAAVLCAVCDADIHHANPLAERHVRVPIAPICSPEAAAVAAEAMMFCGAGDGEARADQDDVPEQLHQHGGMLNLNVEAGKEGRKMDYLFSDLVDPYLAVDFTRFAHADSVVPSGVATGAVPAVVDLDFACGIGAKPPATYSSSYTANASGAHSGSSSEVSVVPEAICGGVGSFEIDFTRPKPQPYMPAYTAAPPSHGVSAQQAWPVDMGYLTVPERPVAVTGEGRVARLMRYREKRKNRRFEKTIRYASRKAYAESRPRVKGRFAKRTDQDADGDDVDAEAHAVPSSTSYLLDFGYGVVPSF

SEQ ID NO: 8902 - protein, 372 aa, Triticum aestivum; identical to SEQ ID NO: 8900
  misc_feature (1)..(372): Ceres Seq. ID no. 16625373

SEQ ID NO: 8903 - DNA, 1397 bp, Triticum aestivum
  misc_feature (1)..(1397): Ceres Seq. ID no. 12618563
ccaaacggccgaacccccaacggagcagctaaaaactctgctgccggcgctaggaacactccagcaactcctctctggacgagacgaatcgaagccgatccgagtttccaaatgccgcaggcgcaggctatgtcggtcctgccggtggtgctcctcggctgcggcggcgtcggccgccacctcctccgccacatcgtctcctgcaggcctctccacgccaaccagggcgtctccatccgggtggtgggcgttgccgacagctcctcgctgctcgtcgcagacgacgtccgcgccagcggcctcgatgacgcgctcctcaacgacctctgctccgccaagtccgccggctcgcctctgtcctcgctgctcgctcgcgggcactgtcaggtgttcaacaagccggaggcaatggggaaagtcatcgatgcagctaccatgcttggaagaacaaccggtctggtgatagttgattgttctgcaacttatgacactgttggtgtgctgaaggatgccgtgaatcatggatgctgcgttgttttggcaaacaaaaaacctcttacatgtgcttatgaggattttaaaaagttgacatcccacttccgtcagataagatttgaatctaccgttggagcaggtttgcctgtaatagcttctgtaacccgcattattgcatctggagatccagtttcccgaatcgttggcagtctgagtggtacacttggctatgtgatgagtgagctggaggatggaaaaaaaattagtgaagttgtgaaaactgccaaggctcttggttatacagaaccagatccacgtgatgatctaagtgggatggatgtggctagaaaggcgttgatcctagctaggcttctcgggcagcagatcagcatggagaatatcaatgttgagagtttatatccgagtgagttaggacctgaggttatgtccacaacggatttccttgagagtgggttggcaaaacttgatgagacgattgaagaaagggtcaaggcagcatctttgaggggaaatgttctgcgctatgtttgtgtcattggaagcacagggtgtcaagtgggccttcaagaggtcccaaaagattctgcactggggagattgaggggaagtgacaatgtggtggagatatacagcagatgctacgagagctccccgctggtgatccagggtgcaggagccgggaacgacaccactgccgcaggagttctcgctgatataatcgatctccaagatcttttccagacaagagcgtgattgtcttgtttagcaccaaggagtttgatgcgttgtatgatcgaccataatgtccattgaactgaaattggttctggcgtttgaggttgtatgaacattttcggttgtgtttggctgctgttgatttg

SEQ ID NO: 8904 - protein, 422 aa, Triticum aestivum
  misc_feature (1)..(422): Ceres Seq. ID no. 12618564
PNGRTPNGAAKNSAAGARNTPATPLWTRRIEADPSFQMPQAQAMSVLPVVLLGCGGVGRHLLRHIVSCRPLHANQGVSIRVVGVADSSSLLVADDVRASGLDDALLNDLCSAKSAGSPLSSLLARGHCQVFNKPEAMGKVIDAATMLGRTTGLVIVDCSATYDTVGVLKDAVNHGCCVVLANKKPLTCAYEDFKKLTSHFRQIRFESTVGAGLPVIASVTRIIASGDPVSRIVGSLSGTLGYVMSELEDGKKISEVVKTAKALGYTEPDPRDDLSGMDVARKALILARLLGQQISMENINVESLYPSELGPEVMSTTDFLESGLAKLDETIEERVKAASLRGNVLRYVCVIGSTGCQVGLQEVPKDSALGRLRGSDNVVEIYSRCYESSPLVIQGAGAGNDTTAAGVLADIIDLQDLFQTRA

SEQ ID NO: 8905 - protein, 385 aa, Triticum aestivum
  misc_feature (1)..(385): Ceres Seq. ID no. 12618565
MPQAQAMSVLPVVLLGCGGVGRHLLRHIVSCRPLHANQGVSIRVVGVADSSSLLVADDVRASGLDDALLNDLCSAKSAGSPLSSLLARGHCQVFNKPEAMGKVIDAATMLGRTTGLVIVDCSATYDTVGVLKDAVNHGCCVVLANKKPLTCAYEDFKKLTSHFRQIRFESTVGAGLPVIASVTRIIASGDPVSRIVGSLSGTLGYVMSELEDGKKISEVVKTAKALGYTEPDPRDDLSGMDVARKALILARLLGQQISMENINVESLYPSELGPEVMSTTDFLESGLAKLDETIEERVKAASLRGNVLRYVCVIGSTGCQVGLQEVPKDSALGRLRGSDNVVEIYSRCYESSPLVIQGAGAGNDTTAAGVLADIIDLQDLFQTRA

SEQ ID NO: 8906 - protein, 379 aa, Triticum aestivum
  misc_feature (1)..(379): Ceres Seq. ID no. 12618566
MSVLPVVLLGCGGVGRHLLRHIVSCRPLHANQGVSIRVVGVADSSSLLVADDVRASGLDDALLNDLCSAKSAGSPLSSLLARGHCQVFNKPEAMGKVIDAATMLGRTTGLVIVDCSATYDTVGVLKDAVNHGCCVVLANKKPLTCAYEDFKKLTSHFRQIRFESTVGAGLPVIASVTRIIASGDPVSRIVGSLSGTLGYVMSELEDGKKISEVVKTAKALGYTEPDPRDDLSGMDVARKALILARLLGQQISMENINVESLYPSELGPEVMSTTDFLESGLAKLDETIEERVKAASLRGNVLRYVCVIGSTGCQVGLQEVPKDSALGRLRGSDNVVEIYSRCYESSPLVIQGAGAGNDTTAAGVLADIIDLQDLFQTRA

SEQ ID NO: 8907 - protein, 379 aa, Triticum aestivum; identical to SEQ ID NO: 8906
  misc_feature (1)..(379): Ceres Seq. ID no. 16625374

SEQ ID NO: 8908 - DNA, 790 bp, Triticum aestivum
  misc_feature (1)..(790): Ceres Seq. ID no. 12619917
acccagcaacaacacagagcacttggttcccagcttgcctaggttgaagttgacagagcgagcgaaagtagaggagagactcgcagcctcgcaccagcaagctagcttcgcccgccatggccttccgcgacgcggcccgcaagccgctcctgtggctcctcccggccacgctcatcctggcgaccggcggcggcgagcgcgacgccgcccggcggcggctctacgcccccaccctgctggccgcgtggctggtcctcggcgtcgtcacggcggtgctggccgccaacggagggaggatcatgcgcttcgcccgctggaagaggctgctgctccgcggggggctgctgctcgccctcggcctcaacgccttctgcatcttcctcgccctcgacgccgtcgccgaccggctcctgggcgagcagggccccgtctccttcgccgtggctcgcgtcgtgtgcgccctcaccgccgccgccgcgcacctcgacttcggatgggtcgccgtccacggggagtagagcagcgagtcgttacttgttagccgaccggccggcggagactgattagtagtatgtggtcgagtgacttatttttgatgcgtattgttctagtagcaggcattgtgcgcaaattgttaggctgtgtcttcaaagttgatgtccggccttctgccggacacagatcaacatgcatgtagtgtgagaagtgagtatttatgtgtttaagctagtatttttacactgtgtttaagttaagctaaggatttggttaacccccggttggtggcctg

SEQ ID NO: 8909 - protein, 179 aa, Triticum aestivum
  misc_feature (1)..(179): Ceres Seq. ID no. 12619918
PSNNTEHLVPSLPRLKLTERAKVEERLAASHQQASFARHGLPRRGPQAAPVAPPGHAHPGDRRRRARRRPAAALRPHPAGRVAGPRRRHGGAGRQRREDHALRPLEEAAAPRGAAARPRPQRLLHLPRPRRRRRPAPGRAGPRLLRRGSRRVRPHRRRRAPRLRMGRRPRGVEQRVVTC

SEQ ID NO: 8910 - protein, 133 aa, Triticum aestivum
  misc_feature (1)..(133): Ceres Seq. ID no. 12619919
MAFRDAARKPLLWLLPATLILATGGGERDAARRRLYAPTLLAAWLVLGVVTAVLAANGGRIMRFARWKRLLLRGGLLLALGLNAFCIFLALDAVADRLLGEQGPVSFAVARVVCALTAAAAHLDFGWVAVHGE

SEQ ID NO: 8911 - protein, 133 aa, Triticum aestivum; identical to SEQ ID NO: 8910
  misc_feature (1)..(133): Ceres Seq. ID no. 16625376

SEQ ID NO: 8912 - DNA, 1168 bp, Triticum aestivum
  misc_feature (1)..(1168): Ceres Seq. ID no. 12620027
aaagaagtacagcatcagaagaggagaggagagcagaggcggagagtgaggagagagaggtgtagcggaggagccgtaggtaggtagagagagatggaggtggcggtgcctgtcatggcgccgagcgcgccgtgcagcccaagaaccgcggccgccatgggcggcggcggcagccacctgcccagctactgctacttcttctccagcgcccccacgagcccgtccagggccagcagctacgccgcggacgagcagggcgacgccgccacgttcgacttcgccttcggcttcagcgggcagctccgggagtccacgcccatcctcgccgccgccgacgagctgttcgagggcggcaggatccggccgctcaacggcccgcgctcaagcggcagcggcctgctcgccgacgaggactacgcctccctctccgtctccccccggtcgccgagaagagcgaggacgatgtccgcggtgcgcggcggtgcaggggatcgggcggaggcgccggccgatcagggtcagacgaggggcaggtccggccggccggcccctgcgtcgtcctcgtcgtcgggcgtgtcgtctcgcagcaggagggccacgcggtctctgtccccgtacaggggcgaccccatcgacgacgagttctgctcctccccaccctcccctcgcggcgccgcctccctgatgcgcggctgcgggagcggcagccgcaagtggcggctcaaggacctgttcctgttccgcagcgcgtcggagggccgcgccaccgccggcaaggacccgctgctcaagtacagcatgctcaagagcggcggcgacgcgtcgatgcggaaggggaggggctcggcggcgtcggcgagcgacatggcgccgtacacggtgagccgggcggcggccgaggagatgcggcggaggacgacgacgccgctgccgttccaccggaacagcctcttcggctacttccggtccaacccggccatccactccatcagccgcaagcttagcagctactcctcgtcgaactccaaccgcggccggaacgccgccgccgccgccaactgacagccgacgacgcagctcgctcgctcgctcgcgcgcacatgcatggcatgctggctactttggcagtagaaaaaaagggaaggaaagagaacagttttattcgttc

SEQ ID NO: 8913 - protein, 322 aa, Triticum aestivum
  misc_feature (1)..(322): Ceres Seq. ID no. 12620028
MEVAVPVMAPSAPCSPRTAAAMGGGGSHLPSYCYFFSSAPTSPSRASSYAADEQGDAATFDFAFGFSGQLRESTPILAAADELFEGGRIRPLNGPRSSGSGLLADEDYASLSVSPRSPRRARTMSAVRGGAGDRAEAPADQGQTRGRSGRPAPASSSSSGVSSRSRRATRSLSPYRGDPIDDEFCSSPPSPRGAASLMRGCGSGSRKWRLKDLFLFRSASEGRATAGKDPLLKYSMLKSGGDASMRKGRGSAASASDMAPYTVSRAAAEEMRRRTTTPLPFHRNSLFGYFRSNPAIHSISRKLSSYSSSNSNRGRNAAAAAN

SEQ ID NO: 8914 - protein, 315 aa, Triticum aestivum
  misc_feature (1)..(315): Ceres Seq. ID no. 12620029
MAPSAPCSPRTAAAMGGGGSHLPSYCYFFSSAPTSPSRASSYAADEQGDAATFDFAFGFSGQLRESTPILAAADELFEGGRIRPLNGPRSSGSGLLADEDYASLSVSPRSPRRARTMSAVRGGAGDRAEAPADQGQTRGRSGRPAPASSSSSGVSSRSRRATRSLSPYRGDPIDDEFCSSPPSPRGAASLMRGCGSGSRKWRLKDLFLFRSASEGRATAGKDPLLKYSMLKSGGDASMRKGRGSAASASDMAPYTVSRAAAEEMRRRTTTPLPFHRNSLFGYFRSNPAIHSISRKLSSYSSSNSNRGRNAAAAAN

SEQ ID NO: 8915 - protein, 301 aa, Triticum aestivum
  misc_feature (1)..(301): Ceres Seq. ID no. 12620030
MGGGGSHLPSYCYFFSSAPTSPSRASSYAADEQGDAATFDFAFGFSGQLRESTPILAAADELFEGGRIRPLNGPRSSGSGLLADEDYASLSVSPRSPRRARTMSAVRGGAGDRAEAPADQGQTRGRSGRPAPASSSSSGVSSRSRRATRSLSPYRGDPIDDEFCSSPPSPRGAASLMRGCGSGSRKWRLKDLFLFRSASEGRATAGKDPLLKYSMLKSGGDASMRKGRGSAASASDMAPYTVSRAAAEEMRRRTTTPLPFHRNSLFGYFRSNPAIHSISRKLSSYSSSNSNRGRNAAAAAN

SEQ ID NO: 8916 - protein, 322 aa, Triticum aestivum; identical to SEQ ID NO: 8913
  misc_feature (1)..(322): Ceres Seq. ID no. 16625377

SEQ ID NO: 8917 - DNA, 875 bp, Triticum aestivum
  misc_feature (1)..(875): Ceres Seq. ID no. 12624490
ttcgacgaggacgaacaacagtgcaacaaagaagtactctgcttttggatcaagaactcgagaacagagaggagaatcgatggccacgttcgcgacgtcaacggcggcagtgatgggatcggctcgccctggccgggtggccgggcctcggcggtgcgtggtggcgcgcgcgtccgccatgatggcggcaccggcgccggtggcggccgggaggacgcactacgaggtgctcggtgtgagtgccagggcgagcaggggggagatcaaggaggcgtaccggcgtctggccagggaggtgcacccggacgctgctggtggcggcggcgacgaggggttcatccggcttcacgcggcctacgccacgctggccgaccctgacgagcgcgcgcgctacgaccgggacgtggcctgccgcaccgccgggatgatgatgcggcggccggccgcggccgggccggcgttccggcggaggacgtgggagaccgaccagtgctggtaggaggggcggacacacgacgacacgtggttgctcagttctcccgttcccggccggcggccgtctggttcgatcaggcacggcgtcgaggttgtcgatggtcgccaggaaggaaaccgcgtcgtctgacgtgcgccgtccgatcagtgttggccggtccagatctaacgacgcggatgcgggagagctgtgaactgcgacgcgacgagaggcattttttgaagatctcttgcgttcgaccagcaaatgattagctactgcctgtaaattaatggcctgggaaatgttatagctctctgtggttatagaaggaaatatttaccccctccatgtcatagttttttgtttgccaagtaaggattaaagggttactaacttc

SEQ ID NO: 8918 - protein, 165 aa, Triticum aestivum
  misc_feature (1)..(165): Ceres Seq. ID no. 12624491
STRTNNSATKKYSAFGSRTREQRGESMATFATSTAAVMGSARPGRVAGPRRCVVARASAMMAAPAPVAAGRTHYEVLGVSARASRGEIKEAYRRLAREVHPDAAGGGGDEGFIRLHAAYATLADPDERARYDRDVACRTAGMMMRRPAAAGPAFRRRTWETDQCW

SEQ ID NO: 8919 - protein, 139 aa, Triticum aestivum
  misc_feature (1)..(139): Ceres Seq. ID no. 12624492
MATFATSTAAVMGSARPGRVAGPRRCVVARASAMMAAPAPVAAGRTHYEVLGVSARASRGEIKEAYRRLAREVHPDAAGGGGDEGFIRLHAAYATLADPDERARYDRDVACRTAGMMMRRPAAAGPAFRRRTWETDQCW

SEQ ID NO: 8920 - protein, 128 aa, Triticum aestivum
  misc_feature (1)..(128): Ceres Seq. ID no. 12624493
MGSARPGRVAGPRRCVVARASAMMAAPAPVAAGRTHYEVLGVSARASRGEIKEAYRRLAREVHPDAAGGGGDEGFIRLHAAYATLADPDERARYDRDVACRTAGMMMRRPAAAGPAFRRRTWETDQCW

SEQ ID NO: 8921 - protein, 139 aa, Triticum aestivum; identical to SEQ ID NO: 8919
  misc_feature (1)..(139): Ceres Seq. ID no. 16625380

SEQ ID NO: 8922 - DNA, 1296 bp, Triticum aestivum
  misc_feature (1)..(1296): Ceres Seq. ID no. 12624901
accagtcaccacaccacactcccccagatcggcttccgttgcgagacggaccgccccccgctttatttccgccaccaccgacgccgcgccggcgaaggagcccctcgccagatcggatccctccgccgcgacgcaacatggcggctctgctgatgcgcaggctcgccgggacctaccgcggccgcgcgccgctggccgccgccgccgttggcggggccgcgttcttctacgcctcgtcgaaccccaccgtcgcgcacatggaggagaagggggaggacgccgctgccaaagttgctcttaaccctgagaaatggttagaattcaagctccaggagaaggcaacagttagtcatgattcagagctattcagattttcgtttgacccatctactaagctgggcctggatgttgcctcatgtctcgtaacaagggcccccataggtcaggaagtggagggaaaaagaaaatacgttattcgcccgtacacacctatctctgacccagattctaaaggatatttcgacctattaatcaaggtttatcccgaagggaaaatgtctcagcattttgctaatttgaagccaggagatgttctcgaagtcaaagggcccattgaaaagctcagatatagcccaaatatgaaaagacaaattggcatggttgctggtggtactggcataacgccaatgctgcaagttgttagggccatcctgaaaaaccccgatgacaacactcaggtttccttgatctacgccaatgtgtcaccagatgatatcttgctgaaaaaggagttagatagacttgccagcagctatcctaatttcaaggtattttatacagtcgataaaccatcaagtgactggaggggtggtgctggctacatatcaaaggacatggttttgaaaggtttgccaggcccaggggaggattctcttattcttgtttgtggtcctcctggaatgatgaatcacatatctggagataaggcaaaggattattcacagggcgaggtcacgggccttctcaaagatttaggatacacggcagatatggtatacaaattttgagtcgatcacggaaacgtaggggaccctgacatgcccgctgcctgccatggcagtaaaataaaccgcagctgaacctttttttcttgtcgcgccacggcaattagtgccaaactcagaacagtatggtgcatcattttgtaagaatttcggttcggttccgttttgtcatctgtgcgcgctgcatggacacctgaataacctgacgccgcctggttggcggtgttgtttt

SEQ ID NO: 8923 - protein, 354 aa, Triticum aestivum
  misc_feature (1)..(354): Ceres Seq. ID no. 12624902
QSPHHTPPDRLPLRDGPPPALFPPPPTPRRRRSPSPDRIPPPRRNMAALLMRRLAGTYRGRAPLAAAAVGGAAFFYASSNPTVAHMEEKGEDAAAKVALNPEKWLEFKLQEKATVSHDSELFRFSFDPSTKLGLDVASCLVTRAPIGQEVEGKRKYVIRPYTPISDPDSKGYFDLLIKVYPEGKMSQHFANLKPGDVLEVKGPIEKLRYSPNMKRQIGMVAGGTGITPMLQVVRAILKNPDDNTQVSLIYANVSPDDILLKKELDRLASSYPNFKVFYTVDKPSSDWRGGAGYISKDMVLKGLPGPGEDSLILVCGPPGMMNHISGDKAKDYSQGEVTGLLKDLGYTADMVYKF

SEQ ID NO: 8924 - protein, 309 aa, Triticum aestivum
  misc_feature (1)..(309): Ceres Seq. ID no. 12624903
MAALLMRRLAGTYRGRAPLAAAAVGGAAFFYASSNPTVAHMEEKGEDAAAKVALNPEKWLEFKLQEKATVSHDSELFRFSFDPSTKLGLDVASCLVTRAPIGQEVEGKRKYVIRPYTPISDPDSKGYFDLLIKVYPEGKMSQHFANLKPGDVLEVKGPIEKLRYSPNMKRQIGMVAGGTGITPMLQVVRAILKNPDDNTQVSLIYANVSPDDILLKKELDRLASSYPNFKVFYTVDKPSSDWRGGAGYISKDMVLKGLPGPGEDSLILVCGPPGMMNHISGDKAKDYSQGEVTGLLKDLGYTADMVYKF

SEQ ID NO: 8925 - protein, 304 aa, Triticum aestivum
  misc_feature (1)..(304): Ceres Seq. ID no. 12624904
MRRLAGTYRGRAPLAAAAVGGAAFFYASSNPTVAHMEEKGEDAAAKVALNPEKWLEFKLQEKATVSHDSELFRFSFDPSTKLGLDVASCLVTRAPIGQEVEGKRKYVIRPYTPISDPDSKGYFDLLIKVYPEGKMSQHFANLKPGDVLEVKGPIEKLRYSPNMKRQIGMVAGGTGITPMLQVVRAILKNPDDNTQVSLIYANVSPDDILLKKELDRLASSYPNFKVFYTVDKPSSDWRGGAGYISKDMVLKGLPGPGEDSLILVCGPPGMMNHISGDKAKDYSQGEVTGLLKDLGYTADMVYKF

SEQ ID NO: 8926 - protein, 304 aa, Triticum aestivum; identical to SEQ ID NO: 8925
  misc_feature (1)..(304): Ceres Seq. ID no. 16625381

SEQ ID NO: 8927 - DNA, 1058 bp, Triticum aestivum
  misc_feature (1)..(1058): Ceres Seq. ID no. 12625361
cctaaacccgagagtaacaaaatccttatcccaagcttagcatccccggtctcctcggtttctcctcctccccgaaccctcgctccatcactctctccctctcccactccggcgcgcgctcagctgaatctcgccgcaggagcaatggcgtcggtgcatctgtgcggcccgaaggtggcgtcggcggcgatggcgaagccggcgctggcggacgggctccgcatccccacttcgtcgtcggcgcgtcccgtgccgacggggcgcaggctccggggcctcgtcgtcagggccgccacggtcgtgtcgcccaagtatacttctgtgaaaccattgggagatagggtactagtgaagaccaagactactgaggataaaactgctggagggatattgcttccaacaacagctcagtcaagaccacaagcaggggaggttgttgcagttggagaggggagaagcttaggcagcaacatcgttgagatcagtgttccggttggtgccaaagttatttactctaaatacgctggcaccgagctggaattcaatgataccacccacctcattatgaaagaagatgacatcattggtattcttgacactgatgacgtgaaagatctgaagccactgagtgaccgtattctcattaaggttgcagagtctgaagaggaaactgctggcggtttgctattgacacaggcgtcgaaagagaagccttccgttggaacagtggtcgctgttggccccgggccattgggcgatgatggcagcaggacaccattgtcaatcactcctggaagcagcgtgctgtactccaagtatgcaggaagcgagttcaagggttcggaaggcgagtacattgttctcaggtcatccgacgtgatagcggtgctgtcatcataagcttgccctgccctacgtgaactaggaattttgatatttagtccaaaaccttgtttggttattgctctttgcttgtgattggtgaactgtgaattgcttcttcgctctatcgtggaaatgctgcttgatagttttaataagatgacggcttagactcc

SEQ ID NO: 8928 - protein, 299 aa, Triticum aestivum
  misc_feature (1)..(299): Ceres Seq. ID no. 12625362
PKPESNKILIPSLASPVSSVSPPPRTLAPSLSPSPTPARAQLNLAAGAMASVHLCGPKVASAAMAKPALADGLRIPTSSSARPVPTGRRLRGLVVRAATVVSPKYTSVKPLGDRVLVKTKTTEDKTAGGILLPTTAQSRPQAGEVVAVGEGRSLGSNIVEISVPVGAKVIYSKYAGTELEFNDTTHLIMKEDDIIGILDTDDVKDLKPLSDRILIKVAESEEETAGGLLLTQASKEKPSVGTVVAVGPGPLGDDGSRTPLSITPGSSVLYSKYAGSEFKGSEGEYIVLRSSDVIAVLSS

SEQ ID NO: 8929 - protein, 251 aa, Triticum aestivum
  misc_feature (1)..(251): Ceres Seq. ID no. 12625363
MASVHLCGPKVASAAMAKPALADGLRIPTSSSARPVPTGRRLRGLVVRAATVVSPKYTSVKPLGDRVLVKTKTTEDKTAGGILLPTTAQSRPQAGEVVAVGEGRSLGSNIVEISVPVGAKVIYSKYAGTELEFNDTTHLIMKEDDIIGILDTDDVKDLKPLSDRILIKVAESEEETAGGLLLTQASKEKPSVGTVVAVGPGPLGDDGSRTPLSITPGSSVLYSKYAGSEFKGSEGEYIVLRSSDVIAVLSS

SEQ ID NO: 8930 - protein, 236 aa, Triticum aestivum
  misc_feature (1)..(236): Ceres Seq. ID no. 12625364
MAKPALADGLRIPTSSSARPVPTGRRLRGLVVRAATVVSPKYTSVKPLGDRVLVKTKTTEDKTAGGILLPTTAQSRPQAGEVVAVGEGRSLGSNIVEISVPVGAKVIYSKYAGTELEFNDTTHLIMKEDDIIGILDTDDVKDLKPLSDRILIKVAESEEETAGGLLLTQASKEKPSVGTVVAVGPGPLGDDGSRTPLSITPGSSVLYSKYAGSEFKGSEGEYIVLRSSDVIAVLSS

SEQ ID NO: 8931 - protein, 251 aa, Triticum aestivum; identical to SEQ ID NO: 8929
  misc_feature (1)..(251): Ceres Seq. ID no. 16625382

SEQ ID NO: 8932 - DNA, 592 bp, Triticum aestivum
  misc_feature (1)..(592): Ceres Seq. ID no. 12625960
cgacgatgtcccaagtggtccaggggtctctgctcaagcgacggcggcagtggcgagggtcgagacggcggcagcgatgatggctgttagcgaggagctcaacgtcgtcgacggcgagaaggcgaggccgtggaagtgctgcgaccagacactgtgcaccaggtctgccccgccgacctgcttctgccacgacaaggtgaagaagtgcgccaagacctgcaagaactgcctcaaggacgactcgggcacttccctccgcgtgtgcggcgacccgtacttcggctggcccgggcccaagtgcaccaaggtctagcgtcgccgccgacgtccgccgcggtgtctagctaactaggatgtgcatgcacgcccagctctatccttgcactgggcgatggtgaacgaataaagtgagttgatcggccggccggtcagtggccttgtgtaccgagccacggagttctgtatcgcactgtggtaggtgcgcacgtacgtgttgttttcttccgggttgtcgttgtagcgctagtagtgtttagttgcatggtctcagtatcgatgaataagataatccagaggctagtagtgtttattc

SEQ ID NO: 8933 - protein, 103 aa, Triticum aestivum
  misc_feature (1)..(103): Ceres Seq. ID no. 12625961
DDVPSGPGVSAQATAAVARVETAAAMMAVSEELNVVDGEKARPWKCCDQTLCTRSAPPTCFCHDKVKKCAKTCKNCLKDDSGTSLRVCGDPYFGWPGPKCTKV

SEQ ID NO: 8934 - protein, 78 aa, Triticum aestivum
  misc_feature (1)..(78): Ceres Seq. ID no. 12625962
MMAVSEELNVVDGEKARPWKCCDQTLCTRSAPPTCFCHDKVKKCAKTCKNCLKDDSGTSLRVCGDPYFGWPGPKCTKV

SEQ ID NO: 8935 - protein, 77 aa, Triticum aestivum
  misc_feature (1)..(77): Ceres Seq. ID no. 12625963
MAVSEELNVVDGEKARPWKCCDQTLCTRSAPPTCFCHDKVKKCAKTCKNCLKDDSGTSLRVCGDPYFGWPGPKCTKV

SEQ ID NO: 8936 - protein, 77 aa, Triticum aestivum; identical to SEQ ID NO: 8935
  misc_feature (1)..(77): Ceres Seq. ID no. 16625383

SEQ ID NO: 8937 - DNA, 1225 bp, Triticum aestivum
  misc_feature (1)..(1225): Ceres Seq. ID no. 12626036
tagaccaaagcctcgcacccaaatccgcaaagaaagaaagcaagcaagccaaacaaacgacgtttcagccaagaagaagacatgggggagcggcgcagtgacgaccgacgccaggagcccacggtggccagggcggacggccccccgattcccgccgacgagtccgacgacgagttcgagttctccttcgggagccgggagcctgccacgggcggcgccgcggccgacgagctcttcgccgacggccgcatcaggccgttctacccggtgttcggccgggtcttcgacgacgcgcacgtgccgtcggcgcccggccggaggccgctgggccggctgttcctcgaggaggcgcggaactcgtccgtcgggtccacgtcctcgtcctcctcctccgccgccacggacgccggggacctcgacggcgcgtccccggacagctactgcgtctggacgcccggcgcctcggccgcgtcctcgccggcgcggtcgccgcggaagagcggatccacggggtccttgtcgcggtggcgccgcgtcagcgacctcgtcgtcggccgcagccacagcgacggcagggacaagttccgattcctttccgcgccgccctcgcccgccagggagcagcccaaggggaagccacgaggccgggacagcaaagccgccaccgagctcgacacggtggccgccagccaccggcagttctacggcactaaggcctcccccggcgcggcgcggcggacgttcttgccgtaccggcaggatctcgtcggcctcttctccgcgcccaaggggctcagccggagccaatacttctgacttccaagctggcgcgtcccccgccccgccgtggagaaccagtttcaaaatgtgagatttcacatttgggttgaagtttcgaacttttgacccgggagcaactttgtgttcgtaaatggcgatggtaatactggattgttgcacgggattgagctagtccaaaaagacgaggcgtcaagtcagagcaagggaaatgtgaggcctaaattttggatccagtctgggataccgggctctccaagtcaatgtgaagttgtgatcgacatgtgaacatagtactaggaccaaaaaaaggactgtataggagattaaaatacacgtggaagctcagaaaagttttgtagtaatcatgtgttacctgtacatgcatgtatattgtactaccagaataatagattttttttcttgc

SEQ ID NO: 8938 - protein, 289 aa, Triticum aestivum
  misc_feature (1)..(289): Ceres Seq. ID no. 12626037
RPKPRTQIRKERKQASQTNDVSAKKKTWGSGAVTTDARSPRWPGRTAPRFPPTSPTTSSSSPSGAGSLPRAAPRPTSSSPTAASGRSTRCSAGSSTTRTCRRRPAGGRWAGCSSRRRGTRPSGPRPRPPPPPPRTPGTSTARPRTATASGRPAPRPRPRRRGRRGRADPRGPCRGGAASATSSSAAATATAGTSSDSFPRRPRPPGSSPRGSHEAGTAKPPPSSTRWPPATGSSTALRPPPARRGGRSCRTGRISSASSPRPRGSAGANTSDFQAGASPAPPWRTSFKM

SEQ ID NO: 8939 - protein, 244 aa, Triticum aestivum
  misc_feature (1)..(244): Ceres Seq. ID no. 12626038
MGERRSDDRRQEPTVARADGPPIPADESDDEFEFSFGSREPATGGAAADELFADGRIRPFYPVFGRVFDDAHVPSAPGRRPLGRLFLEEARNSSVGSTSSSSSSAATDAGDLDGASPDSYCVWTPGASAASSPARSPRKSGSTGSLSRWRRVSDLVVGRSHSDGRDKFRFLSAPPSPAREQPKGKPRGRDSKAATELDTVAASHRQFYGTKASPGAARRTFLPYRQDLVGLFSAPKGLSRSQYF

SEQ ID NO: 8940 - protein, 244 aa, Triticum aestivum; identical to SEQ ID NO: 8939
  misc_feature (1)..(244): Ceres Seq. ID no. 16612249

SEQ ID NO: 8941 - DNA, 1383 bp, Triticum aestivum
  misc_feature (1)..(1383): Ceres Seq. ID no. 13501595
atctgttccagcctgttcttcctcccgttcccctccgcccttgmcctcatcgaggcgaccggccgaccgatcrgyctgaccccaaacccctccgccgccgcccgcctccccatggccggccgccgcgcgccgcacgtcatgagcctccacgactccggcccgccgctgctcggccgcgcgccgcagcacccgcagcccggygacgaccgcgacgagcccccgcacggcgccctcctccaccacccgcgcgggggcccctcgcagcaccccgccgtggcggccctcgaggaccgcatcgtctcccgggaccgggacatccaggagttcctcgtcgacaaccagcggttcgccgccacccacgtcgcgctccagcagcagctcatctccgcgcagcacgagctccgcgccgtctccatcgccggcaccagggcccgcatggagcgcaaggccgacgtctgcaacatcgccgaccaggccgcgcgcatcgaggccgaggcgcgctccgtcgccggcgcgcgcgtggagatcgagcaggtccacgccgatgtgcgggtgctcgctgccgcgcgcaacgaactcatggaccggctcaaagacctccgcgagcagctagggcgcgcgcagtccaattccgccaagtcggagaacgtccgctcccagattgagaccatgcgacgggagatccagaagggcagggctgcggttgaattcgaaaagaaggcacatgctgataaccttttacaaagtaaagcaatggagaaaaatatgattgctgtggctagtgagattgagaggcttcggggtgagcttgtaaatgctgaaaagcgggccactgctgtcaccacagcagcagctgtaaccaaccctgggtatgctcaaccgtacagcagttctgaggcaacatatgccaccatgtatggcaatcccgaggcagcatatgcagcatatggcagtgctgaggcaacatatgctggaacatatgccaattctgatgcttatagcaccactaatcaggctcagactcgcactgatggcaatcaacattacatggcccagccggttcactatgcgcagtacgagggccagcagcagcagcagcagcagcacaccaatgtgcaaagatgaacgctgactcagggtatctttgacctcgcgctctaccttcttagggctttgccagtgtaaacgagtagctgcaggatgcaccgaattgaggttggcggagggatgaattcattgcattggaggtgccaggagatcttgtttatacattgtcattggttaatcaactctgaaatgcctgtgcaagtcgatagctcggagtccgcaaattcttgatgcagtgccctcttgatcagcaatccaccagttagttgattgtcc

SEQ ID NO: 8942 - protein, 374 aa, Triticum aestivum
  misc_feature (1)..(374): Ceres Seq. ID no. 15223143
  misc_feature (15)..(15): Xaa is any aa, unknown or other
  misc_feature (25)..(25): Xaa is any aa, unknown or other
  misc_feature (67)..(67): Xaa is any aa, unknown or other
ICSSLFFLPFPSALXLIEATGRPIXLTPNPSAAARLPMAGRRAPHVMSLHDSGPPLLGRAPQHPQPXDDRDEPPHGALLHHPRGGPSQHPAVAALEDRIVSRDRDIQEFLVDNQRFAATHVALQQQLISAQHELRAVSIAGTRARMERKADVCNIADQAARIEAEARSVAGARVEIEQVHADVRVLAAARNELMDRLKDLREQLGRAQSNSAKSENVRSQIETMRREIQKGRAAVEFEKKAHADNLLQSKAMEKNMIAVASEIERLRGELVNAEKRATAVTTAAAVTNPGYAQPYSSSEATYATMYGNPEAAYAAYGSAEATYAGTYANSDAYSTTNQAQTRTDGNQHYMAQPVHYAQYEGQQQQQQQHTNVQR

SEQ ID NO: 8943 - protein, 337 aa, Triticum aestivum
  misc_feature (1)..(337): Ceres Seq. ID no. 15223144
  misc_feature (30)..(30): Xaa is any aa, unknown or other
MAGRRAPHVMSLHDSGPPLLGRAPQHPQPXDDRDEPPHGALLHHPRGGPSQHPAVAALEDRIVSRDRDIQEFLVDNQRFAATHVALQQQLISAQHELRAVSIAGTRARMERKADVCNIADQAARIEAEARSVAGARVEIEQVHADVRVLAAARNELMDRLKDLREQLGRAQSNSAKSENVRSQIETMRREIQKGRAAVEFEKKAHADNLLQSKAMEKNMIAVASEIERLRGELVNAEKRATAVTTAAAVTNPGYAQPYSSSEATYATMYGNPEAAYAAYGSAEATYAGTYANSDAYSTTNQAQTRTDGNQHYMAQPVHYAQYEGQQQQQQQHTNVQR

SEQ ID NO: 8944 - protein, 328 aa, Triticum aestivum
  misc_feature (1)..(328): Ceres Seq. ID no. 15223145
  misc_feature (21)..(21): Xaa is any aa, unknown or other
MSLHDSGPPLLGRAPQHPQPXDDRDEPPHGALLHHPRGGPSQHPAVAALEDRIVSRDRDIQEFLVDNQRFAATHVALQQQLISAQHELRAVSIAGTRARMERKADVCNIADQAARIEAEARSVAGARVEIEQVHADVRVLAAARNELMDRLKDLREQLGRAQSNSAKSENVRSQIETMRREIQKGRAAVEFEKKAHADNLLQSKAMEKNMIAVASEIERLRGELVNAEKRATAVTTAAAVTNPGYAQPYSSSEATYATMYGNPEAAYAAYGSAEATYAGTYANSDAYSTTNQAQTRTDGNQHYMAQPVHYAQYEGQQQQQQQHTNVQR

SEQ ID NO: 8945 - protein, 337 aa, Triticum aestivum
  misc_feature (1)..(337): Ceres Seq. ID no. 16611682
MAGRRAPHVMSLHDSGPPLLGRAPQHPQPGDDRDEPPHGALLHHPRGGPSQHPAVAALEDRIVSRDRDIQEFLVDNQRFAATHVALQQQLISAQHELRAVSIAGTRARMERKADVCNIADQAARIEAEARSVAGARVEIEQVHADVRVLAAARNELMDRLKDLREQLGRAQSNSAKSENVRSQIETMRREIQKGRAAVEFEKKAHADNLLQSKAMEKNMIAVASEIERLRGELVNAEKRATAVTTAAAVTNPGYAQPYSSSEATYATMYGNPEAAYAAYGSAEATYAGTYANSDAYSTTNQAQTRTDGNQHYMAQPVHYAQYEGQQQQQQQHTNVQR

SEQ ID NO: 8946 - DNA, 1417 bp, Triticum aestivum
  misc_feature (1)..(1417): Ceres Seq. ID no. 13584665
aacggtggaccagacaccgcagcaccaacgcaaatcctcaccactctctcctccgcctcgcaccatcccctcgccgccgccgccgccgccgccatgttctggctccgtcgcggcgtcctcgctcaggtcctcccttcttcctccgcctctcccgtatcccctctccaccgcctcatctccgccgccgcgcccgccatctctccaaacatcagattcgccgtggaggagtacctcgtctccacctgcggcctcacgcgaccacaggccctaaaggcctccgccaagctttcccacctcaagtcccccgccaatcccgacgccgtgctcgccttcctcgccggcctcggcctctccgacgccgatgtcgccgccctcgtcgccaaggacccgcagttcctctgcgccagcgtggagagaaccctggcacccgtcgtcgccgggctctctggcctcggcttatcacgttccgacatcgcgcgcctcgcctcgctctcccgttacagattccgctgtagatccatcgtctccaagctgcagtactacatgcctttctttgggtcctttgagaatctcctccgagccctcaagaggaacttctaccttcactcggctgacctcgatgatgtggtcaagcccaacgtcgcgatgctgcgggagtgcgggctaggtgcttgtgatattgtcaagctatgcatcagtcaaccatggcttctcaccgccaacctggagcgtgtccaggcgatggtggaatgcgctgaaaacataggtgtgccccgtgcctctgggatgttcaggcatgcactgcacgctgttgcatttctcagcgaggacaagatcgcagccagggtgaagtacttgaagaacaccttcaggtggacggatgctgaggtaggcatggctgtttctaaggctccaatggtgctggcgaggtccaaggagtcgctgcagcgcaggtctgagttcctcatctccgaggtgggcttggaaccggtgtacattgctcaacggtcggaaataatcgggcacagcctagagggccggctcaggccccggtactatgctgtgaagtttctcaaggaaaatggattgctcaagcgtgacccaaactacagtaccgttttcaagattagtgagaaggcattcaggaagaagttcatattccctcacaaggaggctgcactccacctcacagaagactacgatgccgcttgcaagggggacgtgccgactaatttcagattcacataaagacgggctatgatgtaattgggtgctggttgtctgctgttgtatgactgttagatgctgggttggtcattgctaacgtgtgatggaattgataatttgatccccaaatactggtatgtaatgctatcactcagcagagaagaaaccattgattggttatgaacttctc

SEQ ID NO: 8947 - protein, 415 aa, Triticum aestivum
  misc_feature (1)..(415): Ceres Seq. ID no. 13584666
NGGPDTAAPTQILTTLSSASHHPLAAAAAAAMFWLRRGVLAQVLPSSSASPVSPLHRLISAAAPAISPNIRFAVEEYLVSTCGLTRPQALKASAKLSHLKSPANPDAVLAFLAGLGLSDADVAALVAKDPQFLCASVERTLAPVVAGLSGLGLSRSDIARLASLSRYRFRCRSIVSKLQYYMPFFGSFENLLRALKRNFYLHSADLDDVVKPNVAMLRECGLGACDIVKLCISQPWLLTANLERVQAMVECAENIGVPRASGMFRHALHAVAFLSEDKIAARVKYLKNTFRWTDAEVGMAVSKAPMVLARSKESLQRRSEFLISEVGLEPVYIAQRSEIIGHSLEGRLRPRYYAVKFLKENGLLKRDPNYSTVFKISEKAFRKKFIFPHKEAALHLTEDYDAACKGDVPTNFRFT

SEQ ID NO: 8948 - protein, 384 aa, Triticum aestivum
  misc_feature (1)..(384): Ceres Seq. ID no. 13584667
MFWLRRGVLAQVLPSSSASPVSPLHRLISAAAPAISPNIRFAVEEYLVSTCGLTRPQALKASAKLSHLKSPANPDAVLAFLAGLGLSDADVAALVAKDPQFLCASVERTLAPVVAGLSGLGLSRSDIARLASLSRYRFRCRSIVSKLQYYMPFFGSFENLLRALKRNFYLHSADLDDVVKPNVAMLRECGLGACDIVKLCISQPWLLTANLERVQAMVECAENIGVPRASGMFRHALHAVAFLSEDKIAARVKYLKNTFRWTDAEVGMAVSKAPMVLARSKESLQRRSEFLISEVGLEPVYIAQRSEIIGHSLEGRLRPRYYAVKFLKENGLLKRDPNYSTVFKISEKAFRKKFIFPHKEAALHLTEDYDAACKGDVPTNFRFT

SEQ ID NO: 8949 - protein, 234 aa, Triticum aestivum
  misc_feature (1)..(234): Ceres Seq. ID no. 13584668
MPFFGSFENLLRALKRNFYLHSADLDDVVKPNVAMLRECGLGACDIVKLCISQPWLLTANLERVQAMVECAENIGVPRASGMFRHALHAVAFLSEDKIAARVKYLKNTFRWTDAEVGMAVSKAPMVLARSKESLQRRSEFLISEVGLEPVYIAQRSEIIGHSLEGRLRPRYYAVKFLKENGLLKRDPNYSTVFKISEKAFRKKFIFPHKEAALHLTEDYDAACKGDVPTNFRFT

SEQ ID NO: 8950 - protein, 384 aa, Triticum aestivum; identical to SEQ ID NO: 8948
  misc_feature (1)..(384): Ceres Seq. ID no. 16625396

SEQ ID NO: 8951 - DNA, 449 bp, Triticum aestivum
  misc_feature (1)..(449): Ceres Seq. ID no. 13585078
tagggtttctcctcaaacactcctctcctctcccctctcccccaacccctcgccgccgccgcatccaaaacccctccccccatccacctcgtcctctaatggcatcacggcatcaggcgaagctgctagctcgtgtctcccatccgcttcccgaatagcttgttgatctaccgcagccccccacctccgccgccgccgccatgacgaccctcaaccagttcgatctcctcggagacgtcgacaacgacgaccccacgcagctgcttgctgcggcggcggccgccgcggcaaagaaggcccaggcgaataagacggaggcagcgcctgctggaaaggcgggccagactgcggcggcggccaagttgccgaccaaatccgctcccccggcacaggctgggagggatgcgaggagcggaggccaccatcacgtggaggatttggccgtggtg

SEQ ID NO: 8952 - protein, 83 aa, Triticum aestivum
  misc_feature (1)..(83): Ceres Seq. ID no. 13585079
MTTLNQFDLLGDVDNDDPTQLLAAAAAAAAKKAQANKTEAAPAGKAGQTAAAAKLPTKSAPPAQAGRDARSGGHHHVEDLAVV

SEQ ID NO: 8953 - protein, 54 aa, Triticum aestivum
  misc_feature (1)..(54): Ceres Seq. ID no. 13585080
RVSPQTLLSSPLSPNPSPPPHPKPLPPSTSSSNGITASGEAASSCLPSASRIAC

SEQ ID NO: 8954 - protein, 51 aa, Triticum aestivum
  misc_feature (1)..(51): Ceres Seq. ID no. 13585081
GFLLKHSSPLPSPPTPRRRRIQNPSPHPPRPLMASRHQAKLLARVSHPLPE

SEQ ID NO: 8955 - DNA, 1960 bp, Triticum aestivum
  misc_feature (1)..(1960): Ceres Seq. ID no. 13590904
aaaaatccctctcccaaaacaagcggcataaaccacgacctcgacccgctccgtctccgctcccccgcttccagtccactccccttcctccccctccgctccgccccctcaagcgaaggcaccggatggcggcgtcccccacccccggcggcggcctcggggccatcctcgccgccggcgacagggactacctcgtccgcaactccggcgagcaggtgaagatcagcagcattgagggagacactgtagctatctatttctcggcctcatggtgcccgccatgccagcggtttacaccaaagcttattgaagcatacaaagaacttacctcaaatggcaagagctttgaggtgatctttgtttcaggcgaccgagatgaggaagcattcaatgcctattttgcaaagatgccgtggttggcagttcctttctccgactccgaaggccgtaaaagccttgatgagcggtttgacgtcaacggtattccacaccttgttttccttgatgcaaaaactggcgaagttcttactgacgaaggagttgagtttgtgagtgaatatggaatagaagcttatccttttacaactgagaggatcaatgaattgaaggaacaagaaaaggctgctaaggataaccaaactattcatagtgtgcttgctacaccaaatcgtaactatgtaatttcaaacacgggggagaaggtacccatcgttgatcttgaggggaagtatgttggtatatgctttgtagtgaacggctaccctccagttgaggaatttaccccagtgcttgccaagatatatgcgaaactcaaagaagtgggggagaagtttgaagttgtagctgtatccttggacagtgatgaggaatcattcaataacagtttttcaagcatgccttggctcgccattccccatggcgacaagatgtgtcagaagcttgtcagttactttgagcttagtgatcttcctacactagtgctgattggtcctgatgggaagacactgagcagcaatattgcagacataatcaatgagcatggtttggatgcatgggaggggttccccttcaatgcagagaagctggaaattctagctgagaaggcaaaggctaaagcagcctcacagacattggagtcccttctggttactggtgacgtggactttgtcatcgggaaagatggagcaaaggttcctgtagcagaacttgttgggaagactgtcctcctctacttttcagctaaatggtgtgggccatgcagagccttcctgcctacacttgtggatgtctacaacaagatcaaggagaagaacagcgatttcgagatcgtcttcgtctctagcgacagggaccagagctcattcgacgacttcttctctggcatgccatggctcgccatccccttggaagacgaaaggaaggcgtacctgaaaaagaagttcaagatccgtggaatcccttctctggtcgccattggccccgatgggaagacggtcaacacggacgcgaagacttcgctggcggtccatggcgccgacgcgtttccgttcaccgacgagaggatccaggagctggagaagaagatcgaggagatggcaaaggggtggcctgagaagctgaagcacgagctgcacgagcacgagctcgtgctgatccgccgccccaggccgtacggctgcgacgggtgcgaagagatgggcacctcctggtcctacaactgcgcggagtgcgacttcgatctgcacaccaagtgtgcgctgggtgaggagaagaagggagaggaggtgaatgggcaggagcatgctgctgccccagctgggtacgtgtgcgagggagacgtctgcaggaaggcctaggtatcgttgtgttgtgtgtgttccttgccagctgaggcgtgtctgaatcatgtgctgtgtggtgtgatgataaataaatcttgcatccgatggtttggcttggg

SEQ ID NO: 8956 - protein, 617 aa, Triticum aestivum
  misc_feature (1)..(617): Ceres Seq. ID no. 13590905
KSLSQNKRHKPRPRPAPSPLPRFQSTPLPPPPLRPLKRRHRMAASPTPGGGLGAILAAGDRDYLVRNSGEQVKISSIEGDTVAIYFSASWCPPCQRFTPKLIEAYKELTSNGKSFEVIFVSGDRDEEAFNAYFAKMPWLAVPFSDSEGRKSLDERFDVNGIPHLVFLDAKTGEVLTDEGVEFVSEYGIEAYPFTTERINELKEQEKAAKDNQTIHSVLATPNRNYVISNTGEKVPIVDLEGKYVGICFVVNGYPPVEEFTPVLAKIYAKLKEVGEKFEVVAVSLDSDEESFNNSFSSMPWLAIPHGDKMCQKLVSYFELSDLPTLVLIGPDGKTLSSNIADIINEHGLDAWEGFPFNAEKLEILAEKAKAKAASQTLESLLVTGDVDFVIGKDGAKVPVAELVGKTVLLYFSAKWCGPCRAFLPTLVDVYNKIKEKNSDFEIVFVSSDRDQSSFDDFFSGMPWLAIPLEDERKAYLKKKFKIRGIPSLVAIGPDGKTVNTDAKTSLAVHGADAFPFTDERIQELEKKIEEMAKGWPEKLKHELHEHELVLIRRPRPYGCDGCEEMGTSWSYNCAECDFDLHTKCALGEEKKGEEVNGQEHAAAPAGYVCEGDVCRKA

SEQ ID NO: 8957 - protein, 576 aa, Triticum aestivum
  misc_feature (1)..(576): Ceres Seq. ID no. 13590906
MAASPTPGGGLGAILAAGDRDYLVRNSGEQVKISSIEGDTVAIYFSASWCPPCQRFTPKLIEAYKELTSNGKSFEVIFVSGDRDEEAFNAYFAKMPWLAVPFSDSEGRKSLDERFDVNGIPHLVFLDAKTGEVLTDEGVEFVSEYGIEAYPFTTERINELKEQEKAAKDNQTIHSVLATPNRNYVISNTGEKVPIVDLEGKYVGICFVVNGYPPVEEFTPVLAKIYAKLKEVGEKFEVVAVSLDSDEESFNNSFSSMPWLAIPHGDKMCQKLVSYFELSDLPTLVLIGPDGKTLSSNIADIINEHGLDAWEGFPFNAEKLEILAEKAKAKAASQTLESLLVTGDVDFVIGKDGAKVPVAELVGKTVLLYFSAKWCGPCRAFLPTLVDVYNKIKEKNSDFEIVFVSSDRDQSSFDDFFSGMPWLAIPLEDERKAYLKKKFKIRGIPSLVAIGPDGKTVNTDAKTSLAVHGADAFPFTDERIQELEKKIEEMAKGWPEKLKHELHEHELVLIRRPRPYGCDGCEEMGTSWSYNCAECDFDLHTKCALGEEKKGEEVNGQEHAAAPAGYVCEGDVCRKA

SEQ ID NO: 8958 - protein, 482 aa, Triticum aestivum
  misc_feature (1)..(482): Ceres Seq. ID no. 13590907
MPWLAVPFSDSEGRKSLDERFDVNGIPHLVFLDAKTGEVLTDEGVEFVSEYGIEAYPFTTERINELKEQEKAAKDNQTIHSVLATPNRNYVISNTGEKVPIVDLEGKYVGICFVVNGYPPVEEFTPVLAKIYAKLKEVGEKFEVVAVSLDSDEESFNNSFSSMPWLAIPHGDKMCQKLVSYFELSDLPTLVLIGPDGKTLSSNIADIINEHGLDAWEGFPFNAEKLEILAEKAKAKAASQTLESLLVTGDVDFVIGKDGAKVPVAELVGKTVLLYFSAKWCGPCRAFLPTLVDVYNKIKEKNSDFEIVFVSSDRDQSSFDDFFSGMPWLAIPLEDERKAYLKKKFKIRGIPSLVAIGPDGKTVNTDAKTSLAVHGADAFPFTDERIQELEKKIEEMAKGWPEKLKHELHEHELVLIRRPRPYGCDGCEEMGTSWSYNCAECDFDLHTKCALGEEKKGEEVNGQEHAAAPAGYVCEGDVCRKA

SEQ ID NO: 8959 - protein, 576 aa, Triticum aestivum; identical to SEQ ID NO: 8957
  misc_feature (1)..(576): Ceres Seq. ID no. 16611774

SEQ ID NO: 8960 - DNA, 752 bp, Triticum aestivum
  misc_feature (1)..(752): Ceres Seq. ID no. 13591134
agcgcgtccccattccgatccgttggcttcctgttcatacattctcccctcccggcgccgcctccagcctagggtttcctcccgccgtccgccgccatggctcgccgcagcggaggaggaaggtcttcccgccctgctccacgtgctgctccagtgagaaacccaccagcgccagcccgtcaagctcctccacctgctactacccagaatagcggtggtggtatcatgagtggaattgggtccaccattgctcagggcatggctttcggtactggcagtgccatggcgcacagggctgttgatgctgtgatgggtccccgcaccattcagcatgagactgttgtcggtgaggctgctgcatctatgactccaatggacaatgctgctgatgacaagtgtggcaacccttccaaggccttccaagattgcatcaaccactacggaagcgacatcagcaagtgccagttctacctcgacatgctgaacgagtgccgccgtggaggagcaggagctggtgcaactctttaagctactatctttgcttgattgcggcttaattggtcggaacctgttttcagtcatgatgatgatgatatatatctcctaaataattcattggcaatattatgaacctatgccacagcttatgtctattacctaccctagtttgtggtctctgttgtcctgggagtatttccttgtattgatgttggaattaccttcatggcagtgggtttataaatatggagttt

SEQ ID NO: 8961 - protein, 143 aa, Triticum aestivum
  misc_feature (1)..(143): Ceres Seq. ID no. 13591135
MARRSGGGRSSRPAPRAAPVRNPPAPARQAPPPATTQNSGGGIMSGIGSTIAQGMAFGTGSAMAHRAVDAVMGPRTIQHETVVGEAAASMTPMDNAADDKCGNPSKAFQDCINHYGSDISKCQFYLDMLNECRRGGAGAGATL

SEQ ID NO: 8962 - protein, 100 aa, Triticum aestivum
  misc_feature (1)..(100): Ceres Seq. ID no. 13591136
MSGIGSTIAQGMAFGTGSAMAHRAVDAVMGPRTIQHETVVGEAAASMTPMDNAADDKCGNPSKAFQDCINHYGSDISKCQFYLDMLNECRRGGAGAGATL

SEQ ID NO: 8963 - protein, 89 aa, Triticum aestivum
  misc_feature (1)..(89): Ceres Seq. ID no. 13591137
MAFGTGSAMAHRAVDAVMGPRTIQHETVVGEAAASMTPMDNAADDKCGNPSKAFQDCINHYGSDISKCQFYLDMLNECRRGGAGAGATL

SEQ ID NO: 8964 - protein, 143 aa, Triticum aestivum; identical to SEQ ID NO: 8961
  misc_feature (1)..(143): Ceres Seq. ID no. 16612195

SEQ ID NO: 8965 - DNA, 1469 bp, Triticum aestivum
  misc_feature (1)..(1469): Ceres Seq. ID no. 13591377
actccacacacacacaccggacacaagcccacccagcgccctaccacccaaccagcacccgccgcccgcccgcccgccatgtcgtccgccgcgccggcgccggcgccggaggagcagcggccgcgcccggtgcgcttcggcatcatgggctgcgcgtccatcgcgcgcaagctcgcgcgggcgatgctgctggccgcgcccgcggccgccgtggccgccgtcggcagccgctccgaggccaaggcgcgcctcttcgccgccgacaacggcctccccgcgggcgcgcgcctgcacggctcctacgaggcgctcctcgacgacccggccgtcgacgccgtctacctgccgctccccaccagcctccacgtgcagtgggtcaccgccgccgccgcgcggggcaagcacgtgctcctcgagaagcccaccgcgctctgcgccgccgacctcgacgccatcctcgccgcctgcgacgccagcggcgtccagttcatggactccaccatgtggatgcaccacccccgcaccgccaagatgcgcgacctcctccccgccgacgtcggcgacgtcagagttataaacagtctgttcagcttccgagcaaacgaagatttcctccagaatgacatcagggtgaagccagacctcgacgcgctgggcgtactcggcgatgccgggtggtactgcatccgcgcgatcctgtgggccgtcaactacgagctcccgaagaacgtgatcgcgctccccgaccctgtcaagaaccaagccggcgtgctcatcgcctgcggcgcgacgctctactgggccgacggaaagacggccaccttccactgctcgttcctcgccaacctcaccatggacctgaccgtcgtcggcaccgacggcacgctccacgtcaccgacttcatcatcccgtacgaggagaagtccggcccgttcagcgtggcgtccaggtcgaacttcgccgagctccacaccgggtgggttccgcagcccagcaggcacgtcgtcacgactgacctgccgcaggaggccctgatggtccaggagttctgcaggctggtgcagggcatcagagacgccggcgccaagcctgagggcaagtggccggccatcaccaggaagacgcaggttgtgatggacgcggtgaaggcttccattgacaagggatttgagtctgtcgatgttgtgagctaagaaaatgcaacacgtagctggtcattctggtgatatgtcttccaagccatggtgcatacctggccattccggtgatcttcaaggccatggcgtatggattgtgcgtttgctcaaatcgtacttgtgcgcaagcgcaaaactacttatatatattggaataataactcgaattattattgccataccaaggacaacattgcagttatcaagttcaatgatatattgctacggatttattgtgtggtattttggcaatatggatgcttgcgaggtcc

SEQ ID NO: 8966 - protein, 397 aa, Triticum aestivum
  misc_feature (1)..(397): Ceres Seq. ID no. 13591378
TPHTHTGHKPTQRPTTQPAPAARPPAMSSAAPAPAPEEQRPRPVRFGIMGCASIARKLARAMLLAAPAAAVAAVGSRSEAKARLFAADNGLPAGARLHGSYEALLDDPAVDAVYLPLPTSLHVQWVTAAAARGKHVLLEKPTALCAADLDAILAACDASGVQFMDSTMWMHHPRTAKMRDLLPADVGDVRVINSLFSFRANEDFLQNDIRVKPDLDALGVLGDAGWYCIRAILWAVNYELPKNVIALPDPVKNQAGVLIACGATLYWADGKTATFHCSFLANLTMDLTVVGTDGTLHVTDFIIPYEEKSGPFSVASRSNFAELHTGWVPQPSRHVVTTDLPQEALMVQEFCRLVQGIRDAGAKPEGKWPAITRKTQVVMDAVKASIDKGFESVDVVS

SEQ ID NO: 8967 - protein, 371 aa, Triticum aestivum
  misc_feature (1)..(371): Ceres Seq. ID no. 13591379
MSSAAPAPAPEEQRPRPVRFGIMGCASIARKLARAMLLAAPAAAVAAVGSRSEAKARLFAADNGLPAGARLHGSYEALLDDPAVDAVYLPLPTSLHVQWVTAAAARGKHVLLEKPTALCAADLDAILAACDASGVQFMDSTMWMHHPRTAKMRDLLPADVGDVRVINSLFSFRANEDFLQNDIRVKPDLDALGVLGDAGWYCIRAILWAVNYELPKNVIALPDPVKNQAGVLIACGATLYWADGKTATFHCSFLANLTMDLTVVGTDGTLHVTDFIIPYEEKSGPFSVASRSNFAELHTGWVPQPSRHVVTTDLPQEALMVQEFCRLVQGIRDAGAKPEGKWPAITRKTQVVMDAVKASIDKGFESVDVVS

SEQ ID NO: 8968 - protein, 349 aa, Triticum aestivum
  misc_feature (1)..(349): Ceres Seq. ID no. 13591380
MGCASIARKLARAMLLAAPAAAVAAVGSRSEAKARLFAADNGLPAGARLHGSYEALLDDPAVDAVYLPLPTSLHVQWVTAAAARGKHVLLEKPTALCAADLDAILAACDASGVQFMDSTMWMHHPRTAKMRDLLPADVGDVRVINSLFSFRANEDFLQNDIRVKPDLDALGVLGDAGWYCIRAILWAVNYELPKNVIALPDPVKNQAGVLIACGATLYWADGKTATFHCSFLANLTMDLTVVGTDGTLHVTDFIIPYEEKSGPFSVASRSNFAELHTGWVPQPSRHVVTTDLPQEALMVQEFCRLVQGIRDAGAKPEGKWPAITRKTQVVMDAVKASIDKGFESVDVVS

SEQ ID NO: 8969 - protein, 371 aa, Triticum aestivum; identical to SEQ ID NO: 8967
  misc_feature (1)..(371): Ceres Seq. ID no. 16611693

SEQ ID NO: 8970 - DNA, 2259 bp, Triticum aestivum
  misc_feature (1)..(2259): Ceres Seq. ID no. 13596319
  misc_feature (879)..(879): n is a, c, t, g, unknown, or other
ctagcagcgcccattaaaaaaatgaataccacgctgagggaggcctcttcctcgctcgatcccgaccgatccccgcgcagtgggggccacgcctctccatgacgcaagggccgacgtcactcctcccggtctgggcgcggacgactgcgcgaaggcccagtagtcgacgccagtcgctccacgccaccaccgcagaggccatggatggagaagacgcgcaccacaggccctcttcctcctcctcgtccggcggcccctttctctccggcctctgcgccgccgcgctccgccgcaagcccatctccgcgcgcgcctctgccgccgcctccggcgagggcctcgtgcggcagctcggcgtcctcgagctcgtgctcctcgggatcggcgcgtccatcggtgccggcatcttcgtcatcaccggaaccggcgcccgcgacgccggcccaggtgttacaatcagttttgctctcgctggagctgcgtgtgtgctcaatgcattgtgctatgctgaactggcatctcgttttcctgccgtggtcgggggagcatacttgtacacatatgcagcgtttaatgaactcacggccttcttggttttcacccagttgatgcttgattaccatattggggctgcaagcattgctcgtagcctagcaagctattttatccaattcttggagctgattccttctgtgaaaggcaatgttccgagttggattgggcatggagaagagttttttggtggtgtcgtttcagttaacatattggctccaatccttcttgtcatcctgactgtgatcctatgccgcggtgtcaaagaatcatctgcagtgaatacctttatgactacattgaagataatcatcgtcatagtcgttntatttgctggtgtgtttgaggtggatgtatcaaactggtcaccatttatgccgaatggtttcaaagctgttgtaaccggatctacagtagtcttctttgcatatgttggattcgatgcagttgctaattctgccgaggaagctaaaaacccacagcgggacttgcctattggcatcctaggaagccttctggcatgtgtcatcctatatgttgctgtatgcttggtgattactggaatgttgccatatacattactgggtgaagatgctcccttggctgaggctttttctgcaaaggggctgaaatttgtaactgttttgatcagcattggagctgttgctggtcttactacaacacttcttgttggtctgtatgttcagtcacgtttgtatcttggacttggaagggatggcctactaccttcaatattttctaaagttcatccaacactgcatactcctctgcactctcagatctgggttggttgtgttgcagcagtcttagctggcctctttaatgtgcatgcactctctcatattctctcagttggcacactgacaggctactcggttgtatcagcttgtgtgatcacacttcgatggagcgacaaagcaactaattctcgctcccttggaaaattttcaatctggcaggagggtgttttttgtcttgtcatagtggctctctgtggtttcatagcaggaatatcctaccggtttagctattctattgccttcatcatcatagcttttctgatagctacagtcggcagtttttctctgctgtttcgacaggtgtatgttcctgtggacccacctcgcttttcttgtcctggagttcctatggttccgattgtctctgttttcttcaatatgtttttgtttgctcagctacatgaagaagcttggtacagatttgtcatccttagtctcatcgcggtgggggtatatgctggatatggtcagtacaacgctgttccgtctacttcggaccactcgtctgttgcgtatcatggagtgccttcggaagccccatgatctattgcaagcctccaagtttatctgaaaatccatgtaccattggatcgtcaggggaggccatggccgtaagcctacctgtattgctcgaagccgtatgtgtagtatgttctccatagttccatatgtacatctgtatgatattttggaggtcagccaccatatcatttaccaatgaaatgacagcgaaagttttgttgagcaggatacacacacacagacacaccaaagattcacttggaaaggctttgaaagtcacgattgaaagctttatgtacttgtagtattacagttcataacttcatacatgtacttaattcatctgaaaaaaaacttagttcgc

SEQ ID NO: 8971 - protein, 605 aa, Triticum aestivum
  misc_feature (1)..(605): Ceres Seq. ID no. 15221835
  misc_feature (261)..(261): Xaa is any aa, unknown or other
MTQGPTSLLPVWARTTARRPSSRRQSLHATTAEAMDGEDAHHRPSSSSSSGGPFLSGLCAAALRRKPISARASAAASGEGLVRQLGVLELVLLGIGASIGAGIFVITGTGARDAGPGVTISFALAGAACVLNALCYAELASRFPAVVGGAYLYTYAAFNELTAFLVFTQLMLDYHIGAASIARSLASYFIQFLELIPSVKGNVPSWIGHGEEFFGGVVSVNILAPILLVILTVILCRGVKESSAVNTFMTTLKIIIVIVVXFAGVFEVDVSNWSPFMPNGFKAVVTGSTVVFFAYVGFDAVANSAEEAKNPQRDLPIGILGSLLACVILYVAVCLVITGMLPYTLLGEDAPLAEAFSAKGLKFVTVLISIGAVAGLTTTLLVGLYVQSRLYLGLGRDGLLPSIFSKVHPTLHTPLHSQIWVGCVAAVLAGLFNVHALSHILSVGTLTGYSVVSACVITLRWSDKATNSRSLGKFSIWQEGVFCLVIVALCGFIAGISYRFSYSIAFIIIAFLIATVGSFSLLFRQVYVPVDPPRFSCPGVPMVPIVSVFFNMFLFAQLHEEAWYRFVILSLIAVGVYAGYGQYNAVPSTSDHSSVAYHGVPSEAP

SEQ ID NO: 8972 - protein, 571 aa, Triticum aestivum
  misc_feature (1)..(571): Ceres Seq. ID no. 15221836
  misc_feature (227)..(227): Xaa is any aa, unknown or other
MDGEDAHHRPSSSSSSGGPFLSGLCAAALRRKPISARASAAASGEGLVRQLGVLELVLLGIGASIGAGIFVITGTGARDAGPGVTISFALAGAACVLNALCYAELASRFPAVVGGAYLYTYAAFNELTAFLVFTQLMLDYHIGAASIARSLASYFIQFLELIPSVKGNVPSWIGHGEEFFGGVVSVNILAPILLVILTVILCRGVKESSAVNTFMTTLKIIIVIVVXFAGVFEVDVSNWSPFMPNGFKAVVTGSTVVFFAYVGFDAVANSAEEAKNPQRDLPIGILGSLLACVILYVAVCLVITGMLPYTLLGEDAPLAEAFSAKGLKFVTVLISIGAVAGLTTTLLVGLYVQSRLYLGLGRDGLLPSIFSKVHPTLHTPLHSQIWVGCVAAVLAGLFNVHALSHILSVGTLTGYSVVSACVITLRWSDKATNSRSLGKFSIWQEGVFCLVIVALCGFIAGISYRFSYSIAFIIIAFLIATVGSFSLLFRQVYVPVDPPRFSCPGVPMVPIVSVFFNMFLFAQLHEEAWYRFVILSLIAVGVYAGYGQYNAVPSTSDHSSVAYHGVPSEAP

SEQ ID NO: 8973 - protein, 435 aa, Triticum aestivum
  misc_feature (1)..(435): Ceres Seq. ID no. 15221837
  misc_feature (91)..(91): Xaa is any aa, unknown or other
MLDYHIGAASIARSLASYFIQFLELIPSVKGNVPSWIGHGEEFFGGVVSVNILAPILLVILTVILCRGVKESSAVNTFMTTLKIIIVIVVXFAGVFEVDVSNWSPFMPNGFKAVVTGSTVVFFAYVGFDAVANSAEEAKNPQRDLPIGILGSLLACVILYVAVCLVITGMLPYTLLGEDAPLAEAFSAKGLKFVTVLISIGAVAGLTTTLLVGLYVQSRLYLGLGRDGLLPSIFSKVHPTLHTPLHSQIWVGCVAAVLAGLFNVHALSHILSVGTLTGYSVVSACVITLRWSDKATNSRSLGKFSIWQEGVFCLVIVALCGFIAGISYRFSYSIAFIIIAFLIATVGSFSLLFRQVYVPVDPPRFSCPGVPMVPIVSVFFNMFLFAQLHEEAWYRFVILSLIAVGVYAGYGQYNAVPSTSDHSSVAYHGVPSEAP

SEQ ID NO: 8974 - protein, 605 aa, Triticum aestivum
  misc_feature (1)..(605): Ceres Seq. ID no. 16611722
MTQGPTSLLPVWARTTARRPSSRRQSLHATTAEAMDGEDAHHRPSSSSSSGGPFLSGLCAAALRRKPISARASAAASGEGLVRQLGVLELVLLGIGASIGAGIFVITGTGARDAGPGVTISFALAGAACVLNALCYAELASRFPAVVGGAYLYTYAAFNELTAFLVFTQLMLDYHIGAASIARSLASYFIQFLELIPSVKGNVPSWIGHGEEFFGGVVSVNILAPILLVILTVILCRGVKESSAVNTFMTTLKIIIVIVVVFAGVFEVDVSNWSPFMPNGFKAVVTGSTVVFFAYVGFDAVANSAEEAKNPQRDLPIGILGSLLACVILYVAVCLVITGMLPYTLLGEDAPLAEAFSAKGLKFVTVLISIGAVAGLTTTLLVGLYVQSRLYLGLGRDGLLPSIFSKVHPTLHTPLHSQIWVGCVAAVLAGLFNVHALSHILSVGTLTGYSVVSACVITLRWSDKATNSRSLGKFSIWQEGVFCLVIVALCGFIAGISYRFSYSIAFIIIAFLIATVGSFSLLFRQVYVPVDPPRFSCPGVPMVPIVSVFFNMFLFAQLHEEAWYRFVILSLIAVGVYAGYGQYNAVPSTSDHSSVAYHGVPSEAP

SEQ ID NO: 8975 - DNA, 1328 bp, Triticum aestivum
  misc_feature (1)..(1328): Ceres Seq. ID no. 13596902
cctaatcgaaaagtcgccgctaaccactgcttcctctgctccgcacccaaatctcagatcgagccccgcaagtcaaccgccgatggccgcctccaccggcagccgccgcttcaagatcttcgcggccgccgacggcttcggggagccgctcaaggacgccgtcgtcgcgcacctccgcgcccactcctccgtcgccgacgtcgtcgacctcggcgtcgacaagtactactccgcggccgccgccgtcgcccgcagcgtctcctcctcggtccccgaccccgcgctcgagccccgcggcgtcgtcgtctgcggcaccggcgccggcgtcaccatcttcgccaacaagtaccccggcgtgtacgccacccactgcagctccgccgccgacgccgtcaacacccgctccatcaacgcctgcaacgtcctcgccctctccggcatggccaccccgccggaggccgccgcggtcatcgccgacgcctggctcgccacccccttccgcgccccctgccccgcgtccggcgacgccccttggccggaggacattcagaagttctttgacgttgcccccggcgagatggcctccatccccgagggattggcggcccctcctgcgccggactccgcctgcgccatctgctgcctgaggaaggggatggagttcgagccggtggacatcatgcccggcggcgagatgcggattgtgcgggagagccccacttcggcctacgtgcggttcaaagctggaagcgtggagccggcccaccaccacaccttcggccacgacctggtggtgatcaagggcaagaagaaggtgtggaacttgaccaagaaggagagctatggcctcgtcgacggggacttcctgttcacgcctgctggggacgtgcaccgtgtcaagtacttggaggacacggagttcttcatccgctgggatgggcactgggacatattcctcgatgaagacctcgagaccgcacgcaatgccatcgatgcagagctcggtgtgatcgacagtgacaagtgaggagggcatggtgatgcgcctggatgagttatcttgaggagacatgtgaaggtgctatctcgttgttccaccttttctccatgttcacttctacaatgtttgttgcttgtgctgtgcctatactggtgctggtgacatgttttcaaatatgtatgttgctggacgatttgccatgcttgtcgaataaagtggtgataatggtagtaatgctaccttgttatggttgcacaaaaaaaaaaaaaaaaaagcttatcgataccgtcgactgtttaaacacaataaagttggaacgggagggggg

SEQ ID NO: 8976 - protein, 341 aa, Triticum aestivum
  misc_feature (1)..(341): Ceres Seq. ID no. 13596903
LIEKSPLTTASSAPHPNLRSSPASQPPMAASTGSRRFKIFAAADGFGEPLKDAVVAHLRAHSSVADVVDLGVDKYYSAAAAVARSVSSSVPDPALEPRGVVVCGTGAGVTIFANKYPGVYATHCSSAADAVNTRSINACNVLALSGMATPPEAAAVIADAWLATPFRAPCPASGDAPWPEDIQKFFDVAPGEMASIPEGLAAPPAPDSACAICCLRKGMEFEPVDIMPGGEMRIVRESPTSAYVRFKAGSVEPAHHHTFGHDLVVIKGKKKVWNLTKKESYGLVDGDFLFTPAGDVHRVKYLEDTEFFIRWDGHWDIFLDEDLETARNAIDAELGVIDSDK

SEQ ID NO: 8977 - protein, 314 aa, Triticum aestivum
  misc_feature (1)..(314): Ceres Seq. ID no. 13596904
MAASTGSRRFKIFAAADGFGEPLKDAVVAHLRAHSSVADVVDLGVDKYYSAAAAVARSVSSSVPDPALEPRGVVVCGTGAGVTIFANKYPGVYATHCSSAADAVNTRSINACNVLALSGMATPPEAAAVIADAWLATPFRAPCPASGDAPWPEDIQKFFDVAPGEMASIPEGLAAPPAPDSACAICCLRKGMEFEPVDIMPGGEMRIVRESPTSAYVRFKAGSVEPAHHHTFGHDLVVIKGKKKVWNLTKKESYGLVDGDFLFTPAGDVHRVKYLEDTEFFIRWDGHWDIFLDEDLETARNAIDAELGVIDSDK

SEQ ID NO: 8978 - protein, 195 aa, Triticum aestivum
  misc_feature (1)..(195): Ceres Seq. ID no. 13596905
MATPPEAAAVIADAWLATPFRAPCPASGDAPWPEDIQKFFDVAPGEMASIPEGLAAPPAPDSACAICCLRKGMEFEPVDIMPGGEMRIVRESPTSAYVRFKAGSVEPAHHHTFGHDLVVIKGKKKVWNLTKKESYGLVDGDFLFTPAGDVHRVKYLEDTEFFIRWDGHWDIFLDEDLETARNAIDAELGVIDSDK

SEQ ID NO: 8979 - protein, 314 aa, Triticum aestivum; identical to SEQ ID NO: 8977
  misc_feature (1)..(314): Ceres Seq. ID no. 16611602

SEQ ID NO: 8980 - DNA, 1603 bp, Triticum aestivum
  misc_feature (1)..(1603): Ceres Seq. ID no. 13596962
gtcgtataactcggggtccaatttgcaaagagacagacgcccgttcttttactgcgagacctccgcgctcgtgggcaacggcggcggcgatggcggcatcggcgagcacgtccggcgagtggctgaagggcgccctgcaggaactgaggggccgcacggggagcgccctggagctcgacgacggcctcatctccggcctcgtctccttctgcgagctcgcgcctccgcccgacgcggccgactacctcgcgaatattgttggagcagaagctgcgcaggacctcattcaggagtacttgcagaggaggggctacattgacccctcaaaaggagctggaagctcgcagtcgtctaatcttcagccttatttgaagccatctgctgatgcagcaactgcccaaacaaagaaacagacacgtacacaaaaagatccagcatcttcttctagtcagagttccaagagtcaatcagatgctgctgacacccatgctgcctccaagagaggtccaaaaaagaagggaggaaaggccatctcccttgctgaggcagcaaagggctctattgtcttcaagcaggggaaaccttgttcatgccaagcacggctgcacaatcttgttagcaactgtttatcatgtggaaaaattgtgtgtgaacaagagggcgagggaccatgtagtttctgtggctcacttgtcttgatggaaggtagtacatatgcgggtttaagtgatgttggagttcctctttcggacacagaagttgcagctgaagcttatgcaaagaggcttgttgactatgacagaaactctgcggcaagaactaaagtttatgatgaccaaagtgactattttgaaatggaaggaaatagctggctctcatctaaggaaaagacaaacctaaagaaggtgcacgacgaagctcaggatgcagctgaaaaacaaaaggggaaagtgacggtcacatttgatttggtgggccgtaaggtaattttgaacaaggacgaagccgcagagtcggaatctgaccaagggatcatgagaccactagaacagaagcatcaggttcaacgcatacagcccagcccctcgatcagagagcaaccagtcttcgttgaaacaggacctgtgaagccgagaaccgacagggtaaaacagagcaagaaactcggaaagaatggcttgtgcctggaggtaaccggaagggtgcagcatgatgacaaggatccccagagctttcttggtggcaagatgaagaagggtgatcatctcgcgtacagttcctccggtgaagttcgtgaaggtgatgactacgagtgctcccttgattttgattgagcgttactgcaaattttgatgcgctcgagtgccttcacattgtacttgcttatcccatttcatacgggttggattgtggtctggtcaagtttccagctagaggtattttggaaaggtttgcttcgggatcatatcattcaactaaagttgtcaggccgggtaggctttgagggtcttgaacatattaagtaaaagattaagcacggagcttaaaaaattatgatcctgaaaaaaaaaaaaaaaaaagcttatcgataccgtcgacctcg

SEQ ID NO: 8981 - protein, 443 aa, Triticum aestivum
  misc_feature (1)..(443): Ceres Seq. ID no. 13596963
RITRGPICKETDARSFTARPPRSWATAAAMAASASTSGEWLKGALQELRGRTGSALELDDGLISGLVSFCELAPPPDAADYLANIVGAEAAQDLIQEYLQRRGYIDPSKGAGSSQSSNLQPYLKPSADAATAQTKKQTRTQKDPASSSSQSSKSQSDAADTHAASKRGPKKKGGKAISLAEAAKGSIVFKQGKPCSCQARLHNLVSNCLSCGKIVCEQEGEGPCSFCGSLVLMEGSTYAGLSDVGVPLSDTEVAAEAYAKRLVDYDRNSAARTKVYDDQSDYFEMEGNSWLSSKEKTNLKKVHDEAQDAAEKQKGKVTVTFDLVGRKVILNKDEAAESESDQGIMRPLEQKHQVQRIQPSPSIREQPVFVETGPVKPRTDRVKQSKKLGKNGLCLEVTGRVQHDDKDPQSFLGGKMKKGDHLAYSSSGEVREGDDYECSLDFD

SEQ ID NO: 8982 - protein, 414 aa, Triticum aestivum
  misc_feature (1)..(414): Ceres Seq. ID no. 13596964
MAASASTSGEWLKGALQELRGRTGSALELDDGLISGLVSFCELAPPPDAADYLANIVGAEAAQDLIQEYLQRRGYIDPSKGAGSSQSSNLQPYLKPSADAATAQTKKQTRTQKDPASSSSQSSKSQSDAADTHAASKRGPKKKGGKAISLAEAAKGSIVFKQGKPCSCQARLHNLVSNCLSCGKIVCEQEGEGPCSFCGSLVLMEGSTYAGLSDVGVPLSDTEVAAEAYAKRLVDYDRNSAARTKVYDDQSDYFEMEGNSWLSSKEKTNLKKVHDEAQDAAEKQKGKVTVTFDLVGRKVILNKDEAAESESDQGIMRPLEQKHQVQRIQPSPSIREQPVFVETGPVKPRTDRVKQSKKLGKNGLCLEVTGRVQHDDKDPQSFLGGKMKKGDHLAYSSSGEVREGDDYECSLDFD

SEQ ID NO: 8983 - protein, 414 aa, Triticum aestivum; identical to SEQ ID NO: 8982
  misc_feature (1)..(414): Ceres Seq. ID no. 16611871

SEQ ID NO: 8984 - DNA, 1368 bp, Triticum aestivum
  misc_feature (1)..(1368): Ceres Seq. ID no. 13597205
actcctcccctaaaagaactccggtggcgtactactagaaaacagcagagacggctgtgccctgctcctccttctcgccggtgccttctgctggaggcaaacgaaactcctcctcctcctcctgcccctctctcccacgcttcccccttcgtctccgtcgacaggaagcaaccaggagaggcgaggcggcgacgatgcagatgaagcagaaggtctacgagctctacaaggggacggtggagcgggtcacgggcccgcgcaccgtctcggcgttcctcgagaagggcgtcctctccgtccccgagttcatcctcgccggcgacaacctcgtatccaagtgcccaacctggtcctgggaggcgggcgatccgagcaagaggaagccatacctcccctccgataagcagttcctcgtcaccaggaacgtgccctgcctaagacgagctgtggcggtcgaggaagagtatgatgcagcgggagctgaggttgttctcgatgatgatgaggatggcgaaggctggctcgcaacacatgggctgcaagcatcagagtcaaaagaggaggaagacataccgtctatggatacattggacatagggaaagtcgaagagatcaaatctatcccctcctactttggtgctagtgaaaagccagatgaggaggaggatatacctgacatggacacctatgaagacacaggagatcattctacagctacccctcagccttcatattttgtcgcagaagagcctgatgatgacaacattcttctcaccagaacatatgatgttagcatcacatatgacaagtactaccaaactccacgtgtctggcttacaggctatgatgaggcaagaatgccattaaagcctgaacttgtgtttcaagatatcagtcaagaccatgcacacaaaacggtgactatcgaagaccatcctcacttgttagtgggacagcacgcttccgtgcatccttgcaagcacgctgctgtgatgaaaaagatcattgatgttatagtgtctcaaggaggtgcaccagaagttgacaagtaccttttcatatttctcaaattcatggcttctgtcatacccaccattgagtatgattacactatggatttcgatctgggcagtacaagcacataagccgcccattgaagaaaagctgaaactcccgagaaggtgagctgttcatggtcgccgaataattgctgctcttcggaaggatctgtacattgtgtccgtgtgtgttggttcgtttggaaatgaactttcaattgtaaactctgatgctctgcaggaagattgtcctgattggtcctcttacggtgtggtgccgcactgatatgacatttgtgattcttcgccg

SEQ ID NO: 8985 - protein, 316 aa, Triticum aestivum
  misc_feature (1)..(316): Ceres Seq. ID no. 13597206
MQMKQKVYELYKGTVERVTGPRTVSAFLEKGVLSVPEFILAGDNLVSKCPTWSWEAGDPSKRKPYLPSDKQFLVTRNVPCLRRAVAVEEEYDAAGAEVVLDDDEDGEGWLATHGLQASESKEEEDIPSMDTLDIGKVEEIKSIPSYFGASEKPDEEEDIPDMDTYEDTGDHSTATPQPSYFVAEEPDDDNILLTRTYDVSITYDKYYQTPRVWLTGYDEARMPLKPELVFQDISQDHAHKTVTIEDHPHLLVGQHASVHPCKHAAVMKKIIDVIVSQGGAPEVDKYLFIFLKFMASVIPTIEYDYTMDFDLGSTST

SEQ ID NO: 8986 - protein, 314 aa, Triticum aestivum
  misc_feature (1)..(314): Ceres Seq. ID no. 13597207
MKQKVYELYKGTVERVTGPRTVSAFLEKGVLSVPEFILAGDNLVSKCPTWSWEAGDPSKRKPYLPSDKQFLVTRNVPCLRRAVAVEEEYDAAGAEVVLDDDEDGEGWLATHGLQASESKEEEDIPSMDTLDIGKVEEIKSIPSYFGASEKPDEEEDIPDMDTYEDTGDHSTATPQPSYFVAEEPDDDNILLTRTYDVSITYDKYYQTPRVWLTGYDEARMPLKPELVFQDISQDHAHKTVTIEDHPHLLVGQHASVHPCKHAAVMKKIIDVIVSQGGAPEVDKYLFIFLKFMASVIPTIEYDYTMDFDLGSTST

SEQ ID NO: 8987 - protein, 188 aa, Triticum aestivum
  misc_feature (1)..(188): Ceres Seq. ID no. 13597208
MDTLDIGKVEEIKSIPSYFGASEKPDEEEDIPDMDTYEDTGDHSTATPQPSYFVAEEPDDDNILLTRTYDVSITYDKYYQTPRVWLTGYDEARMPLKPELVFQDISQDHAHKTVTIEDHPHLLVGQHASVHPCKHAAVMKKIIDVIVSQGGAPEVDKYLFIFLKFMASVIPTIEYDYTMDFDLGSTST

SEQ ID NO: 8988 - protein, 316 aa, Triticum aestivum; identical to SEQ ID NO: 8985
  misc_feature (1)..(316): Ceres Seq. ID no. 16625403

SEQ ID NO: 8989 - DNA, 1725 bp, Triticum aestivum
  misc_feature (1)..(1725): Ceres Seq. ID no. 13597325
ttttttttcgagcggcgacgaaatgcagtccacctccgtttgctacccacgcacgcggccgcgggcccacggccggaggagctagaaagacctatcgccaccaggcccggtcccgagggaaaggaatccagcaaggcagccaggagcgcgcccccacccgccggcgacggccacatgccgaccgcctcctgcctccgcccgcctctccgcagcggccgctccgccgcggcgggcctcaggttccctcccccggcggggctggcgattgggagctggcggaggaggctcgccggggtcggggtggcggccgcctccgcctcgcccttcgacgagctctacgcgcggggaaggcccatccacggcccctccaagaaatctaccttgtggaatttgatccaagacatagagcctttggatcttagtgtcattcagaaagatgttcctcttgaaacggttgatgcaatgaagaggaccatctctggcatgttgggtctgcttccatctgatcagttccgtgttgttgtagaagccctttggagtccatttttcaagttattggtatcttcaatcatgactgggtatactctacgtaatgctgaatgcaggctctcttttgaaaggaacctagaactttctgaagaagatgctgaatgtgagaaaagagacacgactgaagataatcttcatgatatcaatttgggtaggcctgttacaattttcagattatcggaagacgacatgccccaggactctggaaaaagtgacgaagaatcatctggtgagagtatgggggaaatgttaagtaacttaacaccccaagtggaagagcagattattcggttgcaatctcgtttggatgcgatgaaaaaggagttgcatgacctgaagaggaaaaattctgcccttcaaatgcaacagtttgttggagaagagaaaaatgatctgctagactatctaagatccctaacaccagagaaggttgctgaactctcggaatccacctgtcccggtgtgcaagaggctatccagtctgttgtgcatggtttgcttgctactctttcccccaaggtacactcaaagtctcctccgccactagagaatgctgggggagccctaaatcgtgggggtgaggacgatgactgtgcagagcttgtcgagaatacttccctcccgtttcagcccctaatatctgtcccacgtgattatcttgcacgtttgctattctggtgcatgttgctgggtcactacatccggggtctggaataccggttagagctggcacaccttctcagaatatctagcgacgtggggtctttccccattgatgacaatcattttatttgagaaagcttcgctggcttattgagatccatcagcgaagaggatggaaatgcactggccaagaggccgcagaagttgctgtttggggcatttcctgacaatgaaacagggagttctgggccatagctcctgttgtagttcttgtaaagtcggaacgaaggcgttcgggtgtaaagttagtgttacatatcaatgtgaacaatatattttatttccttctatttattgtgtcgtatacaaaataaacatgttgttcttgctgctaatctcgtggtagcatggtggatactgggtattaggcatcccttgtactcataggttgtatgtatttgtctaatgtttatcacgtgaatgatattatattgtcgagtcgtatcaaggttc

SEQ ID NO: 8990 - protein, 447 aa, Triticum aestivum
  misc_feature (1)..(447): Ceres Seq. ID no. 13597326
FFFERRRNAVHLRLLPTHAAAGPRPEELERPIATRPGPEGKESSKAARSAPPPAGDGHMPTASCLRPPLRSGRSAAAGLRFPPPAGLAIGSWRRRLAGVGVAAASASPFDELYARGRPIHGPSKKSTLWNLIQDIEPLDLSVIQKDVPLETVDAMKRTISGMLGLLPSDQFRVVVEALWSPFFKLLVSSIMTGYTLRNAECRLSFERNLELSEEDAECEKRDTTEDNLHDINLGRPVTIFRLSEDDMPQDSGKSDEESSGESMGEMLSNLTPQVEEQIIRLQSRLDAMKKELHDLKRKNSALQMQQFVGEEKNDLLDYLRSLTPEKVAELSESTCPGVQEAIQSVVHGLLATLSPKVHSKSPPPLENAGGALNRGGEDDDCAELVENTSLPFQPLISVPRDYLARLLFWCMLLGHYIRGLEYRLELAHLLRISSDVGSFPIDDNHFI

SEQ ID NO: 8991 - protein, 389 aa, Triticum aestivum
  misc_feature (1)..(389): Ceres Seq. ID no. 13597327
MPTASCLRPPLRSGRSAAAGLRFPPPAGLAIGSWRRRLAGVGVAAASASPFDELYARGRPIHGPSKKSTLWNLIQDIEPLDLSVIQKDVPLETVDAMKRTISGMLGLLPSDQFRVVVEALWSPFFKLLVSSIMTGYTLRNAECRLSFERNLELSEEDAECEKRDTTEDNLHDINLGRPVTIFRLSEDDMPQDSGKSDEESSGESMGEMLSNLTPQVEEQIIRLQSRLDAMKKELHDLKRKNSALQMQQFVGEEKNDLLDYLRSLTPEKVAELSESTCPGVQEAIQSVVHGLLATLSPKVHSKSPPPLENAGGALNRGGEDDDCAELVENTSLPFQPLISVPRDYLARLLFWCMLLGHYIRGLEYRLELAHLLRISSDVGSFPIDDNHFI

SEQ ID NO: 8992 - protein, 293 aa, Triticum aestivum
  misc_feature (1)..(293): Ceres Seq. ID no. 13597328
MKRTISGMLGLLPSDQFRVVVEALWSPFFKLLVSSIMTGYTLRNAECRLSFERNLELSEEDAECEKRDTTEDNLHDINLGRPVTIFRLSEDDMPQDSGKSDEESSGESMGEMLSNLTPQVEEQIIRLQSRLDAMKKELHDLKRKNSALQMQQFVGEEKNDLLDYLRSLTPEKVAELSESTCPGVQEAIQSVVHGLLATLSPKVHSKSPPPLENAGGALNRGGEDDDCAELVENTSLPFQPLISVPRDYLARLLFWCMLLGHYIRGLEYRLELAHLLRISSDVGSFPIDDNHFI

SEQ ID NO: 8993 - protein, 389 aa, Triticum aestivum
  misc_feature (1)..(389): Ceres Seq. ID no. 16611622
  misc_feature (214)..(214): Xaa is any aa, unknown or other
MPTASCLRPPLRSGRSAAAGLRFPPPAGLAIGSWRRRLAGVGVAAASASPFDELYARGRPIHGPSKKSTLWNLIQDIEPLDLSVIQKDVPLETVDAMKRTISGMLGLLPSDQFRVVVEALWSPFFKLLVSSIMTGYTLRNAECRLSFERNLELSEEDAECEKRDTTEDNLHDINLGRPVTIFRLSEDDMPQDSGKSDEESSGESMGEMLSNLTXQVEEQIIRLQSRLDAMKKELHDLKRKNSALQMQQFVGEEKNDLLDYLRSLTPEKVAELSESTCPGVQEAIQSVVHGLLATLSPKVHSKSPPPLENAGGALNRGGEDDDCAELVENTSLPFQPLISVPRDYLARLLFWCMLLGHYIRGLEYRLELAHLLRISSDVGSFPIDDNHFI

SEQ ID NO: 8994 - DNA, 1180 bp, Triticum aestivum
  misc_feature (1)..(1180): Ceres Seq. ID no. 13654322
aatccccgaccagactcgtcgctccctgacccttcccctccaacgccgaagccctaacacgcagctccggcggctgagctcgcagtccgccccctcgcaccttcgtccccagcgcgcgcgcacccccacggccaaccacgcggcgaggcgcatcctccttcgacccccgacgaagcaggcggggagcctgacgcggccccgcgcggccttggccagatgacgaggaccagcggcgcgaacggcggcgggcagcaggggtcggggaagctcccgcgtaagcgcttctaccgggcgcgcgcgcacagcaacccgctcagcgactcgcacttcccgatcccgatagcgcccgacgacgtcgacctctcgcagcactacccgcgctacttcccggccgacaagggcgagcacggtgatggggacggggacgcggaggcgccccggatccgcttcgctgacgtcgggtgcgggtttggtgggctgctcgtcgggctctcgccgctcttccccgacaagctaatgatcggcatggagctgagggacaaggtgactgagtatgtcaaagagagggttctggctttgagagcatcaaatccaggacagtatgacaacatatccgttgtgcgcaccaattcaatgaaatacattcctaactactttggaaaggctcagctctccaaaatgttcttcctgttccctgatcctcacttcaaggagaagaaccaccggaggagggtgattagcatgcatttgctcgatgaatacgcttacgtgatggaagtgggaggaatcatatacactattactgatgtagaggagcttggtatatggatgcgcacatgtctggagaaacacccactcttccaagctgttccagaggaagagataaaagtcgatccagttgtgaagctactgtctagtgccaccgaagaaggccagaaggtcgcgaggaatggagggcagactttccaggccatcttcaggcgcatctccttgcaagaggaataagcaattttggaacttactaagctcttagcacagtgtactttcctggacttcgctagatggatttgtgccatttctatacatttttgtagcatgatttcactatgcagtagtcttacgtagcgctgctatctcaaatgtttggctctactttacaaaaaaattctggaagattgct

SEQ ID NO: 8995 - protein, 262 aa, Triticum aestivum
  misc_feature (1)..(262): Ceres Seq. ID no. 13654323
MTRTSGANGGGQQGSGKLPRKRFYRARAHSNPLSDSHFPIPIAPDDVDLSQHYPRYFPADKGEHGDGDGDAEAPRIRFADVGCGFGGLLVGLSPLFPDKLMIGMELRDKVTEYVKERVLALRASNPGQYDNISVVRTNSMKYIPNYFGKAQLSKMFFLFPDPHFKEKNHRRRVISMHLLDEYAYVMEVGGIIYTITDVEELGIWMRTCLEKHPLFQAVPEEEIKVDPVVKLLSSATEEGQKVARNGGQTFQAIFRRISLQEE

SEQ ID NO: 8996 - protein, 162 aa, Triticum aestivum
  misc_feature (1)..(162): Ceres Seq. ID no. 13654324
MIGMELRDKVTEYVKERVLALRASNPGQYDNISVVRTNSMKYIPNYFGKAQLSKMFFLFPDPHFKEKNHRRRVISMHLLDEYAYVMEVGGIIYTITDVEELGIWMRTCLEKHPLFQAVPEEEIKVDPVVKLLSSATEEGQKVARNGGQTFQAIFRRISLQEE

SEQ ID NO: 8997 - protein, 159 aa, Triticum aestivum
  misc_feature (1)..(159): Ceres Seq. ID no. 13654325
MELRDKVTEYVKERVLALRASNPGQYDNISVVRTNSMKYIPNYFGKAQLSKMFFLFPDPHFKEKNHRRRVISMHLLDEYAYVMEVGGIIYTITDVEELGIWMRTCLEKHPLFQAVPEEEIKVDPVVKLLSSATEEGQKVARNGGQTFQAIFRRISLQEE

SEQ ID NO: 8998 - protein, 262 aa, Triticum aestivum; identical to SEQ ID NO: 8995
  misc_feature (1)..(262): Ceres Seq. ID no. 16625414

SEQ ID NO: 8999 - DNA, 1297 bp, Triticum aestivum
  misc_feature (1)..(1297): Ceres Seq. ID no. 13654367
aacggagagaatggccggcgacgtcgcgcgcagggagctccgggcgcgcgtgggggcgatgccgtgggcggtgcggctccagctgcgcgcgctcgaggccgccgtcgacgccacgcagcgccgggacggcaccgtcaaccgcttcctcttctcgctgctcgtggaccgccaggcgcccgccaaccccgcgcgcgccgacgccgggggcgtccgctccgtggacgtcaccgtcgacgcgtccaccggcgtgcgggcccgcgtctactttacggccggggcgggggcggaggcagacgcgtcgccgcgccccgtgatcgtctacttccacggcggcggcttcacggtgttctccgcggccacccggccctacgacgagctctgccgcaccatgtgccgcgagacgggcgccgtcgtcgtgtccgtgacctaccgcctcgcgcccgagcaccgctaccccgcggcctacgacgacggggaggccgccctccggtacctcgccaccaccggcctgcccgccgaggtccccgtccgcgtcgacctctcccgctgcttcctcgccggcgacagcgccggcgccaacatcgcgcaccacgtggcccagcgctggacggcggcacccgcgacaacgcctccagccgtccacctcgccggcctcctgctcctgtcctcctacttcggcggagaggaccggaccgagtcggagcaagcgctggagggcgtggccccgatcgtgaacctccgccggtccgacttctggtggaaggcgtacttgccggagggcgccgaccgaaaccacccggccgcgcacgtgacgggcgaggccggcccggagccggagctgccggatgcgttcccgcgggcgatggtggtcgtcggcgggctcgacccgctccaggactgggggaggcggtacgccggcatgctgcgccggaagggcaaggaggtgcgcgtgatggagttcacggaggctgtacacgccttctacttcttcccggcgctgcccgagaccggcaagctcgtcgcggagatctcggcgttcgtggagagcaccgcgccgagctcgaccgcctagagaactagagacgatgattaggacaactcgtcgtggatctcgtacgtccccgtctctgctgatgttatattgttggctgatagcctatttcactgtcgaagtcgctgcgagcagccgcgtctgttaaattattacactgtggtgtataagttcgagttgccatctcgatattttctttgtgcaacatgtggcatgggtgatggggacatggcagtgatggcacct

SEQ ID NO: 9000 - protein, 359 aa, Triticum aestivum
  misc_feature (1)..(359): Ceres Seq. ID no. 13654368
NGENGRRRRAQGAPGARGGDAVGGAAPAARARGRRRRHAAPGRHRQPLPLLAARGPPGARQPRARRRRGRPLRGRHRRRVHRRAGPRLLYGRGGGGGRRVAAPRDRLLPRRRLHGVLRGHPALRRALPHHVPRDGRRRRVRDLPPRARAPLPRGLRRRGGRPPVPRHHRPARRGPRPRRPLPLLPRRRQRRRQHRAPRGPALDGGTRDNASSRPPRRPPAPVLLLRRRGPDRVGASAGGRGPDREPPPVRLLVEGVLAGGRRPKPPGRARDGRGRPGAGAAGCVPAGDGGRRRARPAPGLGEAVRRHAAPEGQGGARDGVHGGCTRLLLLPGAARDRQARRGDLGVRGEHRAELDRLEN

SEQ ID NO: 9001 - protein, 356 aa, Triticum aestivum
  misc_feature (1)..(356): Ceres Seq. ID no. 13654369
TERMAGDVARRELRARVGAMPWAVRLQLRALEAAVDATQRRDGTVNRFLFSLLVDRQAPANPARADAGGVRSVDVTVDASTGVRARVYFTAGAGAEADASPRPVIVYFHGGGFTVFSAATRPYDELCRTMCRETGAVVVSVTYRLAPEHRYPAAYDDGEAALRYLATTGLPAEVPVRVDLSRCFLAGDSAGANIAHHVAQRWTAAPATTPPAVHLAGLLLLSSYFGGEDRTESEQALEGVAPIVNLRRSDFWWKAYLPEGADRNHPAAHVTGEAGPEPELPDAFPRAMVVVGGLDPLQDWGRRYAGMLRRKGKEVRVMEFTEAVHAFYFFPALPETGKLVAEISAFVESTAPSSTA

SEQ ID NO: 9002 - protein, 353 aa, Triticum aestivum
  misc_feature (1)..(353): Ceres Seq. ID no. 13654370
MAGDVARRELRARVGAMPWAVRLQLRALEAAVDATQRRDGTVNRFLFSLLVDRQAPANPARADAGGVRSVDVTVDASTGVRARVYFTAGAGAEADASPRPVIVYFHGGGFTVFSAATRPYDELCRTMCRETGAVVVSVTYRLAPEHRYPAAYDDGEAALRYLATTGLPAEVPVRVDLSRCFLAGDSAGANIAHHVAQRWTAAPATTPPAVHLAGLLLLSSYFGGEDRTESEQALEGVAPIVNLRRSDFWWKAYLPEGADRNHPAAHVTGEAGPEPELPDAFPRAMVVVGGLDPLQDWGRRYAGMLRRKGKEVRVMEFTEAVHAFYFFPALPETGKLVAEISAFVESTAPSSTA

SEQ ID NO: 9003 - protein, 353 aa, Triticum aestivum; identical to SEQ ID NO: 9002
  misc_feature (1)..(353): Ceres Seq. ID no. 16625415

SEQ ID NO: 9004 - DNA, 1474 bp, Triticum aestivum
  misc_feature (1)..(1474): Ceres Seq. ID no. 13654431
gttagaaaatttccagccctgcccctccccggcgccggcgaccaccgccgcagccgccacctcctccaggagcgccggcgtcgcccgtccgcacccggcggcggcggcggaggcagcgatggcgaggcaagaggccgtgggggccgccacgggggtggacttccacctgccggacgagatcctggccgtgatccccactgacccgtacgagcagctggacgtcgcccgcaagatcacctccatggccatcgcgtcccgcgtctcccgcctcgaggccgacgtcgcgcgcctccgcagggacctcgccgaccgcgaccgcggcgaggccgacctccgcgcccgcctcgccgactccgacgcccgcctcctcgccgcgctcgacgagaacgcgaagctggtgaaggagagggacacgctcgccctgacggccaagaagctgtcgaggaacttggcaaagttagaggcatttaagaagcagttgatgaaatcgctgagtgaagataatttattgcaattgtcagaaacaggtgaagatcgtgatgtagatgcagaaaataatgggaccgctcgaattccttcctggaaagatgaagtttcaagcagtcacacctcttcaaatacttccagcagatccacaatcaccgaatcagcccaaggataccagttctcaatcacaccatatgtagccccccaaataactcctggttcaacaccaattatttcatcctctagtggttccccactagcatattcaactggtccatccactccgaagttctattctggtccaacatcgcctacaagatcacgttctgaagaccaatcggcattttcatcatggaatggatcaagtcatcagtattcagcccctgtctctcctcaacgccgctcatttgcagggcgacctcgtatagatggaaaggaattcttccgacaagcacggacacgactatcttatgagcaatttggagcattcttggcaaatattaaggaatttaatgcacagaaacaatcgcgagaggacaccttgtcgaaagcagaggagatttttggaacagagcacaaagacttgtacatttctttccagaatatgcttaaccgcaaccaatcgtgaacctgtcataggctgccgtatttcttcttttgaacaagctggtttagttcatcggtatgtctcttcggtttaaacgacggtaccattctgctggggtaataattcctatgccaggccatctgtttccaagagagcgtgtatcgttggagttctcgttgatcacaagatcatctccttagaaatctgtgcataggccattgtagttttggtgtggccatcctcaataacatgatgtaaatgggtatggtcatgcatgcattcaacaaggaaaagtttcttttctttttgcgaacaagtggaagttgagactgtcagatatattggtctgtgtaattgacttgtgaattgaagctcgttttc

SEQ ID NO: 9005 - protein, 370 aa, Triticum aestivum
  misc_feature (1)..(370): Ceres Seq. ID no. 15219652
LENFQPCPSPAPATTAAAATSSRSAGVARPHPAAAAEAAMARQEAVGAATGVDFHLPDEILAVIPTDPYEQLDVARKITSMAIASRVSRLEADVARLRRDLADRDRGEADLRARLADSDARLLAALDENAKLVKERDTLALTAKKLSRNLAKLEAFKKQLMKSLSEDNLLQLSETGEDRDVDAENNGTARIPSWKDEVSSSHTSSNTSSRSTITESAQGYQFSITPYVAPQITPGSTPIISSSSGSPLAYSTGPSTPKFYSGPTSPTRSRSEDQSAFSSWNGSSHQYSAPVSPQRRSFAGRPRIDGKEFFRQARTRLSYEQFGAFLANIKEFNAQKQSREDTLSKAEEIFGTEHKDLYISFQNMLNRNQS

SEQ ID NO: 9006 - protein, 331 aa, Triticum aestivum
  misc_feature (1)..(331): Ceres Seq. ID no. 15219653
MARQEAVGAATGVDFHLPDEILAVIPTDPYEQLDVARKITSMAIASRVSRLEADVARLRRDLADRDRGEADLRARLADSDARLLAALDENAKLVKERDTLALTAKKLSRNLAKLEAFKKQLMKSLSEDNLLQLSETGEDRDVDAENNGTARIPSWKDEVSSSHTSSNTSSRSTITESAQGYQFSITPYVAPQITPGSTPIISSSSGSPLAYSTGPSTPKFYSGPTSPTRSRSEDQSAFSSWNGSSHQYSAPVSPQRRSFAGRPRIDGKEFFRQARTRLSYEQFGAFLANIKEFNAQKQSREDTLSKAEEIFGTEHKDLYISFQNMLNRNQS

SEQ ID NO: 9007 - protein, 290 aa, Triticum aestivum
  misc_feature (1)..(290): Ceres Seq. ID no. 15219654
MAIASRVSRLEADVARLRRDLADRDRGEADLRARLADSDARLLAALDENAKLVKERDTLALTAKKLSRNLAKLEAFKKQLMKSLSEDNLLQLSETGEDRDVDAENNGTARIPSWKDEVSSSHTSSNTSSRSTITESAQGYQFSITPYVAPQITPGSTPIISSSSGSPLAYSTGPSTPKFYSGPTSPTRSRSEDQSAFSSWNGSSHQYSAPVSPQRRSFAGRPRIDGKEFFRQARTRLSYEQFGAFLANIKEFNAQKQSREDTLSKAEEIFGTEHKDLYISFQNMLNRNQS

SEQ ID NO: 9008 - protein, 331 aa, Triticum aestivum; identical to SEQ ID NO: 9006
  misc_feature (1)..(331): Ceres Seq. ID no. 16625416

SEQ ID NO: 9009 - DNA, 1130 bp, Triticum aestivum
  misc_feature (1)..(1130): Ceres Seq. ID no. 13654553
actgcacactaccacactccccactctcccacgccacgccgactagcttcctccattaccctcctcctttgcttgcccagacctcggcgaggctccggcgagagagcgagagcgaaagctcccttccgctgctgcaatggcggttcctctggtgctcatgctcttggtcgccatgttcaccggctcagatgcgatgtactgcgtgtgcaagtcggacgcgaacccggtggcgatgcagaaggccatcgactacgcgtgcggcaagggcgccgactgcacccagatcacctccagcgggccctgcttccagccctcctccgtcgtcgcccactgctcctacgcctgcaacagctactaccagaagaacgccggcatgggcgccacctgcgatttcatgggcgtcgccaccctcaccggcgccgaccccagcgccggatcctgcaagtaccccgccagcgctagcggcgtcggcactggagcaggcaccggcaccggcggcatgggaaccggcggcacagggacaggcaccggaggcatgggaaccggcaccggaaccagcaccggaacgggcacgggcgtcggcaccggcaccagcaccggcggcatggggagcatgaccccgccgggcgcgaccagctccgggatgccggggagccccttcggcggcggcgcgtacggcccgtctggcatgaaccaggactacagcgcagccgtggtcggtcgccgcgtggccgtcgcggggctcctcgtggcggcagccgcgccgctcctcctccacttcatctgatgcggtggtgaccactggttggccggcggaaaggcgcgtcggcaatgctggcgggtgcgacgccggattcggtgggcacgccccgccgcttttgtgtccggctcgctctctcgcctgcctttccggcgtctgcgtcgttttgatggttcgatcggacgtactagtagcgtagtgtctgtctgtctgtccatgagtgctagtactcttattaagctgaccaccccatgtggtgtttgtaccggtgcgggtcgtggtagagttgatgagatctggtaggggattctttcttccttctcgtagcggtgacggtgttccgagacatataattatgtgttgtcgttcc

SEQ ID NO: 9010 - protein, 216 aa, Triticum aestivum
  misc_feature (1)..(216): Ceres Seq. ID no. 13654554
MAVPLVLMLLVAMFTGSDAMYCVCKSDANPVAMQKAIDYACGKGADCTQITSSGPCFQPSSVVAHCSYACNSYYQKNAGMGATCDFMGVATLTGADPSAGSCKYPASASGVGTGAGTGTGGMGTGGTGTGTGGMGTGTGTSTGTGTGVGTGTSTGGMGSMTPPGATSSGMPGSPFGGGAYGPSGMNQDYSAAVVGRRVAVAGLLVAAAAPLLLHFI

SEQ ID NO: 9011 - protein, 209 aa, Triticum aestivum
  misc_feature (1)..(209): Ceres Seq. ID no. 13654555
MLLVAMFTGSDAMYCVCKSDANPVAMQKAIDYACGKGADCTQITSSGPCFQPSSVVAHCSYACNSYYQKNAGMGATCDFMGVATLTGADPSAGSCKYPASASGVGTGAGTGTGGMGTGGTGTGTGGMGTGTGTSTGTGTGVGTGTSTGGMGSMTPPGATSSGMPGSPFGGGAYGPSGMNQDYSAAVVGRRVAVAGLLVAAAAPLLLHFI

SEQ ID NO: 9012 - protein, 204 aa, Triticum aestivum
  misc_feature (1)..(204): Ceres Seq. ID no. 13654556
MFTGSDAMYCVCKSDANPVAMQKAIDYACGKGADCTQITSSGPCFQPSSVVAHCSYACNSYYQKNAGMGATCDFMGVATLTGADPSAGSCKYPASASGVGTGAGTGTGGMGTGGTGTGTGGMGTGTGTSTGTGTGVGTGTSTGGMGSMTPPGATSSGMPGSPFGGGAYGPSGMNQDYSAAVVGRRVAVAGLLVAAAAPLLLHFI

SEQ ID NO: 9013 - protein, 216 aa, Triticum aestivum; identical to SEQ ID NO: 9010
  misc_feature (1)..(216): Ceres Seq. ID no. 16625417

SEQ ID NO: 9014 - DNA, 1806 bp, Triticum aestivum
  misc_feature (1)..(1806): Ceres Seq. ID no. 13656083
  misc_feature (1713)..(1713): n is a, c, t, g, unknown, or other
  misc_feature (1714)..(1714): n is a, c, t, g, unknown, or other
  misc_feature (1718)..(1718): n is a, c, t, g, unknown, or other
  misc_feature (1719)..(1719): n is a, c, t, g, unknown, or other
  misc_feature (1720)..(1720): n is a, c, t, g, unknown, or other
  misc_feature (1721)..(1721): n is a, c, t, g, unknown, or other
  misc_feature (1722)..(1722): n is a, c, t, g, unknown, or other
  misc_feature (1723)..(1723): n is a, c, t, g, unknown, or other
acggtctcacctcgctcctcttcacttcctccctcggcttctctgttttttttctttctctgttttcccccccttttttttgttcttctccttttcttttttccatttcgatatttcttcttcgtcgagtttgggttggattaatccccgacccaaaccctaataatcgatctccctgacccgggactacgggccggggatcgatcgccatgcagcagaggatgaagcaggcggcggcggtagcggcgcagcagcagcagcagatgatgcagcaggctctgctcatgcaccagcaccagcagcagcagcaggcggcggccgcggtgccgcccatgttcccgccgcaccacgcgcacccgggtctccttgccgcgccgcatatagagcccatcgttagtgggaacctgcctcctgggtttgattcaagcacatgccgcagtgtgtatgttggcaacatccatcttcaagtcacagattcactactgcatgaagttttccagagtattggtccagttgaagggtgtaagctcatcaggaaagaaaagtcatcttttggttttgttgactattatgaccgtagatatgctgcacttgctattgtgtctctcaacggtagacaactgtttggccagccaataaaagtcaattgggcatacgcaagtacccactttattgtgtttaacagagaggatacatcaggtcattttaacatcttcgtcggggatctttgccctgaggttacggatgctgctttgtttgcttttttctcggcatattctacctgttcagatgctagagttatgtgggatcagcagactggacgatccagagggtttggtttcgtttcttttaggaatcagcaggatgcacaaacttccataaatgaattgaatggaaagtggcttggcaaccgccaaattcgttgcaattgggcaacgaagggcgctaatgctggtgaagagaagcaaagtacagactccaagggtgtggtggagttgataaacggctcatcagaggctggcaaggagaatgcaaatgaagatggtcctgaaaataacccacagtatacaactgtttatgttggcaatcttccccatgatatcaacagcaatgatgtgcatcgatttttccatttacttggggctgggtcaattgaggaggtccgtgtaacacgcgataaaggatttggctttgtgagatatagtacccatgaagaagctgcacgagcaatacagacgggtaatggccaacttattggcgggaggcagatcaagtgctcttggggaagcaaaccaactccaccagggacagcatctgcgcctctgcctcctccggcattagcgccatacacccctggcgtgtcagcagttgacctcatctcctacgagcgatcccttgctctgagcaagatggctgccaacccggccytgatgggtcaggtcgccrccctgaggcagrccgcgatgggtatgggcaccggcgccagccaggccatcttkgmcgggagcttccagagtgtcaaccctcagcagcagcagcagcagcaacagcagcagcagstcatgtactactgagtgtatgaagcaagtatgctggcgacggaggggactacaacaccctccttcctaatatatatacatatatggtagatgaaccctctccagggccttttctttggttattactagtccaacatcgcaattagtaatttannatcnnnnnncgctgttaacgctccgggtcgccggctatatatagcaccaatgtactagaacatatgtatccctgacgtgttaagagttgggc

SEQ ID NO: 9015 - protein, 454 aa, Triticum aestivum
  misc_feature (1)..(454): Ceres Seq. ID no. 15219790
  misc_feature (407)..(407): Xaa is any aa, unknown or other
  misc_feature (413)..(413): Xaa is any aa, unknown or other
  misc_feature (417)..(417): Xaa is any aa, unknown or other
  misc_feature (430)..(430): Xaa is any aa, unknown or other
  misc_feature (431)..(431): Xaa is any aa, unknown or other
  misc_feature (451)..(451): Xaa is any aa, unknown or other
MQQRMKQAAAVAAQQQQQMMQQALLMHQHQQQQQAAAAVPPMFPPHHAHPGLLAAPHIEPIVSGNLPPGFDSSTCRSVYVGNIHLQVTDSLLHEVFQSIGPVEGCKLIRKEKSSFGFVDYYDRRYAALAIVSLNGRQLFGQPIKVNWAYASTHFIVFNREDTSGHFNIFVGDLCPEVTDAALFAFFSAYSTCSDARVMWDQQTGRSRGFGFVSFRNQQDAQTSINELNGKWLGNRQIRCNWATKGANAGEEKQSTDSKGVVELINGSSEAGKENANEDGPENNPQYTTVYVGNLPHDINSNDVHRFFHLLGAGSIEEVRVTRDKGFGFVRYSTHEEAARAIQTGNGQLIGGRQIKCSWGSKPTPPGTASAPLPPPALAPYTPGVSAVDLISYERSLALSKMAANPAXMGQVAXLRQXAMGMGTGASQAIXXGSFQSVNPQQQQQQQQQQQXMYY

SEQ ID NO: 9016 - protein, 450 aa, Triticum aestivum
  misc_feature (1)..(450): Ceres Seq. ID no. 15219791
  misc_feature (403)..(403): Xaa is any aa, unknown or other
  misc_feature (409)..(409): Xaa is any aa, unknown or other
  misc_feature (413)..(413): Xaa is any aa, unknown or other
  misc_feature (426)..(426): Xaa is any aa, unknown or other
  misc_feature (427)..(427): Xaa is any aa, unknown or other
  misc_feature (447)..(447): Xaa is any aa, unknown or other
MKQAAAVAAQQQQQMMQQALLMHQHQQQQQAAAAVPPMFPPHHAHPGLLAAPHIEPIVSGNLPPGFDSSTCRSVYVGNIHLQVTDSLLHEVFQSIGPVEGCKLIRKEKSSFGFVDYYDRRYAALAIVSLNGRQLFGQPIKVNWAYASTHFIVFNREDTSGHFNIFVGDLCPEVTDAALFAFFSAYSTCSDARVMWDQQTGRSRGFGFVSFRNQQDAQTSINELNGKWLGNRQIRCNWATKGANAGEEKQSTDSKGVVELINGSSEAGKENANEDGPENNPQYTTVYVGNLPHDINSNDVHRFFHLLGAGSIEEVRVTRDKGFGFVRYSTHEEAARAIQTGNGQLIGGRQIKCSWGSKPTPPGTASAPLPPPALAPYTPGVSAVDLISYERSLALSKMAANPAXMGQVAXLRQXAMGMGTGASQAIXXGSFQSVNPQQQQQQQQQQQXMYY

SEQ ID NO: 9017 - protein, 436 aa, Triticum aestivum
  misc_feature (1)..(436): Ceres Seq. ID no. 15219792
  misc_feature (389)..(389): Xaa is any aa, unknown or other
  misc_feature (395)..(395): Xaa is any aa, unknown or other
  misc_feature (399)..(399): Xaa is any aa, unknown or other
  misc_feature (412)..(412): Xaa is any aa, unknown or other
  misc_feature (413)..(413): Xaa is any aa, unknown or other
  misc_feature (433)..(433): Xaa is any aa, unknown or other
MMQQALLMHQHQQQQQAAAAVPPMFPPHHAHPGLLAAPHIEPIVSGNLPPGFDSSTCRSVYVGNIHLQVTDSLLHEVFQSIGPVEGCKLIRKEKSSFGFVDYYDRRYAALAIVSLNGRQLFGQPIKVNWAYASTHFIVFNREDTSGHFNIFVGDLCPEVTDAALFAFFSAYSTCSDARVMWDQQTGRSRGFGFVSFRNQQDAQTSINELNGKWLGNRQIRCNWATKGANAGEEKQSTDSKGVVELINGSSEAGKENANEDGPENNPQYTTVYVGNLPHDINSNDVHRFFHLLGAGSIEEVRVTRDKGFGFVRYSTHEEAARAIQTGNGQLIGGRQIKCSWGSKPTPPGTASAPLPPPALAPYTPGVSAVDLISYERSLALSKMAANPAXMGQVAXLRQXAMGMGTGASQAIXXGSFQSVNPQQQQQQQQQQQXMYY

SEQ ID NO: 9018 - protein, 431 aa, Triticum aestivum
  misc_feature (1)..(431): Ceres Seq. ID no. 16611823
MMQQALLMHQHQQQQQAAAAVPPMFPPHHAHPGLLAAPHIEPIVSGNLPPGFDSSTCRSVYVGNIHLQVTDSLLHEVFQSIGPVEGCKLIRKEKSSFGFVDYYDRRYAALAIVSLNGRQLFGQPIKVNWAYASTQREDTSGHFNIFVGDLCPEVTDAALFAFFSAYSTCSDARVMWDQQTGRSRGFGFVSFRNQQDAQTSINELNGKWLGNRQIRCNWATKGANAGEEKQSTDSKGVVELINGSSEAGKENANEDGPENNPQYTTVYVGNLPHDINSNDVHRFFHLLGAGSIEEVRVTRDKGFGFVRYSTHEEAARAIQTGNGQLIGGRQIKCSWGSKPTPPGTASAPLPPPALAPYTPGVSAVDLISYERSLALSKMAANPALMGQVAALRQAAMGMGTGASQAIFDGSFQSVNPQQQQQQQQQQQLMYY

SEQ ID NO: 9019 - DNA, 1077 bp, Triticum aestivum
  misc_feature (1)..(1077): Ceres Seq. ID no. 13657647
gaaaagaccccacagccgggaggaggagcccatcccgtcccaccccaccgccgcggccaaaaaccaatcacgcctcccggcggcggcccgcgcggcgccggccatggcggacgccgtcaagcagccgctcctccaccaccagcagccctacgcgtacccgtcgcacgccgcgtcggcctcctcccccgcgctcccctccgtgccccactccgggaccgccacccccacccccggggccgggggcgccgcctccgcctccttcgccgggggccgccgcttcccgggcggccttgacgtgcccaacctcaagaagcgcggcggcggcacgcgcagctggatccgcgtcgaggccgccacggcctccgtgcagacgctggaggtcgacaaggccaccatgatgcgccgctgcgagctccccgcccgcgacctccgcctcctcgacccgctcttcgtctacccctccaccgtcctcggccgcgagcgcgccatcgtcgtcaacctcgagcagatccgctgcgtcatcaccgccgacgaggtgctcctcctcaactccctcgacagctacgtcttccagtacgccgccgagctgcagcgccgcctcctccagcgcgccgagggcgacgagctccccttcgagttccgcgccctcgagctcgccctcgaggccgcctgctccttcctcgacgcccaggcagcagaattggaaattgaagcatatcccttactggatgagctaacatcaaaaattagtactctaaatctgaaacgtgttcggcggctaaaaagtagactagttgctctgaccagaagagtccagaaggtcagggatgaaatagaacagctaatggatgatgatggagatatggctgagatgtatcttaccgagaaaaagatgaggatggaatcatcatctgtgtttggtgatcaatcattggcgaccttcaacgcggcagccgctgggacttcagtttcagctcctgtgtctccagtgtcttcacccacagaatcacggaaattggagaaaacctacagcttgtgtagatgtttaaacacaataaagttggaactggagggggg

SEQ ID NO: 9020 - protein, 358 aa, Triticum aestivum
  misc_feature (1)..(358): Ceres Seq. ID no. 13657648
KRPHSREEEPIPSHPTAAAKNQSRLPAAARAAPAMADAVKQPLLHHQQPYAYPSHAASASSPALPSVPHSGTATPTPGAGGAASASFAGGRRFPGGLDVPNLKKRGGGTRSWIRVEAATASVQTLEVDKATMMRRCELPARDLRLLDPLFVYPSTVLGRERAIVVNLEQIRCVITADEVLLLNSLDSYVFQYAAELQRRLLQRAEGDELPFEFRALELALEAACSFLDAQAAELEIEAYPLLDELTSKISTLNLKRVRRLKSRLVALTRRVQKVRDEIEQLMDDDGDMAEMYLTEKKMRMESSSVFGDQSLATFNAAAAGTSVSAPVSPVSSPTESRKLEKTYSLCRCLNTIKLELEG

SEQ ID NO: 9021 - protein, 324 aa, Triticum aestivum
  misc_feature (1)..(324): Ceres Seq. ID no. 13657649
MADAVKQPLLHHQQPYAYPSHAASASSPALPSVPHSGTATPTPGAGGAASASFAGGRRFPGGLDVPNLKKRGGGTRSWIRVEAATASVQTLEVDKATMMRRCELPARDLRLLDPLFVYPSTVLGRERAIVVNLEQIRCVITADEVLLLNSLDSYVFQYAAELQRRLLQRAEGDELPFEFRALELALEAACSFLDAQAAELEIEAYPLLDELTSKISTLNLKRVRRLKSRLVALTRRVQKVRDEIEQLMDDDGDMAEMYLTEKKMRMESSSVFGDQSLATFNAAAAGTSVSAPVSPVSSPTESRKLEKTYSLCRCLNTIKLELEG

SEQ ID NO: 9022 - protein, 227 aa, Triticum aestivum
  misc_feature (1)..(227): Ceres Seq. ID no. 13657650
MMRRCELPARDLRLLDPLFVYPSTVLGRERAIVVNLEQIRCVITADEVLLLNSLDSYVFQYAAELQRRLLQRAEGDELPFEFRALELALEAACSFLDAQAAELEIEAYPLLDELTSKISTLNLKRVRRLKSRLVALTRRVQKVRDEIEQLMDDDGDMAEMYLTEKKMRMESSSVFGDQSLATFNAAAAGTSVSAPVSPVSSPTESRKLEKTYSLCRCLNTIKLELEG

SEQ ID NO: 9023 - protein, 445 aa, Triticum aestivum
  misc_feature (1)..(445): Ceres Seq. ID no. 16611691
MADAVKQPLLHHQQPYAYPSHAASASSPALPSVPHSGTATPTPGAGGAASASFAGGRRFPGGLDVPNLKKRGGGTRSWIRVEAATASVQTLEVDKATMMRRCELPARDLRLLDPLFVYPSTVLGRERAIVVNLEQIRCVITADEVLLLNSLDSYVFQYAAELQRRLLQRAEGDELPFEFRALELALEAACSFLDAQAAELEIEAYPLLDELTSKISTLNLKRVRRLKSRLVALTRRVQKVRDEIEQLMDDDGDMAEMYLTEKKMRMESSSVFGDQSLATFNAAAAGTSVSAPVSPVSSPTESRKLEKTYSLCRSRHDSVKSSDNSVTEHIEELEMLLEAYFVVIDSTLNKLTSLKEYIDDTEDFINIQLDNVRNQLIQFELLLTTATFVVAIFGVVAGVFGMNFETDVFSIQNAFQWVLIITGVVGAFIFCFFVWFFKYKRLMPL

SEQ ID NO: 9024 - DNA, 724 bp, Triticum aestivum
  misc_feature (1)..(724): Ceres Seq. ID no. 13657920
atgtccatcaaccatcaaggcaataatccacgtacggttgtgagcggttcaccagcaagatacatagaggttacagagaagccagcagcagcaagcaagattgagcattcacggatggtggccggggccgtggtgcaggcgtcatcggtgttcgccgccttcgacaaggacggcgacggcaaggtgtcggccgccgagctgcgcggctccatgatggcggcgctgggcgaggaggtttccgaggaggaggccgcggcgatcctggccacggtggacgccgacggcgacgggctgctggaccaggaggagttctcccggctcgggctcggcgccgccggagacaacggtggggcggccggagacgacgacgacgacgaggtgaggcggcggtgcctgaaggaggcgttcgccatgtacgcgacggggggcggcgaggagggcgccaggatcacgccggcgagcctgaggcggatgctgggcaagctgctggggtccgagaagatggggctggaggagtgcagggccatgatctgcaggtttgacctcaacggcgacggcgtcctctccttcgacgagttcagggtcatgatgatggccaatttgtaaaggaaggatggtttcatttcattcgttcgcttttctcttctgtatttttgacatgtggttgcagttgttcacatgatggacgtttcaattgtatgttgaggcttgggtgtgatgcttg

SEQ ID NO: 9025 - protein, 201 aa, Triticum aestivum
  misc_feature (1)..(201): Ceres Seq. ID no. 13657921
MSINHQGNNPRTVVSGSPARYIEVTEKPAAASKIEHSRMVAGAVVQASSVFAAFDKDGDGKVSAAELRGSMMAALGEEVSEEEAAAILATVDADGDGLLDQEEFSRLGLGAAGDNGGAAGDDDDDEVRRRCLKEAFAMYATGGGEEGARITPASLRRMLGKLLGSEKMGLEECRAMICRFDLNGDGVLSFDEFRVMMMANL

SEQ ID NO: 9026 - protein, 163 aa, Triticum aestivum
  misc_feature (1)..(163): Ceres Seq. ID no. 13657922
MVAGAVVQASSVFAAFDKDGDGKVSAAELRGSMMAALGEEVSEEEAAAILATVDADGDGLLDQEEFSRLGLGAAGDNGGAAGDDDDDEVRRRCLKEAFAMYATGGGEEGARITPASLRRMLGKLLGSEKMGLEECRAMICRFDLNGDGVLSFDEFRVMMMANL

SEQ ID NO: 9027 - protein, 131 aa, Triticum aestivum
  misc_feature (1)..(131): Ceres Seq. ID no. 13657923
MMAALGEEVSEEEAAAILATVDADGDGLLDQEEFSRLGLGAAGDNGGAAGDDDDDEVRRRCLKEAFAMYATGGGEEGARITPASLRRMLGKLLGSEKMGLEECRAMICRFDLNGDGVLSFDEFRVMMMANL

SEQ ID NO: 9028 - protein, 201 aa, Triticum aestivum; identical to SEQ ID NO: 9025
  misc_feature (1)..(201): Ceres Seq. ID no. 16625418

SEQ ID NO: 9029 - DNA, 846 bp, Triticum aestivum
  misc_feature (1)..(846): Ceres Seq. ID no. 13658113
gagacttcatcggggaaatggaggaggaggagataaatctggccggcgccggcggaggggaggtgaagcaggaggtgggggaggaggaggagatcgagttcgagccgacggaggacgagctggtgctgcacttcctgcggccgcagctgcgcgggttcgcgccgcgcgtggcgggcgcggtggtggaggcggacccgtgcgcgtcgcccccctgggagctgctggcgcggcacggcctgctgcggcgcgggcacggctacttcttcgcggcgcggcggcgcgggaaggtgcggcgcaccccggagggcggcggcggcgcgtggatgcacagcggcaacaaggaggaccgccggtccgtgacggagctgggcgtggtggcgcgctggaccatgacgcggtactgcttctacctccgcggcggcgacggggcgcagcaggggcggcggagcaccgggtgggtgatgtccgagtacgagatcacggacccgcggtgctaccgccgcgccgacgacggcgaggaggaccagtactgggtgctctgccacgtccgccgcagcatcagggagaacgtcaagccgcgctcccgcaggcggtagcgggtcagtattactcagcaggctgccgcgcctcggctcggtcgccggccggcgcaagcccgtgtcagttcgtcctcgtcgttcgtcgctaagtcgccatgtgtgtgatctgatctgccatgtccgtctgtcggtgcgcggcacactgtctgtatttaagcagaatttggtcccttggattttgctggcttttgccagagtgtactgctctgccgtttgcaagtctaaaaatatgtcaaattttttcccc

SEQ ID NO: 9030 - protein, 228 aa, Triticum aestivum
  misc_feature (1)..(228): Ceres Seq. ID no. 13658114
RLHRGNGGGGDKSGRRRRRGGEAGGGGGGGDRVRADGGRAGAALPAAAAARVRAARGGRGGGGGPVRVAPLGAAGAARPAAARARLLLRGAAAREGAAHPGGRRRRVDAQRQQGGPPVRDGAGRGGALDHDAVLLLPPRRRRGAAGAAEHRVGDVRVRDHGPAVLPPRRRRRGGPVLGALPRPPQHQGERQAALPQAVAGQYYSAGCRASARSPAGASPCQFVLVVRR

SEQ ID NO: 9031 - protein, 197 aa, Triticum aestivum
  misc_feature (1)..(197): Ceres Seq. ID no. 13658115
DFIGEMEEEEINLAGAGGGEVKQEVGEEEEIEFEPTEDELVLHFLRPQLRGFAPRVAGAVVEADPCASPPWELLARHGLLRRGHGYFFAARRRGKVRRTPEGGGGAWMHSGNKEDRRSVTELGVVARWTMTRYCFYLRGGDGAQQGRRSTGWVMSEYEITDPRCYRRADDGEEDQYWVLCHVRRSIRENVKPRSRRR

SEQ ID NO: 9032 - protein, 192 aa, Triticum aestivum
  misc_feature (1)..(192): Ceres Seq. ID no. 13658116
MEEEEINLAGAGGGEVKQEVGEEEEIEFEPTEDELVLHFLRPQLRGFAPRVAGAVVEADPCASPPWELLARHGLLRRGHGYFFAARRRGKVRRTPEGGGGAWMHSGNKEDRRSVTELGVVARWTMTRYCFYLRGGDGAQQGRRSTGWVMSEYEITDPRCYRRADDGEEDQYWVLCHVRRSIRENVKPRSRRR

SEQ ID NO: 9033 - protein, 90 aa, Triticum aestivum
  misc_feature (1)..(90): Ceres Seq. ID no. 16625419
MHSGNKEDRRSVTELGVVARWTMTRYCFYLRGGDGAQQGRRSTGWVMSEYEITDPRCYRRADDGEEDQYWVLCHVRRSIRENVKPRSRRR

SEQ ID NO: 9034 - DNA, 914 bp, Triticum aestivum
  misc_feature (1)..(914): Ceres Seq. ID no. 13661065
cctcaattattgctaagcgtctccccatccgcccctcatctcctccccatccgcccccatctcccttcctccacccctccacggcggctctccattggtaatggcgatggcggcgtcgtggtgggcgctgctggcggcggcggcggttgtggcggcggcggggtgcggcgaggcggcgcccacggcggcggcggaggcggcgcacgacgtgctgcagacccacggcctcccgcgcgggctgctccctgcggggatcgcggcgttctcgcacgacccggccaccggccggttcgaggcggtcctggagtccccctgcacgtcgcgcaccgaggtcggcctgcggtacaacatcaccgtggcggggcagatcagctatggccggatcgccgagctctccggggtggacgctcaggacctatttctctggttcgccgtgcgcagcatccgcgtggacgtgccctcctccggcgtcatctacttcgatgtgggcgtggtctacaagcacttcccgctgtcgttcttcgaggcgccgccgccgtgcgtgcccaccccgctcatcctcctgcaaccacatcagattaggggcgacggatcggtggtggaagacggcgccgcgttgcaacaatgatgggacggattccatgatttcatcgtggagacgcaaaccagaaatcgcagttttgagaggtgatcggccggccggcgggcggacggccggctagtgtgcagatagatagacgtggtcattcattgtgtttgctactcgtcacctcatcactctgttcctgtcgtcgttcttgtcctctgcggccaaagtcaatcggcggccggcgggagctgcctgcgtgtactcctccggcgtccggccgactgtcatatttttcacggtaatggatgatgtgtagtgtatatgc

SEQ ID NO: 9035 - protein, 193 aa, Triticum aestivum
  misc_feature (1)..(193): Ceres Seq. ID no. 13661066
PQLLLSVSPSAPHLLPIRPHLPSSTPPRRLSIGNGDGGVVVGAAGGGGGCGGGGVRRGGAHGGGGGGARRAADPRPPARAAPCGDRGVLARPGHRPVRGGPGVPLHVAHRGRPAVQHHRGGADQLWPDRRALRGGRSGPISLVRRAQHPRGRALLRRHLLRCGRGLQALPAVVLRGAAAVRAHPAHPPATTSD

SEQ ID NO: 9036 - protein, 175 aa, Triticum aestivum
  misc_feature (1)..(175): Ceres Seq. ID no. 13661067
MAMAASWWALLAAAAVVAAAGCGEAAPTAAAEAAHDVLQTHGLPRGLLPAGIAAFSHDPATGRFEAVLESPCTSRTEVGLRYNITVAGQISYGRIAELSGVDAQDLFLWFAVRSIRVDVPSSGVIYFDVGVVYKHFPLSFFEAPPPCVPTPLILLQPHQIRGDGSVVEDGAALQQ

SEQ ID NO: 9037 - protein, 173 aa, Triticum aestivum
  misc_feature (1)..(173): Ceres Seq. ID no. 13661068
MAASWWALLAAAAVVAAAGCGEAAPTAAAEAAHDVLQTHGLPRGLLPAGIAAFSHDPATGRFEAVLESPCTSRTEVGLRYNITVAGQISYGRIAELSGVDAQDLFLWFAVRSIRVDVPSSGVIYFDVGVVYKHFPLSFFEAPPPCVPTPLILLQPHQIRGDGSVVEDGAALQQ

SEQ ID NO: 9038 - protein, 173 aa, Triticum aestivum; identical to SEQ ID NO: 9037
  misc_feature (1)..(173): Ceres Seq. ID no. 16625420

SEQ ID NO: 9039 - DNA, 1423 bp, Triticum aestivum
  misc_feature (1)..(1423): Ceres Seq. ID no. 13661403
agacctcgaaatcatctagcgaggtcgtcgggctaatcgaagttgggcaccaccgtttattcactgaatggactcgaccaccaaccaattcgccggcgccgccgccgccgctggcgcgtcatcggcgaacacggcaccgctgccggccatgctcgctgacgcccttatcggcgccggagctggaggaggagatggggaccccagcgccgctctccaacggctggcggccctcggcgatcgcatggctgctgtccggcgcctcctcgtcgcctccatttctggggaatcgcagcccctctcctcctcggatattcagtccgtgtcctccgagatctcatctgccgctcacctcgtcgtcctcaacgccgcctccctcctttcttcgtccctcccttttcccgccccatctgccactcccgcccctcccgctcctatacaagagcttcccgcagcggcctccaccgccgatgtgcttccccaagaagctaccaagggctacgatgtcgtggagctcgatgccgacgagctgctcgcggagcatgcccacttctgcaatatctgcggcaagggcttccgccgcgacgccaacctcaggatgcacatgcgcgcgcacggcgaccgattcaagaccctggacgcgctctcccggcccggtcaggcaaagccagttgatggccgcgatgtgcgcttttcctgtcctttcacggggtgcaaccggaaccgtgcgcaccgccgcttccggccgctcaagtcagcggtgtgcgcgcgcaaccacttccgccgcagccactgccccaaactctacgcgtgtgagcgctgcggtggcaagaagcgttttgctgttcttgccgatctccgcggccacctccgccactgcggtgaggaggcacagtggcgctgctcctgcggcaccaccttctcccgcaaggacaagctgttcggccatctcgccctctttgaaggccatatgccagccatgtcccctccgaacaaggatgcagtgacaacgactacagaggcaccccttgatataatggatgaaggaggaatcgaagagcaggaagatggcggtgaaggtggttttgatccggagttcttcaaggagtggatggaggagctcaaagatgatggcgtgcctgctggtggcacagtctggcctggacgggcagcagctgggcaatagcctgtgttgcaagttctgtttggggtgtatggtaacagccgcaaggggcattggctgccaaagtgtctgaaagagcggtggggagatgcttctgaagaacagcacagaggtttctaacaagagcagtgggggcatgcccttgtttgtatggcacagtagtagtctggaatcactttgccagtctccttgtcgctccctcgttattctgtacctattgtcctgttggcagaagtacattcc

SEQ ID NO: 9040 - protein, 371 aa, Triticum aestivum
  misc_feature (1)..(371): Ceres Seq. ID no. 13661404
MDSTTNQFAGAAAAAGASSANTAPLPAMLADALIGAGAGGGDGDPSAALQRLAALGDRMAAVRRLLVASISGESQPLSSSDIQSVSSEISSAAHLVVLNAASLLSSSLPFPAPSATPAPPAPIQELPAAASTADVLPQEATKGYDVVELDADELLAEHAHFCNICGKGFRRDANLRMHMRAHGDRFKTLDALSRPGQAKPVDGRDVRFSCPFTGCNRNRAHRRFRPLKSAVCARNHFRRSHCPKLYACERCGGKKRFAVLADLRGHLRHCGEEAQWRCSCGTTFSRKDKLFGHLALFEGHMPAMSPPNKDAVTTTTEAPLDIMDEGGIEEQEDGGEGGFDPEFFKEWMEELKDDGVPAGGTVWPGRAAAGQ

SEQ ID NO: 9041 - protein, 344 aa, Triticum aestivum
  misc_feature (1)..(344): Ceres Seq. ID no. 13661405
MLADALIGAGAGGGDGDPSAALQRLAALGDRMAAVRRLLVASISGESQPLSSSDIQSVSSEISSAAHLVVLNAASLLSSSLPFPAPSATPAPPAPIQELPAAASTADVLPQEATKGYDVVELDADELLAEHAHFCNICGKGFRRDANLRMHMRAHGDRFKTLDALSRPGQAKPVDGRDVRFSCPFTGCNRNRAHRRFRPLKSAVCARNHFRRSHCPKLYACERCGGKKRFAVLADLRGHLRHCGEEAQWRCSCGTTFSRKDKLFGHLALFEGHMPAMSPPNKDAVTTTTEAPLDIMDEGGIEEQEDGGEGGFDPEFFKEWMEELKDDGVPAGGTVWPGRAAAGQ

SEQ ID NO: 9042 - protein, 333 aa, Triticum aestivum
  misc_feature (1)..(333): Ceres Seq. ID no. 13661406
TSKSSSEVVGLIEVGHHRLFTEWTRPPTNSPAPPPPLARHRRTRHRCRPCSLTPLSAPELEEEMGTPAPLSNGWRPSAIAWLLSGASSSPPFLGNRSPSPPRIFSPCPPRSHLPLTSSSSTPPPSFLRPSLFPPHLPLPPLPLLYKSFPQRPPPPMCFPKKLPRATMSWSSMPTSCSRSMPTSAISAARASAATPTSGCTCARTATDSRPWTRSPGPVRQSQLMAAMCAFPVLSRGATGTVRTAASGRSSQRCARATTSAAATAPNSTRVSAAVARSVLLFLPISAATSATAVRRHSGAAPAAPPSPARTSCSAISPSLKAICQPCPLRTRMQ

SEQ ID NO: 9043 - protein, 371 aa, Triticum aestivum; identical to SEQ ID NO: 9040
  misc_feature (1)..(371): Ceres Seq. ID no. 16611707

SEQ ID NO: 9044 - DNA, 1339 bp, Triticum aestivum
  misc_feature (1)..(1339): Ceres Seq. ID no. 13661504
atcaccagtaaagcagtaagcaattccactcccgccgccacctccctctactccggcgctctctcggacgctccggcatacatacgtacttacaagcggaagcagccagagccagccatgtgccccggggcgccggtcgcggcggcggcgtcggacaagagcgtgtgcgtgatggacgcgtccggcccgctgggccaggcgctcgtgcaccgcctcctccgccggggctacaccgtccacgccgccacctacggccgctcgctcgacgcgctcgcgctgctcgccgccgccggccacgacgaggaccggctcaagctcttccgcgccgaccccttcgactaccactccatcgccgacgccgtccgcggctgctccggcctcttctgcatgttcaacacccacgaggaccaggccggctgcgacgaggtgatggtggaggtggaggtccgggcggcgcagaacgtgctggaggcgtgcgcgcagacggtgaccatggagcgggtggtcttcacctcctccgtcaccgccgtcgtctggaaggacgacgaccacaagcccgtcgacgccttcgacgagcggaactggagcgacctcaacctctgcaggaagcgcaagttgtggcatgcgctggccaagacgctgtcggagaagacggcctgggccttggccatggacagaggggtggacatggtggccatcaacgccggcctgctcaccgggccggggctctcctccgcccacccctgcctcaagggggtccccgagatgtacgagcacggcgtcctcgtcaccgtcgacgccgacttcctcgccgacgcccacgtggccgcctacgagtgccccacggccttcggccgctacctctgcttcaacaacgtcgtgtgccggcccgaggacgccctccagttcgcccagatgctcaccccgtccgctccatgctacccgccgagtgatgagctgaaggtgatcccacaaaggattcagaacaagaagctgaacaacctgatggtggagtttgccagtgccatatacggggacttggattagagaatcactagttcattgatttacatctcaagggcagctagggttgtattctttatgtacctaaatatctgtattctttttcctcctgaaaagggaaatatggttggtcagatgtacaaatctgtacaaggccaagcatgccgcatgtattccaccactcttaccaggatggtaggagcatttgagccagtgcttagcaatgtagtagtaatccttaggtccaacaaaagggaaaataagtccacagttatgttactactgccttgtacagcagcattatatgaatatgatg

SEQ ID NO: 9045 - protein, 348 aa, Triticum aestivum
  misc_feature (1)..(348): Ceres Seq. ID no. 13661505
ITSKAVSNSTPAATSLYSGALSDAPAYIRTYKRKQPEPAMCPGAPVAAAASDKSVCVMDASGPLGQALVHRLLRRGYTVHAATYGRSLDALALLAAAGHDEDRLKLFRADPFDYHSIADAVRGCSGLFCMFNTHEDQAGCDEVMVEVEVRAAQNVLEACAQTVTMERVVFTSSVTAVVWKDDDHKPVDAFDERNWSDLNLCRKRKLWHALAKTLSEKTAWALAMDRGVDMVAINAGLLTGPGLSSAHPCLKGVPEMYEHGVLVTVDADFLADAHVAAYECPTAFGRYLCFNNVVCRPEDALQFAQMLTPSAPCYPPSDELKVIPQRIQNKKLNNLMVEFASAIYGDLD

SEQ ID NO: 9046 - protein, 309 aa, Triticum aestivum
  misc_feature (1)..(309): Ceres Seq. ID no. 13661506
MCPGAPVAAAASDKSVCVMDASGPLGQALVHRLLRRGYTVHAATYGRSLDALALLAAAGHDEDRLKLFRADPFDYHSIADAVRGCSGLFCMFNTHEDQAGCDEVMVEVEVRAAQNVLEACAQTVTMERVVFTSSVTAVVWKDDDHKPVDAFDERNWSDLNLCRKRKLWHALAKTLSEKTAWALAMDRGVDMVAINAGLLTGPGLSSAHPCLKGVPEMYEHGVLVTVDADFLADAHVAAYECPTAFGRYLCFNNVVCRPEDALQFAQMLTPSAPCYPPSDELKVIPQRIQNKKLNNLMVEFASAIYGDLD

SEQ ID NO: 9047 - protein, 291 aa, Triticum aestivum
  misc_feature (1)..(291): Ceres Seq. ID no. 13661507
MDASGPLGQALVHRLLRRGYTVHAATYGRSLDALALLAAAGHDEDRLKLFRADPFDYHSIADAVRGCSGLFCMFNTHEDQAGCDEVMVEVEVRAAQNVLEACAQTVTMERVVFTSSVTAVVWKDDDHKPVDAFDERNWSDLNLCRKRKLWHALAKTLSEKTAWALAMDRGVDMVAINAGLLTGPGLSSAHPCLKGVPEMYEHGVLVTVDADFLADAHVAAYECPTAFGRYLCFNNVVCRPEDALQFAQMLTPSAPCYPPSDELKVIPQRIQNKKLNNLMVEFASAIYGDLD

SEQ ID NO: 9048 - protein, 309 aa, Triticum aestivum; identical to SEQ ID NO: 9046
  misc_feature (1)..(309): Ceres Seq. ID no. 16611680

SEQ ID NO: 9049 - DNA, 771 bp, Triticum aestivum
  misc_feature (1)..(771): Ceres Seq. ID no. 13661508
agagccaaccaacagggcgaccaagctcaattagctcagactactcagctaccgcctgtctgctctcaattgctccataccctacatggcgagggttcaccccaacatggtggccgcgccgggcgccgtcgacgaggcgccggccagctccgcggtggacgggccgacgacgctgacggtgtggcgcaagtccctgctgttcgactgcaaggggttcacggtgttcgacgccgagggcaaccttgcctaccgcgtcgacagctacgcctccgagagcggcgacgaggtcgtcctcatggacgcggccggccgccccgccttcaccgtccgccgcaagcggttcaccctgcagggcgagcagtggctcgtcttctccggcgaggagacgcggagtcccgtgtacaccgtcaggcggagcggccgcggcaagacgttggcgcacgtgacggcgtgcgcgggctccggccatgggccgtcttacgaggtggaggggtcgtacgcgcggcggagctgcgtggtgtacgacggcgagcggcgcgcggtggcggagatcaggcccaaggaggtggtcggcacggatgtgttccgcctggcggtgcagcccggcgtgggcgtgccgctcgccatggcagtggtggtggcgctggagcagatgttcgcgaggccgtcgctcctcaggagctggtccacatagattatatatttaattataatttgtttgttcatcggagtacgtctcagtatagccaagcttatagcttttttttgcct

SEQ ID NO: 9050 - protein, 257 aa, Triticum aestivum
  misc_feature (1)..(257): Ceres Seq. ID no. 13661509
RANQQGDQAQLAQTTQLPPVCSQLLHTLHGEGSPQHGGRAGRRRRGAGQLRGGRADDADGVAQVPAVRLQGVHGVRRRGQPCLPRRQLRLRERRRGRPHGRGRPPRLHRPPQAVHPAGRAVARLLRRGDAESRVHRQAERPRQDVGARDGVRGLRPWAVLRGGGVVRAAELRGVRRRAARGGGDQAQGGGRHGCVPPGGAARRGRAARHGSGGGAGADVREAVAPQELVHIDYIFNYNLFVHRSTSQYSQAYSFFLP

SEQ ID NO: 9051 - protein, 202 aa, Triticum aestivum
  misc_feature (1)..(202): Ceres Seq. ID no. 13661510
MARVHPNMVAAPGAVDEAPASSAVDGPTTLTVWRKSLLFDCKGFTVFDAEGNLAYRVDSYASESGDEVVLMDAAGRPAFTVRRKRFTLQGEQWLVFSGEETRSPVYTVRRSGRGKTLAHVTACAGSGHGPSYEVEGSYARRSCVVYDGERRAVAEIRPKEVVGTDVFRLAVQPGVGVPLAMAVVVALEQMFARPSLLRSWST

SEQ ID NO: 9052 - protein, 195 aa, Triticum aestivum
  misc_feature (1)..(195): Ceres Seq. ID no. 13661511
MVAAPGAVDEAPASSAVDGPTTLTVWRKSLLFDCKGFTVFDAEGNLAYRVDSYASESGDEVVLMDAAGRPAFTVRRKRFTLQGEQWLVFSGEETRSPVYTVRRSGRGKTLAHVTACAGSGHGPSYEVEGSYARRSCVVYDGERRAVAEIRPKEVVGTDVFRLAVQPGVGVPLAMAVVVALEQMFARPSLLRSWST

SEQ ID NO: 9053 - protein, 202 aa, Triticum aestivum; identical to SEQ ID NO: 9051
  misc_feature (1)..(202): Ceres Seq. ID no. 16625422

SEQ ID NO: 9054 - DNA, 718 bp, Triticum aestivum
  misc_feature (1)..(718): Ceres Seq. ID no. 13661954
agcaggaagctctaacatacaatggatacgaggcagagcgtcgcggcggtggtgaagccgtcgttggatggcggtgccccggccacggcgtcgttccgtctccgtaacggcagcctcaactcggttcgcctccgccgggtgttcgacctgttcgacaagaacggcgacggtcagatcacggtcgacgagctggcgcaggcgctggattcgctcgggctcgtcgccgaccgcgagggcctggcctccactgtgggcgcgtacgtccccgagggcgcggcggggcttcggttccaggacttcgagtgcctccaccgtgagctgggtgacgcgctcttcggcgcgctggacgacgtgcccgaggacggcgaggccggcgcgggcggggacgaggaggagatgaaggaggcgttcaaggtgttcgacgtggacggcgacggcttcatctcggcaaccgagctgcaggaggtgctcaagaagctgggcctccccgagggcagcagcctcgccaccgtgcgccagatgatttgcaacgtcgaccgtaacagcgacggccgcgtcgactttggggagttcaagtgcatgatgaaggggatcacggtgttgggcgcgtgaccatcgaaaccaatcgtgtccgatcgcacgctgcaacaaaccgcacatcctctcgttcatgggtggcgatcagaatcggttcccgtcaatcaagtacaccatctcc

SEQ ID NO: 9055 - protein, 196 aa, Triticum aestivum
  misc_feature (1)..(196): Ceres Seq. ID no. 13661955
MDTRQSVAAVVKPSLDGGAPATASFRLRNGSLNSVRLRRVFDLFDKNGDGQITVDELAQALDSLGLVADREGLASTVGAYVPEGAAGLRFQDFECLHRELGDALFGALDDVPEDGEAGAGGDEEEMKEAFKVFDVDGDGFISATELQEVLKKLGLPEGSSLATVRQMICNVDRNSDGRVDFGEFKCMMKGITVLGA

SEQ ID NO: 9056 - protein, 110 aa, Triticum aestivum
  misc_feature (1)..(110): Ceres Seq. ID no. 13661956
MAVPRPRRRSVSVTAASTRFASAGCSTCSTRTATVRSRSTSWRRRWIRSGSSPTARAWPPLWARTSPRARRGFGSRTSSASTVSWVTRSSARWTTCPRTARPARAGTRRR

SEQ ID NO: 9057 - protein, 196 aa, Triticum aestivum; identical to SEQ ID NO: 9055
  misc_feature (1)..(196): Ceres Seq. ID no. 16625424

SEQ ID NO: 9058 - DNA, 871 bp, Triticum aestivum
  misc_feature (1)..(871): Ceres Seq. ID no. 13662094
ctatctagtccaactgctccgccgcagatccgcgattgccagcagcaccatctccgaatcgcctcgctagggtttcctctccagcggcggccggctcgaccgtactccgttcgtgagcaatggctgcgaaagctgggaattctgtgggtggtgttcttccccatccccacgtgattggaaatgcatttgcccaacactactacaaaattctgaatgagtcaccagaggatgtccataagttctaccatgatcaaagtattcttggtcggaagccaaattctgatggtacattgacatctataaccacattgcgtgatatcaataaacactttgtatctacatacctcaagggatgttcgatggagatagacaatgtagattctcagccatcccacgagggcggtgtgctcgttttagttagtgggtccttcactgtccctgatgccatgaagcgtaggtttactcagtcgttcttccttgctccacaaaaaggaggctattttgttctgaatgatgtgcttagatacattccagttgagccagaaacaccacctgtcaaggttacagtgcttccgttgatggattatttctgggtatgatgatatcgccggtgaagtcatgaatcaatctacagaaagtacctccatcagcaatgaagtcatgaatgacagatagtcacgtctcggcagtgcactactagctttcttacagaatgcaagtttatccatctatagattatgtttgcttttgcaacaaatgggtgcgaaaagtttaacatttgcgaatgccttagcattgtacatacattatgacttgttaaaaggggagaaaacatcagacaagtatacaactgaatatatctattatatgc

SEQ ID NO: 9059 - protein, 159 aa, Triticum aestivum
  misc_feature (1)..(159): Ceres Seq. ID no. 13662095
MAAKAGNSVGGVLPHPHVIGNAFAQHYYKILNESPEDVHKFYHDQSILGRKPNSDGTLTSITTLRDINKHFVSTYLKGCSMEIDNVDSQPSHEGGVLVLVSGSFTVPDAMKRRFTQSFFLAPQKGGYFVLNDVLRYIPVEPETPPVKVTVLPLMDYFWV

SEQ ID NO: 9060 - protein, 79 aa, Triticum aestivum
  misc_feature (1)..(79): Ceres Seq. ID no. 13662096
MEIDNVDSQPSHEGGVLVLVSGSFTVPDAMKRRFTQSFFLAPQKGGYFVLNDVLRYIPVEPETPPVKVTVLPLMDYFWV

SEQ ID NO: 9061 - protein, 159 aa, Triticum aestivum; identical to SEQ ID NO: 9059
  misc_feature (1)..(159): Ceres Seq. ID no. 16625425

SEQ ID NO: 9062 - DNA, 1425 bp, Triticum aestivum
  misc_feature (1)..(1425): Ceres Seq. ID no. 13662335
ctacttcaaatagacttggaatgggccattagtacgagttggtgtggtgtgcatcgcgatctatggacatggacatggaggagcctccccacctgttcctgtgccccatctccatggagctcatgcaggagcccgtcacggtgtccaccggcgtcacctacgaccgccgcagcatcgagcgctggctcttctcgtacggccgggccacctgcccggccaccatgcagccgctcgccaaccttgacctcaccccgaaccacaccctcgcgcgcgtcatctcctcctggctcgaccgcggctccccttcctcctcctcctcgtcttcgtcgtcgccgtccacgtcgtcgctgtcgagtccggtccacgagctggggacgccgctgacgaggatgctggaggaggagcggctgcggtcggcgctgggcgacctcgaggagacgccgttcaaggtgaccgcgctcaagagcatgcggagctgcatggcgggcgacgtggccatgcagatcatcttcgtcgcctcgggcggcgttgaggcggtcggccgcgtgatggcgcaggcgctggccgagagcggcgcgggaggcgacttctccgcgttcacggtgtgcgaggaggccgccgcggtgctcgccgcgctcccgctctccgacaaggcgtcggtggggctcgttcttgcgccggagtgcctgaggcccgtcatggcgttgctccagcgcggcagcgcggaggcgaggttgcacgccatggacatcctcaccaagatctccagtgccggcgccggtgaccactggactgccggcatcgacgtcgacgacgtgctcaagtccctcctcgagctcctgtctgacgaggtctccgcgcgcctcagctcgcgcgcgctcgacgtgctgctggacgtcgtggagcggtcgccgagcgggcgcgccaaggccgtggaggtcggcgcggtgcacgtcctcgtcgagctcctcgtcgtggacgccgacgaccgccacgtcgccgagcggatactgctgcttctcaagcggctgtgcaagtgccccgagggccgcctcgccttcgccgagcacgacctgtcggtcgcggccgtggcgaggacaatgctgagggtgtcggatctggccacgcagctggccgtcaaggtgctgtggctcgtgtccatggtggcgcagtcggagaaggtgctcgaggacatggtgctcaccggcgccgtggcgaagctgctggggctgctgcacgtcgagagcgcgccgtccacgaagcaaaagacggtgaggatggtgaggatccacggcgtgttctggaggcagtacccttgcttccccaccgacctcaaggattacttgaggttgctcgattgatttgttcattagttccagataatctgcaagaaaagtgaacaaaaaccgtgaattttcttatagt

SEQ ID NO: 9063 - protein, 432 aa, Triticum aestivum
  misc_feature (1)..(432): Ceres Seq. ID no. 13662336
MDMDMEEPPHLFLCPISMELMQEPVTVSTGVTYDRRSIERWLFSYGRATCPATMQPLANLDLTPNHTLARVISSWLDRGSPSSSSSSSSSPSTSSLSSPVHELGTPLTRMLEEERLRSALGDLEETPFKVTALKSMRSCMAGDVAMQIIFVASGGVEAVGRVMAQALAESGAGGDFSAFTVCEEAAAVLAALPLSDKASVGLVLAPECLRPVMALLQRGSAEARLHAMDILTKISSAGAGDHWTAGIDVDDVLKSLLELLSDEVSARLSSRALDVLLDVVERSPSGRAKAVEVGAVHVLVELLVVDADDRHVAERILLLLKRLCKCPEGRLAFAEHDLSVAAVARTMLRVSDLATQLAVKVLWLVSMVAQSEKVLEDMVLTGAVAKLLGLLHVESAPSTKQKTVRMVRIHGVFWRQYPCFPTDLKDYLRLLD

SEQ ID NO: 9064 - protein, 430 aa, Triticum aestivum
  misc_feature (1)..(430): Ceres Seq. ID no. 13662337
MDMEEPPHLFLCPISMELMQEPVTVSTGVTYDRRSIERWLFSYGRATCPATMQPLANLDLTPNHTLARVISSWLDRGSPSSSSSSSSSPSTSSLSSPVHELGTPLTRMLEEERLRSALGDLEETPFKVTALKSMRSCMAGDVAMQIIFVASGGVEAVGRVMAQALAESGAGGDFSAFTVCEEAAAVLAALPLSDKASVGLVLAPECLRPVMALLQRGSAEARLHAMDILTKISSAGAGDHWTAGIDVDDVLKSLLELLSDEVSARLSSRALDVLLDVVERSPSGRAKAVEVGAVHVLVELLVVDADDRHVAERILLLLKRLCKCPEGRLAFAEHDLSVAAVARTMLRVSDLATQLAVKVLWLVSMVAQSEKVLEDMVLTGAVAKLLGLLHVESAPSTKQKTVRMVRIHGVFWRQYPCFPTDLKDYLRLLD

SEQ ID NO: 9065 - protein, 428 aa, Triticum aestivum
  misc_feature (1)..(428): Ceres Seq. ID no. 13662338
MEEPPHLFLCPISMELMQEPVTVSTGVTYDRRSIERWLFSYGRATCPATMQPLANLDLTPNHTLARVISSWLDRGSPSSSSSSSSSPSTSSLSSPVHELGTPLTRMLEEERLRSALGDLEETPFKVTALKSMRSCMAGDVAMQIIFVASGGVEAVGRVMAQALAESGAGGDFSAFTVCEEAAAVLAALPLSDKASVGLVLAPECLRPVMALLQRGSAEARLHAMDILTKISSAGAGDHWTAGIDVDDVLKSLLELLSDEVSARLSSRALDVLLDVVERSPSGRAKAVEVGAVHVLVELLVVDADDRHVAERILLLLKRLCKCPEGRLAFAEHDLSVAAVARTMLRVSDLATQLAVKVLWLVSMVAQSEKVLEDMVLTGAVAKLLGLLHVESAPSTKQKTVRMVRIHGVFWRQYPCFPTDLKDYLRLLD

SEQ ID NO: 9066 - protein, 432 aa, Triticum aestivum; identical to SEQ ID NO: 9063
  misc_feature (1)..(432): Ceres Seq. ID no. 16625426

SEQ ID NO: 9067 - DNA, 687 bp, Triticum aestivum
  misc_feature (1)..(687): Ceres Seq. ID no. 13662750
gctcctgtgctccgctctgtgcccctgcctgttccatccgtcgcctgcgtgcgtgccccatagaggagatttggtctttaccagagcttacaggaggcgtcgcctagaggtaggataagaataagaataagatggccattggcggagcggcgccgcacgactcgccgggcgggctaccggacttcgagcagccactcctccacgcgcacggtggcctgcaggccggcaaggaccccgccgcggcgcacgaccacgaggcgcagtgctcgccggaggctggcggcgcgacgtccctgcgcacatgcttcaatggcctcaacgctctctccggcgtggggctgctgtccatcccgtacgcactggcggagggcgggtggctcagcctggtgctcctcctcctcgtcgccatggtctgctgctacaccggccagctcctgcagacgtgcatgggcgcgtcgccggacgtgcgcggctacccggacatcggcgcgctcgccttcgggaccaagggccgcttcgccgtctcggccttcatgtacgccgagctctacctcgtcgccatcgggttcctcatactggagggggacaacctcgacaagctgttcccgggcaccagcctcagcctcggcggcgtgctcgtgctctccggcaagtgttaaacacaataaagttggaacgggagggggg

SEQ ID NO: 9068 - protein, 175 aa, Triticum aestivum
  misc_feature (1)..(175): Ceres Seq. ID no. 13662751
MAIGGAAPHDSPGGLPDFEQPLLHAHGGLQAGKDPAAAHDHEAQCSPEAGGATSLRTCFNGLNALSGVGLLSIPYALAEGGWLSLVLLLLVAMVCCYTGQLLQTCMGASPDVRGYPDIGALAFGTKGRFAVSAFMYAELYLVAIGFLILEGDNLDKLFPGTSLSLGGVLVLSGKC

SEQ ID NO: 9069 - protein, 128 aa, Triticum aestivum
  misc_feature (1)..(128): Ceres Seq. ID no. 13662752
MLQWPQRSLRRGAAVHPVRTGGGRVAQPGAPPPRRHGLLLHRPAPADVHGRVAGRARLPGHRRARLRDQGPLRRLGLHVRRALPRRHRVPHTGGGQPRQAVPGHQPQPRRRARALRQVLNTIKLEREG

SEQ ID NO: 9070 - protein, 126 aa, Triticum aestivum
  misc_feature (1)..(126): Ceres Seq. ID no. 13662753
MASTLSPAWGCCPSRTHWRRAGGSAWCSSSSSPWSAATPASSCRRAWARRRTCAATRTSARSPSGPRAASPSRPSCTPSSTSSPSGSSYWRGTTSTSCSRAPASASAACSCSPASVKHNKVGTGGG

SEQ ID NO: 9071 - protein, 175 aa, Triticum aestivum; identical to SEQ ID NO: 9068
  misc_feature (1)..(175): Ceres Seq. ID no. 16625427

SEQ ID NO: 9072 - DNA, 1402 bp, Triticum aestivum
  misc_feature (1)..(1402): Ceres Seq. ID no. 13662846
atccttcttctcactctcaggtctcagcgcgcccatcctctgccccttgggcgtctggtctggatccaagagccggccgccaactgcaatgccgtccctcctggagatcttcctgggatcctgttcctcctcggcgccgccggtggactgggaggcggaggcctacccggagtacgccgactacgccgtcctccccctgctcctcgccttcttccccgccctgcgcctcctcctcaaccagttcctcttcgaggtgttagcaagacgacttatatttggaaagggatatgacaagcttgctgaaacagatgaaaggagaaagaaaatcaataaatttaaggaatcggcatggaaatttgtttattatctttctgcagaactcttttcactatctgtaacatacaatgaatcgtggtttacaaatacaagatacttttgggtagggcctggcgagcagctgtggcccgaccaaaagatgaagctgaagcttaaggctgtatacatgtatgccgctggattttacgtatattctatctttgatcttctgttctgggaaacaagacgcaaggacttcggagtcatgatgtctcaccatgtggcaactattgttctgattgttgtgtcctatatttgcagattatctcgtcctggctcggtcattttacccctccatgatgcaagtgatatattcctagagattggaaagatggccaagtacagtagctgtgagtggctagctgttgtagcatttctactttttgtggcttcatggatccttcttcggctaatagtgtttcctttctggatcctaagaagcacaagttatgaaatagctatgatcgtggacaacgagaacagaaaaatctacagaacttcgtactactatcttttcaacactctcttgttttcacttctggtctttcacatatattggtgggtactgatttatcggatgctcgtcaaacaaattcaatccagaggtcatgttggtgaggatgtccgatccgattctgaaggcgaaaacaaccatgaagattaagctgaaggttgttggatgcttaactgaagaactgtatagttcgcagttgggaatgagaatggtgcaagcgggttgtataaagaatgagaatgtcaaggaggagctagttagcatatccattagtaggaaattcaggcacaaaacgaaaactgaaaaggctcgaatctcggtgccactggaacaagcctccttgatatgtatcttttttgtatattgaatgtataaggtgaggctatcattcagggtcttgaggcatcaatcatacatcgtgatattaatctccatatgtatgtgaagatgtcttttcagaaatactgagcctccgagttataaaaattctcttttatatatgtggtttgcttg

SEQ ID NO: 9073 - protein, 345 aa, Triticum aestivum
  misc_feature (1)..(345): Ceres Seq. ID no. 13662847
SFFSLSGLSAPILCPLGVWSGSKSRPPTAMPSLLEIFLGSCSSSAPPVDWEAEAYPEYADYAVLPLLLAFFPALRLLLNQFLFEVLARRLIFGKGYDKLAETDERRKKINKFKESAWKFVYYLSAELFSLSVTYNESWFTNTRYFWVGPGEQLWPDQKMKLKLKAVYMYAAGFYVYSIFDLLFWETRRKDFGVMMSHHVATIVLIVVSYICRLSRPGSVILPLHDASDIFLEIGKMAKYSSCEWLAVVAFLLFVASWILLRLIVFPFWILRSTSYEIAMIVDNENRKIYRTSYYYLFNTLLFSLLVFHIYWWVLIYRMLVKQIQSRGHVGEDVRSDSEGENNHED

SEQ ID NO: 9074 - protein, 316 aa, Triticum aestivum
  misc_feature (1)..(316): Ceres Seq. ID no. 13662848
MPSLLEIFLGSCSSSAPPVDWEAEAYPEYADYAVLPLLLAFFPALRLLLNQFLFEVLARRLIFGKGYDKLAETDERRKKINKFKESAWKFVYYLSAELFSLSVTYNESWFTNTRYFWVGPGEQLWPDQKMKLKLKAVYMYAAGFYVYSIFDLLFWETRRKDFGVMMSHHVATIVLIVVSYICRLSRPGSVILPLHDASDIFLEIGKMAKYSSCEWLAVVAFLLFVASWILLRLIVFPFWILRSTSYEIAMIVDNENRKIYRTSYYYLFNTLLFSLLVFHIYWWVLIYRMLVKQIQSRGHVGEDVRSDSEGENNHED

SEQ ID NO: 9075 - protein, 187 aa, Triticum aestivum
  misc_feature (1)..(187): Ceres Seq. ID no. 13662849
MKLKLKAVYMYAAGFYVYSIFDLLFWETRRKDFGVMMSHHVATIVLIVVSYICRLSRPGSVILPLHDASDIFLEIGKMAKYSSCEWLAVVAFLLFVASWILLRLIVFPFWILRSTSYEIAMIVDNENRKIYRTSYYYLFNTLLFSLLVFHIYWWVLIYRMLVKQIQSRGHVGEDVRSDSEGENNHED

SEQ ID NO: 9076 - protein, 316 aa, Triticum aestivum; identical to SEQ ID NO: 9074
  misc_feature (1)..(316): Ceres Seq. ID no. 16611675

SEQ ID NO: 9077 - DNA, 730 bp, Triticum aestivum
  misc_feature (1)..(730): Ceres Seq. ID no. 13664090
ataccgtctcctctcaacgaaagcttacaaaaaattcaccctaaatactttagtttataaataaagctcccaaaatctaagagaggagaagacaaagacttacaagaaaaaaggcatcataatggccaaattcttcatcgtgttcccttgcctctgcccctatgttttcaccaccctccttcacttggtggccgctgatgccgacgactttgacccgtttcaacatcacgggcttccgtctactgcgacacaatgccgcgtccaattcgttacccgcctcagtaaattcctcgaaggggcaaaggtaaagcttgagtgcaagagtcgtgtgaaccagacagtgacactgaccaaagaagctgtgactgacaaagacggaaaataccagatggaagttatgggagaccacgaagaggaactgtgcgagatcatcctcgtccaatcaccggacgcagagtgtggcgaagtgaacaacgaagagttcctaagaaacgcagcaaggatcagtctcacggctaacgatggcattgtctctaatgagattcgaaccattaacccacttgggttcatgaggaagactcctctcgccgattgtcctcaagttttcaaggagcttggaatcgtccctgacgtcatcttctaagcttaataccgatatacatcgatctctgaacaattttaatttttgttgtaactctttacatttcgtatataacaacatttatatttg

SEQ ID NO: 9078 - protein, 173 aa, Triticum aestivum
  misc_feature (1)..(173): Ceres Seq. ID no. 13664091
MAKFFIVFPCLCPYVFTTLLHLVAADADDFDPFQHHGLPSTATQCRVQFVTRLSKFLEGAKVKLECKSRVNQTVTLTKEAVTDKDGKYQMEVMGDHEEELCEIILVQSPDAECGEVNNEEFLRNAARISLTANDGIVSNEIRTINPLGFMRKTPLADCPQVFKELGIVPDVIF

SEQ ID NO: 9079 - protein, 173 aa, Triticum aestivum; identical to SEQ ID NO: 9078
  misc_feature (1)..(173): Ceres Seq. ID no. 16625428

SEQ ID NO: 9080 - DNA, 1538 bp, Triticum aestivum
  misc_feature (1)..(1538): Ceres Seq. ID no. 14301456
atccatctccattcccaaccccaatcccaaatcccaatcccagagataacgaagatgaggaaccagaagagccgtgttcaggagtgcaaggtcgagcacatcgacctcatcccgggcatgccggacgacgtcgccgtcgactgcctggcgcgcgtcccgcacgcctccttccgctcgatgcggggcgtgtgccgcggctggaacagcgccgccaccgcgccggacttcgcgctggcgcgcgccgaggccggcgccaacgaggatctcgtctacctgctgcagttcgggaacccggcggccgcggacgcggacggggtcgcgccggagaacgcccaggcgtacggggtgtcggtgtacaacgtcaccaccggggagtggcgccgcgagggcgccgcgccgcccgtgccgatgttcgcgcagtgcgcggccgtggggagccgcctcgccgtgctgggcgggtgggaccccaagaccttcgagcccgtggcggacgtgcacgtgctcgacgcgtccaccggcgtgtggcgccgcggcgcaccgatgcggtcggcgcggtccttcttcgcctgcgccgaggcgggcggcaagatctacgtcgcgggaggccacgacaagctcaagaacgcgctgaagacggcggaggcgtacgacgcgggcgccgacgcctgggacccgctgccggacatgtcggaggagcgcgacgagtgcgacggcatggccaccgtcgctggcgaccggttcctggccgtgagcgggtaccgcacaggccgccagggcgggttcgaacgcgacgccgagtggttcgacccagcgtcccgcgagtggcgccgcctggagcgcgtgcgcgcgcctccgtcggcggcgcacgtggtggtgcgcggccgggtgtggtgcatcgagggcacggccgtgatggagtaccgcggggagcggcgcagctggcgcgaggtcgggccgtccccgccggggctcaaggccggcacggcgcgcgcggtcgccgtcggaggcggcgagcgcgtggtggtgaccggcgccatcgagtccgagggaggaggcacggggcacgcgctgtgggtgttcgacgtcaagtccaagaactggaccgtggtgcggccgccgccgcagttcgccggcttcgtcttctccattggatccgtgcgcgtgtgatgtctcggaccgctctcctgcccaaggagacttcttgctagtcatgtcatgtgtgcgagagatgagcggaagggggaaggcacagagatgtgagtagtcgacggcatcgaaggcgaagagaggtagtgtagttagctcagctgtgttcatctgcctctgttgcagaactgaattcctgctcgtatggttggactgatggatcaggggtgtagtaatccttgttttccgaatctatagaggttggattacctgattgttcttggcaagcaacatttatccgccttcttcagtcaaaaatactacgtccccaacatgtaaaaacaggcgaacactctatggatgctagtacatctcctcatgagagtaacaac

SEQ ID NO: 9081 - protein, 401 aa, Triticum aestivum
  misc_feature (1)..(401): Ceres Seq. ID no. 14301457
PSPFPTPIPNPNPRDNEDEEPEEPCSGVQGRAHRPHPGHAGRRRRRLPGARPARLLPLDAGRVPRLEQRRHRAGLRAGARRGRRQRGSRLPAAVREPGGRGRGRGRAGERPGVRGVGVQRHHRGVAPRGRRAARADVRAVRGRGEPPRRAGRVGPQDLRARGGRARARRVHRRVAPRRTDAVGAVLLRLRRGGRQDLRRGRPRQAQERAEDGGGVRRGRRRLGPAAGHVGGARRVRRHGHRRWRPVPGRERVPHRPPGRVRTRRRVVRPSVPRVAPPGARARASVGGARGGARPGVVHRGHGRDGVPRGAAQLARGRAVPAGAQGRHGARGRRRRRRARGGDRRHRVRGRRHGARAVGVRRQVQELDRGAAAAAVRRLRLLHWIRARVMSRTALLPKETSC

SEQ ID NO: 9082 - protein, 388 aa, Triticum aestivum
  misc_feature (1)..(388): Ceres Seq. ID no. 14301458
IHLHSQPQSQIPIPEITKMRNQKSRVQECKVEHIDLIPGMPDDVAVDCLARVPHASFRSMRGVCRGWNSAATAPDFALARAEAGANEDLVYLLQFGNPAAADADGVAPENAQAYGVSVYNVTTGEWRREGAAPPVPMFAQCAAVGSRLAVLGGWDPKTFEPVADVHVLDASTGVWRRGAPMRSARSFFACAEAGGKIYVAGGHDKLKNALKTAEAYDAGADAWDPLPDMSEERDECDGMATVAGDRFLAVSGYRTGRQGGFERDAEWFDPASREWRRLERVRAPPSAAHVVVRGRVWCIEGTAVMEYRGERRSWREVGPSPPGLKAGTARAVAVGGGERVVVTGAIESEGGGTGHALWVFDVKSKNWTVVRPPPQFAGFVFSIGSVRV

SEQ ID NO: 9083 - protein, 370 aa, Triticum aestivum
  misc_feature (1)..(370): Ceres Seq. ID no. 14301459
MRNQKSRVQECKVEHIDLIPGMPDDVAVDCLARVPHASFRSMRGVCRGWNSAATAPDFALARAEAGANEDLVYLLQFGNPAAADADGVAPENAQAYGVSVYNVTTGEWRREGAAPPVPMFAQCAAVGSRLAVLGGWDPKTFEPVADVHVLDASTGVWRRGAPMRSARSFFACAEAGGKIYVAGGHDKLKNALKTAEAYDAGADAWDPLPDMSEERDECDGMATVAGDRFLAVSGYRTGRQGGFERDAEWFDPASREWRRLERVRAPPSAAHVVVRGRVWCIEGTAVMEYRGERRSWREVGPSPPGLKAGTARAVAVGGGERVVVTGAIESEGGGTGHALWVFDVKSKNWTVVRPPPQFAGFVFSIGSVRV

SEQ ID NO: 9084 - protein, 370 aa, Triticum aestivum; identical to SEQ ID NO: 9083
  misc_feature (1)..(370): Ceres Seq. ID no. 16625429

SEQ ID NO: 9085 - DNA, 887 bp, Triticum aestivum
  misc_feature (1)..(887): Ceres Seq. ID no. 14301618
atattcaggtctgttcttatcctcatttccccctctcctccaaatcttcctcggcaagactcctcgaactgtccaacacacgcgcaatcctcaaaccctagctcctccgatccaaacacctcctggtccctcggtccatccgccatggcatcgcccgccggtgacagccacctcttcgccggcgtccacttcctcctcatcggtttcgactgcgtctccatgtcccagtaccggtcgaagttggtgcagagcggcggcaccgacgccatgcaatttggcggcggctggacccacatcgtcgtgcgcggccttgtcaacgttgacccggtctgcgcggtggcgcgggcgcaagggaataaggttgtcagcgagatgtgggtggatgatagcttggatcagggttgccgatgctgataaagttatttattggccagccagagatttgaagggaatacctggtagtggctcactgcagatttgcttgacggggtaccaaatgaaggaccgcaaagatataatgttaactgcttgccatttgtatcctcatatctcctagtcaaaactctgaaacatggcaacctttagttaattcttcaaacataacatatatagtgaagttttggtcacattgtgcagtgattttctttgacttttataatttccattctaaacctcccttttgccttcctaccattatggttgtttatcaattgcagaccaatttaagtgaaagtttatagagcacgtaacactgagcgcatgtgtttcagaagtgaatactgtcctctttccccttcgtcgggtcagctcagccccaaagaactgcatcccacttatgagtaactatagtaatgcacgcttaagtgaatggaaatgctacttcatct

SEQ ID NO: 9086 - protein, 184 aa, Triticum aestivum
  misc_feature (1)..(184): Ceres Seq. ID no. 14301619
YSGLFLSSFPPLLQIFLGKTPRTVQHTRNPQTLAPPIQTPPGPSVHPPWHRPPVTATSSPASTSSSSVSTASPCPSTGRSWCRAAAPTPCNLAAAGPTSSCAALSTLTRSARWRGRKGIRLSARCGWMIAWIRVADADKVIYWPARDLKGIPGSGSLQICLTGYQMKDRKDIMLTACHLYPHIS

SEQ ID NO: 9087 - protein, 137 aa, Triticum aestivum
  misc_feature (1)..(137): Ceres Seq. ID no. 14301620
IFRSVLILISPSPPNLPRQDSSNCPTHAQSSNPSSSDPNTSWSLGPSAMASPAGDSHLFAGVHFLLIGFDCVSMSQYRSKLVQSGGTDAMQFGGGWTHIVVRGLVNVDPVCAVARAQGNKVVSEMWVDDSLDQGCRC

SEQ ID NO: 9088 - protein, 89 aa, Triticum aestivum
  misc_feature (1)..(89): Ceres Seq. ID no. 14301621
MASPAGDSHLFAGVHFLLIGFDCVSMSQYRSKLVQSGGTDAMQFGGGWTHIVVRGLVNVDPVCAVARAQGNKVVSEMWVDDSLDQGCRC

SEQ ID NO: 9089 - protein, 89 aa, Triticum aestivum; identical to SEQ ID NO: 9088
  misc_feature (1)..(89): Ceres Seq. ID no. 16625430

SEQ ID NO: 9090 - DNA, 1091 bp, Triticum aestivum
  misc_feature (1)..(1091): Ceres Seq. ID no. 14301638
ttggctacacatctttataagtggccggcatgcactccacatagcagccacgactcagtagatggcggcatcggcggcccacgtcgcggccctggccgccatactcctcttcatcccttccctcctcgccactgtcgccgcgcagcagggcaaggccaaggccttctgcatcagccagttcgccatcgccagtcaggcttgctccatcctgccgcccagccccccggaggacgaccatcaccaccaccacgacgacgatgatgatgacgacgacgacgatgacgacgacgacgacgacgacgagcaccatggcggcgacggtgaccgccgcctccgtggacgccatggccacgcggcggtcatcaacatctcgtcccttggcctgatggcggcaaacaacgacagcagcgaagttcacgttgcaagaaacggcaccggtcaccatggcggcaaccacacccgccgcgggcgcgggcgcgggcgccttcgtgctactggacgcggccggcgtgtgcgtgtgcgcgacggtgatgatgacccggaccatgaccacgaccaccaggaggaccccgaccatgatgatgaccatgaggaggactccgaccccgacgacgcccatgacgacgaacctgatgacgatgacgacgacgacgacgacgaccacgagcacaatgacgacgaccacgagcaccaccacgacgaggagcttcgggcgtaccgcgactgctgccggtggctgcaggaggtgcagaaggactgtgtgtgcgaggcgctcctgcggctgcccccgttcctcgtgaaaccacagcacaagtacgtcgtccgggtggggcggacgtgccggatcgtctaccgctgcggcggcgtgtagccaactggccggttcacacgtttggttaactgcactcgttgtccctgcttcctctctacgattacgtgcctgttttgctcttcagtctacgtagatggataattaggtaggcagcacgtatggatcgggtgtaatttttctactaagtattgtcctcaaagtttttcgatgtgcttccattcggatagactaattgataataatactacatgttgtcccg

SEQ ID NO: 9091 - protein, 269 aa, Triticum aestivum
  misc_feature (1)..(269): Ceres Seq. ID no. 14301639
MAASAAHVAALAAILLFIPSLLATVAAQQGKAKAFCISQFAIASQACSILPPSPPEDDHHHHHDDDDDDDDDDDDDDDDDEHHGGDGDRRLRGRHGHAAVINISSLGLMAANNDSSEVHVARNGTGHHGGNHTRRGRGRGRLRATGRGRRVRVRDGDDDPDHDHDHQEDPDHDDDHEEDSDPDDAHDDEPDDDDDDDDDDHEHNDDDHEHHHDEELRAYRDCCRWLQEVQKDCVCEALLRLPPFLVKPQHKYVVRVGRTCRIVYRCGGV

SEQ ID NO: 9092 - protein, 161 aa, Triticum aestivum
  misc_feature (1)..(161): Ceres Seq. ID no. 14301640
MAANNDSSEVHVARNGTGHHGGNHTRRGRGRGRLRATGRGRRVRVRDGDDDPDHDHDHQEDPDHDDDHEEDSDPDDAHDDEPDDDDDDDDDDHEHNDDDHEHHHDEELRAYRDCCRWLQEVQKDCVCEALLRLPPFLVKPQHKYVVRVGRTCRIVYRCGGV

SEQ ID NO: 9093 - protein, 269 aa, Triticum aestivum; identical to SEQ ID NO: 9091
  misc_feature (1)..(269): Ceres Seq. ID no. 16625431

SEQ ID NO: 9094 - DNA, 1412 bp, Triticum aestivum
  misc_feature (1)..(1412): Ceres Seq. ID no. 14302224
acgtaaggaagaagcaagaagcaggtagcagctagcataccacactcgatcgatcatacacatacaccatgccggccgcgcagcacatcgaacgagaccaagacctcgccatgagcagcgacgagttacttcaagctcagctggagctctaccaccacggcctcgccttcgtcaagtcactggcgctcaaggccgccacggacctgcgcatccccgacgccatccaccgccgcggcggcgccgccaccttgtccgagctggcctccgacaccgggatccaccccacgaagcgctccaacctccggcgggtcatgcgggtgctcaccaccaccggggtattctccattgtccaaggcaaaggcagcaacgaccacgccggtgatggcgctgcgtattacaagctcacgcgggtctcccggctccttgtcgagagatcaccgcacaacctgtccccgatggtgggcaccatcgtcaacacgttatgctggacctctctcctcaaaatgcccgagtggtttacccaaggccaagagggagagtcggcacagtcgcactcgctcgtccagctggccaacggctgcacgttctgggacaccaccaaggtcgatggcggcttgttcaacgacggcatggccgcggacagccgcatcgccatgaaggtcctgttgaaggagcacggcggagcgttcggggaagtgaaaagctcgctggtggacatcggcggcaaccatggcgccaccgcgtcggccgtggcgagagcgttcccgcacctcaagtgcagcgttctggacctcccacacgtcgtcgccgcggctcccgccagcgacattttgaccttcgtcgctggaaatatgttcgagtatgtcccacctgcggatgctgttctactcaagtggattttgcatgactggaaacacgaagattgcgtcaagataatgcgccggtgcaaggaagcgatcccagcgaaagaagccggaggaaaggtgataatcatcgacatggtggtgggatatccggtgactcagcccaaccattccaaagaggcgcaggttttgttagatatctacatgatgggctccgatggaatggagcgagaggaaaacgagtggagcttgattttctccgaagccgggttcagcgactacaagatcactccaaccaatgggattcgatcaattatcgaagtatacccttaaatgtacttacttccacttcggagatactatctccttccgtccgtacgtgtttattagtcttgcacgtgtaattgacttggtaaattagcagccaagatacacgtgcaagacttataaaccggaaaggaaggagtcgtcatttgatttgtaataaatctcaccaggaactctctgtattattgcatttaagttttactttttgtttatagattttac

SEQ ID NO: 9095 - protein, 375 aa, Triticum aestivum
  misc_feature (1)..(375): Ceres Seq. ID no. 14302225
MPAAQHIERDQDLAMSSDELLQAQLELYHHGLAFVKSLALKAATDLRIPDAIHRRGGAATLSELASDTGIHPTKRSNLRRVMRVLTTTGVFSIVQGKGSNDHAGDGAAYYKLTRVSRLLVERSPHNLSPMVGTIVNTLCWTSLLKMPEWFTQGQEGESAQSHSLVQLANGCTFWDTTKVDGGLFNDGMAADSRIAMKVLLKEHGGAFGEVKSSLVDIGGNHGATASAVARAFPHLKCSVLDLPHVVAAAPASDILTFVAGNMFEYVPPADAVLLKWILHDWKHEDCVKIMRRCKEAIPAKEAGGKVIIIDMVVGYPVTQPNHSKEAQVLLDIYMMGSDGMEREENEWSLIFSEAGFSDYKITPTNGIRSIIEVYP

SEQ ID NO: 9096 - protein, 361 aa, Triticum aestivum
  misc_feature (1)..(361): Ceres Seq. ID no. 14302226
MSSDELLQAQLELYHHGLAFVKSLALKAATDLRIPDAIHRRGGAATLSELASDTGIHPTKRSNLRRVMRVLTTTGVFSIVQGKGSNDHAGDGAAYYKLTRVSRLLVERSPHNLSPMVGTIVNTLCWTSLLKMPEWFTQGQEGESAQSHSLVQLANGCTFWDTTKVDGGLFNDGMAADSRIAMKVLLKEHGGAFGEVKSSLVDIGGNHGATASAVARAFPHLKCSVLDLPHVVAAAPASDILTFVAGNMFEYVPPADAVLLKWILHDWKHEDCVKIMRRCKEAIPAKEAGGKVIIIDMVVGYPVTQPNHSKEAQVLLDIYMMGSDGMEREENEWSLIFSEAGFSDYKITPTNGIRSIIEVYP

SEQ ID NO: 9097 - protein, 294 aa, Triticum aestivum
  misc_feature (1)..(294): Ceres Seq. ID no. 14302227
MRVLTTTGVFSIVQGKGSNDHAGDGAAYYKLTRVSRLLVERSPHNLSPMVGTIVNTLCWTSLLKMPEWFTQGQEGESAQSHSLVQLANGCTFWDTTKVDGGLFNDGMAADSRIAMKVLLKEHGGAFGEVKSSLVDIGGNHGATASAVARAFPHLKCSVLDLPHVVAAAPASDILTFVAGNMFEYVPPADAVLLKWILHDWKHEDCVKIMRRCKEAIPAKEAGGKVIIIDMVVGYPVTQPNHSKEAQVLLDIYMMGSDGMEREENEWSLIFSEAGFSDYKITPTNGIRSIIEVYP

SEQ ID NO: 9098 - protein, 361 aa, Triticum aestivum; identical to SEQ ID NO: 9096
  misc_feature (1)..(361): Ceres Seq. ID no. 16625433

SEQ ID NO: 9099 - DNA, 1298 bp, Triticum aestivum
  misc_feature (1)..(1298): Ceres Seq. ID no. 14302434
agaacatcctaatcgaaaatcatcgagctcgcatcacaggagttatctctggctagtcacgtcgcatcaaagccgaagaagcaatggccgccttcgccaccaggtccgcggccttccttggcctcgccgtcgtgctctgtttcctcgccggcgcggcgagcgcgcagcagctctctcccaacttctactcgaggtcttgccccaacctggcgtccatcgtgcggtcggggatgaccgccgcattgcagacggagaggcggatgggcgcgtccatcctccgcctcttcttccacgactgcttcgtcaatgggtgtgacggctcgattctgcttgacgacacctcgacgttcaccggcgagaagaacgccgggccgaacgccaactcggcgcgtgggttcgaggtgatcgacgccatcaagacccgggtcgaagccgcgtgcagggccaccgtctcctgcgccgacatcctcgcgctcgccgcccgtgacggtgtcaacctgctcggaggtcccacgtggagcgtgccgctggggcgcaaggactcgcgcacggcgagccagagcgcggccaacgcgaacctcccggggccggggtccagcctcgccacgctcatcgccatgttcggcaacaagaacctgtcgccgcgggacatgacggcgctctccggcgcgcacaccatcgggcgctcgcagtgccagttcttccgcaaccgcatctacaacgagcgcaacatcaacgccagcttcgcggcgctgcggcagcggacgtgcccgcggtcgggcggcgacggcaacctcgcgcccttcgacgtgcagaccgccgacgggttcgacaacgcctactaccagaacctggtcgggcagcgcggcctcctgcactcggaccaggagctcttcaacggcgggtcgcaggacgcgctggtgcggcagtacagcagcagccccagccagttctccgccgacttcgtcacggccatgctgaagatgggcggcctgctgccgtcgtccgggacgcagacggaggtcaggttgaactgcaggagacccaactaaaaagtacacacataacaagtgtgctaaataatgattgatgccttggaaaaccaggcattggtcaggttcacgtatgtatgtgtatgtatgatgaagaacaccaaatgtacaaacgctcgtttgctcaatccggggcgaacgtgcaaactacaaagtatcaaaatgtatgttggtcgtaaaagtgtatcatgatcatcatcatcaatacagaacaatgggatggtgcaatcatcataattaaagaat

SEQ ID NO: 9100 - protein, 322 aa, Triticum aestivum
  misc_feature (1)..(322): Ceres Seq. ID no. 14302435
MAAFATRSAAFLGLAVVLCFLAGAASAQQLSPNFYSRSCPNLASIVRSGMTAALQTERRMGASILRLFFHDCFVNGCDGSILLDDTSTFTGEKNAGPNANSARGFEVIDAIKTRVEAACRATVSCADILALAARDGVNLLGGPTWSVPLGRKDSRTASQSAANANLPGPGSSLATLIAMFGNKNLSPRDMTALSGAHTIGRSQCQFFRNRIYNERNINASFAALRQRTCPRSGGDGNLAPFDVQTADGFDNAYYQNLVGQRGLLHSDQELFNGGSQDALVRQYSSSPSQFSADFVTAMLKMGGLLPSSGTQTEVRLNCRRPN

SEQ ID NO: 9101 - protein, 273 aa, Triticum aestivum
  misc_feature (1)..(273): Ceres Seq. ID no. 14302436
MTAALQTERRMGASILRLFFHDCFVNGCDGSILLDDTSTFTGEKNAGPNANSARGFEVIDAIKTRVEAACRATVSCADILALAARDGVNLLGGPTWSVPLGRKDSRTASQSAANANLPGPGSSLATLIAMFGNKNLSPRDMTALSGAHTIGRSQCQFFRNRIYNERNINASFAALRQRTCPRSGGDGNLAPFDVQTADGFDNAYYQNLVGQRGLLHSDQELFNGGSQDALVRQYSSSPSQFSADFVTAMLKMGGLLPSSGTQTEVRLNCRRPN

SEQ ID NO: 9102 - protein, 263 aa, Triticum aestivum
  misc_feature (1)..(263): Ceres Seq. ID no. 14302437
MGASILRLFFHDCFVNGCDGSILLDDTSTFTGEKNAGPNANSARGFEVIDAIKTRVEAACRATVSCADILALAARDGVNLLGGPTWSVPLGRKDSRTASQSAANANLPGPGSSLATLIAMFGNKNLSPRDMTALSGAHTIGRSQCQFFRNRIYNERNINASFAALRQRTCPRSGGDGNLAPFDVQTADGFDNAYYQNLVGQRGLLHSDQELFNGGSQDALVRQYSSSPSQFSADFVTAMLKMGGLLPSSGTQTEVRLNCRRPN

SEQ ID NO: 9103 - protein, 322 aa, Triticum aestivum; identical to SEQ ID NO: 9100
  misc_feature (1)..(322): Ceres Seq. ID no. 16625435

SEQ ID NO: 9104 - DNA, 1453 bp, Triticum aestivum
  misc_feature (1)..(1453): Ceres Seq. ID no. 14302764
attcgactcgacgccctcggttcacacacactgatcagctcagctacagcctacagagtacagacccaacccaactccgggagacaacagagcagagcacggcgagaatgctgctgaacccggcctcggaggcgctggtgctcgacagcatcaggcagcacctcatggaggacacggcggcgccggcgccggaggcgaggaggcagcggccggcctactgccgcagcgccagcttcgggagcctggtggccgaccagtggagcgagtcgctcccgttccgcgccgacgactccgacgacatggtcgtctacggcgcgctccgcgacgccttctcctgcggctggctccccgacggctccttcgccgccgtcaagccggagcccctcctgccttccccggactcctgctacgtcggcttcctcgagccggagacgcctccggccacgtccccgggagagagcgaggaggaggccgccgcggcgttcatgggcgaggcggccgcggccgcggcgagggggaagcactaccgcggggtgaggcagcggccgtggggcaagttcgcggcggagatccgggacccggccaagaacggcgcgcgcgtgtggctcggcacctacgacaccgccgaggacgccgccgtggcctacgaccgcgccgcgtaccgcatgcgcggctcccgcgccctcctcaacttcccgctccgcatcggctccgagatcgccgccgcgcacgccgcggccgcggccgccggggacaagcggccttcccccgagccggcgacctcagactcgtcgtcgtcctcctcctcctccgggtccccgaaaagaaggaagaggggcgaggccgcggccgcgtccatggccatggcgctggtgccgccgccctcgcagctgagccggccggcccaggcgtggtaccccgcggcgccggtggagcaggtggccatggcgccgcgcgcgcagcagctggtcagctaggccccgctcgccagcccccgggcgcacgatcggtcgtaaaagcacacaatgcgcaagtgcaatggattcgccagcaagtgcatggacgcgacagcaacaggagcccgcctttcactggtgcacggtgcaaggtggtgatggcaatggagagcgatggcgagcgagcgagcgagcaatcaggcaaagcaaccttggcgacggctccatttggatatttggatgggtcgagccgtcgacaacggaagataagctcggagcaactgggtgctgcaatttggcctggaatgatagttcctcctctctccactgctcggtgcaactcgcccaagtggatcaaagcgaaactgtgccagtatcggatcgtcgtggttccttctgagtcgtagggttatattttgtcactgtcagagtgcgtgtggtaaaaattacaaactcgtgaatcgtgatcgagcataatggaacttgtgaaactttac

SEQ ID NO: 9105 - protein, 324 aa, Triticum aestivum
  misc_feature (1)..(324): Ceres Seq. ID no. 14302765
STRRPRFTHTDQLSYSLQSTDPTQLRETTEQSTARMLLNPASEALVLDSIRQHLMEDTAAPAPEARRQRPAYCRSASFGSLVADQWSESLPFRADDSDDMVVYGALRDAFSCGWLPDGSFAAVKPEPLLPSPDSCYVGFLEPETPPATSPGESEEEAAAAFMGEAAAAAARGKHYRGVRQRPWGKFAAEIRDPAKNGARVWLGTYDTAEDAAVAYDRAAYRMRGSRALLNFPLRIGSEIAAAHAAAAAAGDKRPSPEPATSDSSSSSSSSGSPKRRKRGEAAAASMAMALVPPPSQLSRPAQAWYPAAPVEQVAMAPRAQQLVS

SEQ ID NO: 9106 - protein, 289 aa, Triticum aestivum
  misc_feature (1)..(289): Ceres Seq. ID no. 14302766
MLLNPASEALVLDSIRQHLMEDTAAPAPEARRQRPAYCRSASFGSLVADQWSESLPFRADDSDDMVVYGALRDAFSCGWLPDGSFAAVKPEPLLPSPDSCYVGFLEPETPPATSPGESEEEAAAAFMGEAAAAAARGKHYRGVRQRPWGKFAAEIRDPAKNGARVWLGTYDTAEDAAVAYDRAAYRMRGSRALLNFPLRIGSEIAAAHAAAAAAGDKRPSPEPATSDSSSSSSSSGSPKRRKRGEAAAASMAMALVPPPSQLSRPAQAWYPAAPVEQVAMAPRAQQLVS

SEQ ID NO: 9107 - protein, 270 aa, Triticum aestivum
  misc_feature (1)..(270): Ceres Seq. ID no. 14302767
MEDTAAPAPEARRQRPAYCRSASFGSLVADQWSESLPFRADDSDDMVVYGALRDAFSCGWLPDGSFAAVKPEPLLPSPDSCYVGFLEPETPPATSPGESEEEAAAAFMGEAAAAAARGKHYRGVRQRPWGKFAAEIRDPAKNGARVWLGTYDTAEDAAVAYDRAAYRMRGSRALLNFPLRIGSEIAAAHAAAAAAGDKRPSPEPATSDSSSSSSSSGSPKRRKRGEAAAASMAMALVPPPSQLSRPAQAWYPAAPVEQVAMAPRAQQLVS

SEQ ID NO: 9108 - protein, 289 aa, Triticum aestivum; identical to SEQ ID NO: 9106
  misc_feature (1)..(289): Ceres Seq. ID no. 16625437

SEQ ID NO: 9109 - DNA, 1480 bp, Triticum aestivum
  misc_feature (1)..(1480): Ceres Seq. ID no. 14302772
acctacctactgcctccattcccaccacagctagcttcagcttttagctaagctctacttccctcccgagctaagcatcttcttgatttctcggtgatcggattcggatggacagcgcaagaagctgcctcgtggacgacgtgagcagcggcgcgtccacgggcaagaaggcctctccgtccccggccgcgccggcgaccaagccgctgcagcgcgtgggcagcggggccagcgcggtcatggacgcgccggagcccggcgccgaggcggactccggccgcgtcggcaggctgccgtcctccaagtacaagggcgtggtgccgcagcccaacgggcgctggggcgcgcagatctacgagcgccaccagcgcgtctggctcggcaccttcacgggggaggccgaggctgcgcgcgcctacgacgcggcggcgcagcgcttccgcggccgcgacgcagtcaccaacttccgctcgctcaccgagtccgacccggaggacgccgccgagctccgcttcctcgctgcccgctccaaggccgaggtcgtcgacatgctgcgcaagcacacctatcccgacgagctcgctcagtacaagcgcgcctacttcgccgccgctgcggcgtcctcccctacatcgtcctcggtgcctcccgcctcgtcgccctcttcggcggcttcgccctcgccggcggcgcggcgcgagcacctgttcgacaagacggtcacgcccagcgacgtggggaagctgaaccggcttgtgataccgaagcagcacgccgagaagcactttcctctccagcttccttccgccggcgccgccgtgtccggcgagtgcaagggcatgcttctcaacttcgacgactcggccggcaaggtgtggaggttccggtactcgtactggaacagcagccagagctacgtgctcaccaagggctggagccgctttgtcaaggagaagggcctgcacgccggcgacgccgtcgggttctaccgctctgcctcaggcagcaaccagctcttcatcgactgcaagctccggtccaagaccacgacgatgacgacgactttcgtcaacgcggcggccgccccgtcgccggcacccgtgatgaggaccgtgcgactcttcggcgtcgaccttctcacggcgccggcgccgagtcacgtgcccgagcacgaggactgcagcatggtgcccaagacaagcaagagatccatggacgccaacgcagcggccactccggcgcacgcggtctggaagaagcggtgcatagacttcgcgctgacctagccagctagcgtttttcctccatggttgctttgcttgcctccaaatttccatgttagtagcttagagctcttgatcggtccaagtgtttgccttttttttcctcttcttctcatacacaagttagctctaaatccagtcttctttaattaatctactgtaaattaagcccgttctcgaaatggcaagtgttcacc

SEQ ID NO: 9110 - protein, 392 aa, Triticum aestivum
  misc_feature (1)..(392): Ceres Seq. ID no. 14302773
MDSARSCLVDDVSSGASTGKKASPSPAAPATKPLQRVGSGASAVMDAPEPGAEADSGRVGRLPSSKYKGVVPQPNGRWGAQIYERHQRVWLGTFTGEAEAARAYDAAAQRFRGRDAVTNFRSLTESDPEDAAELRFLAARSKAEVVDMLRKHTYPDELAQYKRAYFAAAAASSPTSSSVPPASSPSSAASPSPAARREHLFDKTVTPSDVGKLNRLVIPKQHAEKHFPLQLPSAGAAVSGECKGMLLNFDDSAGKVWRFRYSYWNSSQSYVLTKGWSRFVKEKGLHAGDAVGFYRSASGSNQLFIDCKLRSKTTTMTTTFVNAAAAPSPAPVMRTVRLFGVDLLTAPAPSHVPEHEDCSMVPKTSKRSMDANAAATPAHAVWKKRCIDFALT

SEQ ID NO: 9111 - protein, 348 aa, Triticum aestivum
  misc_feature (1)..(348): Ceres Seq. ID no. 14302774
MDAPEPGAEADSGRVGRLPSSKYKGVVPQPNGRWGAQIYERHQRVWLGTFTGEAEAARAYDAAAQRFRGRDAVTNFRSLTESDPEDAAELRFLAARSKAEVVDMLRKHTYPDELAQYKRAYFAAAAASSPTSSSVPPASSPSSAASPSPAARREHLFDKTVTPSDVGKLNRLVIPKQHAEKHFPLQLPSAGAAVSGECKGMLLNFDDSAGKVWRFRYSYWNSSQSYVLTKGWSRFVKEKGLHAGDAVGFYRSASGSNQLFIDCKLRSKTTTMTTTFVNAAAAPSPAPVMRTVRLFGVDLLTAPAPSHVPEHEDCSMVPKTSKRSMDANAAATPAHAVWKKRCIDFALT

SEQ ID NO: 9112 - protein, 245 aa, Triticum aestivum
  misc_feature (1)..(245): Ceres Seq. ID no. 14302775
MLRKHTYPDELAQYKRAYFAAAAASSPTSSSVPPASSPSSAASPSPAARREHLFDKTVTPSDVGKLNRLVIPKQHAEKHFPLQLPSAGAAVSGECKGMLLNFDDSAGKVWRFRYSYWNSSQSYVLTKGWSRFVKEKGLHAGDAVGFYRSASGSNQLFIDCKLRSKTTTMTTTFVNAAAAPSPAPVMRTVRLFGVDLLTAPAPSHVPEHEDCSMVPKTSKRSMDANAAATPAHAVWKKRCIDFALT

SEQ ID NO: 9113 - protein, 392 aa, Triticum aestivum; identical to SEQ ID NO: 9110
  misc_feature (1)..(392): Ceres Seq. ID no. 16625438

SEQ ID NO: 9114 - DNA, 2137 bp, Triticum aestivum
  misc_feature (1)..(2137): Ceres Seq. ID no. 14302871
agactagtaactgtccaatcaaatcaaaccgaggagggacggtgcagtccctcgttaattttactggaccatctctctgactctcctctccacctcgcccgcttctcttctttacctagccttctcgggtaagctggctaggaccagtggcagcagcagtagtgggagcaggagctgcttggcttgccgttgctgcctttcacgtccacctgcgcgggcgtgaggcgtggaatccaaacaatggcgctgggatccgcggatctataggcgaggccaggcgcgggatgggatctgggaccagcaaggccgcttcgccggcgccggcgccggccggcggcgaggccaaggcgcggaatgggaagccgagggggaggagcctgatgcgcctgcccagctactcctgcttccggggcttcacgcccgagtctgacccttcttcttcgctgccggcgccgccgccgctaggggtcgagtcaagcaagggaggggagacgccttcactcgctcacattggcatatcagataatgatgctccatcagctcctaaactgaatccaagtgaaggcagaacgacgccttcatcagataccgacagagatcaaggtgatgatgtattgcagaatgtcactgctaccaggactgcagtcgacgacgaccaatcgccaaatccttctgaccggccgcatccatgctttggtgtcaactttgggttgagtagagccgtcagcttgggatcatcagtggcatgctccattatgtcaaccggcctctcctcttcagctaatcctagtattggaaatgtggaccatccttccgatgcaagcatccctcaacaaggtggtgcatcaacttctgggatttattcaagtctggatatgctaagggatagcgtcacaacacaagctagagccgctcatcaggctaggagaaatttgctggaatctgaagatgctaacttgaggcattcgcacagaaggatgggaccccaggaaccttctgaaggcagtgtccggtttagccggacacttagtgttggaagacttcgtgacagggtcctcaggaggactccattctcagatagtttattcacctcttcactttatgatagaccagtgtggacagcaggaaatgccagtgcgaggcaagattcatctgtgatgcaacggactaattcagacagaggttccgaaccgcaatcagaaccttcaactaacagcacgtacaattctggctctgcaactctaagagaggccagtaatcgggatcttcttgagcggagatcagcttttcttgaaaggaggaggaggatacgatctcaggtccgagctctccaaaggttgggcagcaggtttgaaaatttatcaggtcatgagagatcatgcattctatctggtcaacatagaacaggaaattgcaactgcagggcaagcagtcgaccaggtaatcctgatgaagaatccggcacaagggctagcatatcaagaattgttatgctagcagaagcactctttgaggtcttggatgaaatccaccaacagtctgctgctttatcctcaaggacatcattaccttcaattggatccgttcctgctccaaaggagatcgtcgagagtcttcctgtcaaggtgtacagaaagccgttgaaacaccaaactgatgaggctgcacaatgctacatttgccttgtcgaatatgaagaaggagactgtgttcgcatacttccatgcaatcacgaatttcatctaacatgtgtagataagtggctgaaagagattcacagggtttgtccactctgtcgtggcgatgtctgccgatcggattcgtcgagcatagggaaattcagctgattccttttatctcttaaggatccagcttcttgcgagaaaaaaatggagcttccgacacggttatttgatccagccggatagagcccgcagaatgttgcgggtgtgatttgatcttcatttctagtctggtctgaacaactcaggatgctcctgtgtgttatagcagatttgcatggcggtcatcccattataaacgatgagcttccatgcgaatttgagatttgttgtacggtggtgtgaagcctgttgatatattggttatatatatggcttgcgttttcgtgatgttg

SEQ ID NO: 9115 - protein, 363 aa, Triticum aestivum
  misc_feature (1)..(363): Ceres Seq. ID no. 14302872
MSTGLSSSANPSIGNVDHPSDASIPQQGGASTSGIYSSLDMLRDSVTTQARAAHQARRNLLESEDANLRHSHRRMGPQEPSEGSVRFSRTLSVGRLRDRVLRRTPFSDSLFTSSLYDRPVWTAGNASARQDSSVMQRTNSDRGSEPQSEPSTNSTYNSGSATLREASNRDLLERRSAFLERRRRIRSQVRALQRLGSRFENLSGHERSCILSGQHRTGNCNCRASSRPGNPDEESGTRASISRIVMLAEALFEVLDEIHQQSAALSSRTSLPSIGSVPAPKEIVESLPVKVYRKPLKHQTDEAAQCYICLVEYEEGDCVRILPCNHEFHLTCVDKWLKEIHRVCPLCRGDVCRSDSSSIGKFS

SEQ ID NO: 9116 - protein, 520 aa, Triticum aestivum
  misc_feature (1)..(520): Ceres Seq. ID no. 14302873
MGSGTSKAASPAPAPAGGEAKARNGKPRGRSLMRLPSYSCFRGFTPESDPSSSLPAPPPLGVESSKGGETPSLAHIGISDNDAPSAPKLNPSEGRTTPSSDTDRDQGDDVLQNVTATRTAVDDDQSPNPSDRPHPCFGVNFGLSRAVSLGSSVACSIMSTGLSSSANPSIGNVDHPSDASIPQQGGASTSGIYSSLDMLRDSVTTQARAAHQARRNLLESEDANLRHSHRRMGPQEPSEGSVRFSRTLSVGRLRDRVLRRTPFSDSLFTSSLYDRPVWTAGNASARQDSSVMQRTNSDRGSEPQSEPSTNSTYNSGSATLREASNRDLLERRSAFLERRRRIRSQVRALQRLGSRFENLSGHERSCILSGQHRTGNCNCRASSRPGNPDEESGTRASISRIVMLAEALFEVLDEIHQQSAALSSRTSLPSIGSVPAPKEIVESLPVKVYRKPLKHQTDEAAQCYICLVEYEEGDCVRILPCNHEFHLTCVDKWLKEIHRVCPLCRGDVCRSDSSSIGKFS

SEQ ID NO: 9117 - protein, 488 aa, Triticum aestivum
  misc_feature (1)..(488): Ceres Seq. ID no. 14302874
MRLPSYSCFRGFTPESDPSSSLPAPPPLGVESSKGGETPSLAHIGISDNDAPSAPKLNPSEGRTTPSSDTDRDQGDDVLQNVTATRTAVDDDQSPNPSDRPHPCFGVNFGLSRAVSLGSSVACSIMSTGLSSSANPSIGNVDHPSDASIPQQGGASTSGIYSSLDMLRDSVTTQARAAHQARRNLLESEDANLRHSHRRMGPQEPSEGSVRFSRTLSVGRLRDRVLRRTPFSDSLFTSSLYDRPVWTAGNASARQDSSVMQRTNSDRGSEPQSEPSTNSTYNSGSATLREASNRDLLERRSAFLERRRRIRSQVRALQRLGSRFENLSGHERSCILSGQHRTGNCNCRASSRPGNPDEESGTRASISRIVMLAEALFEVLDEIHQQSAALSSRTSLPSIGSVPAPKEIVESLPVKVYRKPLKHQTDEAAQCYICLVEYEEGDCVRILPCNHEFHLTCVDKWLKEIHRVCPLCRGDVCRSDSSSIGKFS

SEQ ID NO: 9118 - protein, 520 aa, Triticum aestivum; identical to SEQ ID NO: 9116
  misc_feature (1)..(520): Ceres Seq. ID no. 16625441

SEQ ID NO: 9119 - DNA, 2132 bp, Triticum aestivum
  misc_feature (1)..(2132): Ceres Seq. ID no. 14307896
caccgcatcgcacgaaaaacaccgaccttttttccagccgagacacgatgatccaccgccattagcagcggcggggaagcggcgatcgatcttccgtggccccgcgctcgcgtgctcgctctcgccggatcgggcctggcaaatggcgcgcgcggcctccctggcggcgctctgcctcctcctcctcgccgccgccgccgccgccggagctcgaatggacccgatttattctggccaactggtgccggactggagcagggaacccaagattaaaccgcagaatttctccctgaatcgagaggataatcttcagctcctaagcaggtcacgagatgtgactcgcaggaaattgggggagaggaccggtgtaataaagatggaaacagtacagcaggatgatgaagccctggttaaacttgagaatgcaggttttgagcgttcaaaagcagttgattctgctgtgctgggaaaatatagtctatggagacgcgaaaatgaaaacgagaaggcggatgcaaatgtccgtctgatgcgggaccaaatgatcatggctagaatatattccgtgcttgccaaatccagggacaagctcgatctttatcgggagctactcgccaggatcaaggaaagccagcgctcccttggggaagctactgctgattctgatctccctaagagtgcttctgagagagcaaaagcgatgggtctagttttatcaaaagcaagggatcaattgtacaattgcaaggaaattacccatcgtttaagatcaatgcttcagtcagctgatgagcaggtccggagcttaaagaagcagagcaccttcctcagtcagttggcagctaagacaataccgaatggcatacattgcttgtccatgcgcttaacaatagactattaccttctctctccagagaaaagaaagttccctaatagtgagaatttggaagatcctgatctttatcactatgctcttttttcggacaatgttctggcagcatcagttgtggttaactcaaccatcgtgaacgcaaaggagcctgagaagcatgtctttcatcttgttactgacaaactgaactttggggcaatgaacatgtggttcttgttgaatccacctggggatgccacaatccatgttgaaaatgtggatgacttcaaatggttgaactcttcgtactgccctgttttgaagcagctcgagtctgcagccatgaaagagtactactttaaggcagatcgtcaaaaaactctctctgctgggtcctctaatctgaagtaccgaaacccaaaatatctgtccatgctcaaccatctaagattttacctgccacaagtctatcctaagttgaataaaatccttttcctcgatgacgacattgtggtccagaaggacttgaccggactgtgggatgttgatcttaatgggaatgtaaatggtgctgtggaaacgtgcggggagagcttccaccgatttgacaagtacctcaatttctcgaacccaaatatttcgcagaattttgatcctaacgcatgtggttgggcttatggaatgaatatatttgatctggaggagtggaagaagaaggacattactggaatttaccataagtggcagaacatgaatgaaaacaggctgctgtggaaactggggacgcttccgccaggcctgatgactttctacaagctgacgcaccccctggacaaatcatggcatgtgcttgggttagggtacaacccgacggtcgagcacgcggagatcgacaccgccgccgtcatccactacaacgggaacatgaagccgtggctggagattgcgatgaccaagtaccggccttactggacgcagtacatcaactacgagcactcctatgtccggggctgcaagatcagtcaataggcagtagctagaagaggagcattcgcttcgacaggactactaaagaaagaaagtgtttccctgttggtagtgcagttatagcgcatgttcttcgttcgtgttattagatttgttttggttggtatcttttctgctgtatgtagcttcctcgcccgattcgttgtgctgcctcgactagtctgctgcggcacgtgttacatgttattctcttgaaaagaatggtgaacttggc

SEQ ID NO: 9120 - protein, 632 aa, Triticum aestivum
  misc_feature (1)..(632): Ceres Seq. ID no. 14307897
TASHEKHRPFFQPRHDDPPPLAAAGKRRSIFRGPALACSLSPDRAWQMARAASLAALCLLLLAAAAAAGARMDPIYSGQLVPDWSREPKIKPQNFSLNREDNLQLLSRSRDVTRRKLGERTGVIKMETVQQDDEALVKLENAGFERSKAVDSAVLGKYSLWRRENENEKADANVRLMRDQMIMARIYSVLAKSRDKLDLYRELLARIKESQRSLGEATADSDLPKSASERAKAMGLVLSKARDQLYNCKEITHRLRSMLQSADEQVRSLKKQSTFLSQLAAKTIPNGIHCLSMRLTIDYYLLSPEKRKFPNSENLEDPDLYHYALFSDNVLAASVVVNSTIVNAKEPEKHVFHLVTDKLNFGAMNMWFLLNPPGDATIHVENVDDFKWLNSSYCPVLKQLESAAMKEYYFKADRQKTLSAGSSNLKYRNPKYLSMLNHLRFYLPQVYPKLNKILFLDDDIVVQKDLTGLWDVDLNGNVNGAVETCGESFHRFDKYLNFSNPNISQNFDPNACGWAYGMNIFDLEEWKKKDITGIYHKWQNMNENRLLWKLGTLPPGLMTFYKLTHPLDKSWHVLGLGYNPTVEHAEIDTAAVIHYNGNMKPWLEIAMTKYRPYWTQYINYEHSYVRGCKISQ

SEQ ID NO: 9121 - protein, 585 aa, Triticum aestivum
  misc_feature (1)..(585): Ceres Seq. ID no. 14307898
MARAASLAALCLLLLAAAAAAGARMDPIYSGQLVPDWSREPKIKPQNFSLNREDNLQLLSRSRDVTRRKLGERTGVIKMETVQQDDEALVKLENAGFERSKAVDSAVLGKYSLWRRENENEKADANVRLMRDQMIMARIYSVLAKSRDKLDLYRELLARIKESQRSLGEATADSDLPKSASERAKAMGLVLSKARDQLYNCKEITHRLRSMLQSADEQVRSLKKQSTFLSQLAAKTIPNGIHCLSMRLTIDYYLLSPEKRKFPNSENLEDPDLYHYALFSDNVLAASVVVNSTIVNAKEPEKHVFHLVTDKLNFGAMNMWFLLNPPGDATIHVENVDDFKWLNSSYCPVLKQLESAAMKEYYFKADRQKTLSAGSSNLKYRNPKYLSMLNHLRFYLPQVYPKLNKILFLDDDIVVQKDLTGLWDVDLNGNVNGAVETCGESFHRFDKYLNFSNPNISQNFDPNACGWAYGMNIFDLEEWKKKDITGIYHKWQNMNENRLLWKLGTLPPGLMTFYKLTHPLDKSWHVLGLGYNPTVEHAEIDTAAVIHYNGNMKPWLEIAMTKYRPYWTQYINYEHSYVRGCKISQ

SEQ ID NO: 9122 - protein, 561 aa, Triticum aestivum
  misc_feature (1)..(561): Ceres Seq. ID no. 14307899
MDPIYSGQLVPDWSREPKIKPQNFSLNREDNLQLLSRSRDVTRRKLGERTGVIKMETVQQDDEALVKLENAGFERSKAVDSAVLGKYSLWRRENENEKADANVRLMRDQMIMARIYSVLAKSRDKLDLYRELLARIKESQRSLGEATADSDLPKSASERAKAMGLVLSKARDQLYNCKEITHRLRSMLQSADEQVRSLKKQSTFLSQLAAKTIPNGIHCLSMRLTIDYYLLSPEKRKFPNSENLEDPDLYHYALFSDNVLAASVVVNSTIVNAKEPEKHVFHLVTDKLNFGAMNMWFLLNPPGDATIHVENVDDFKWLNSSYCPVLKQLESAAMKEYYFKADRQKTLSAGSSNLKYRNPKYLSMLNHLRFYLPQVYPKLNKILFLDDDIVVQKDLTGLWDVDLNGNVNGAVETCGESFHRFDKYLNFSNPNISQNFDPNACGWAYGMNIFDLEEWKKKDITGIYHKWQNMNENRLLWKLGTLPPGLMTFYKLTHPLDKSWHVLGLGYNPTVEHAEIDTAAVIHYNGNMKPWLEIAMTKYRPYWTQYINYEHSYVRGCKISQ

SEQ ID NO: 9123 - protein, 585 aa, Triticum aestivum; identical to SEQ ID NO: 9121
  misc_feature (1)..(585): Ceres Seq. ID no. 16625468

SEQ ID NO: 9124 - DNA, 1763 bp, Triticum aestivum
  misc_feature (1)..(1763): Ceres Seq. ID no. 14307904
accaccaccgtcctcatctcctcctcgagcccctcccccctcctccgcatctcgccaccaacctccccccgatccccaacccccatgatccgcaggaggcgcgggcacgccgccgcctagggtttccactccccgccccccccgatggagtcgctgccgcggaagcgcaagggcgcgcgctccctcgccggctccctccacgacgcctccgcggaccgcaagcggacctgccgggagcggaagccgcgccccgacaagaagaaaaagaagccctccaccgccggcgatgacgccgccaccgcctccggccggggcggcgtggtcatgacggcgccgccggccagcggccgggccgccccggacagccccggaagggggctcaagcgcaaggtcggctgcatcgagtccgccacccggataggccgcaagaagcgcctcgaggccgagtacgagctcggcgacgagatcggccagggcaagttcggctccgtccggatctgccgcgccaaggccggcggcgaggagttcgcctgcaaggcgctccccaagaacggcgaggagacggtccaccgcgaggtcgagatcatgcagcacctctccggccaccccggcgtcgtcacgctcaaggccgtcttcgaggacgccgacaagttctacctcgtcatggagctctgcagcggcggccgcttgctcgacgagatggccagggacggcaccttctccgagcagcgagccgcccttgtcatcaaggatctaatgtcggtcgtcaagtactgccatgaaatgggcgtcatccacagggacattaagccggagaatattttgctcaccaagactgggaagatgaaactagcagattttggattggcagcacgagttactaacggtcagaaattgtctggcgttgctgggagcccagcctatgtggcgcctgaggtgttgtcaggaagctattctgagaaagtagacatatggggtgctggggtgctcctccatgtactactgcttggttcacttccatttcaagggggctctctggaagctgtctttgaagctataaagacagttgagcttgatttcaacagcggtccatgggaatcaatgtcagttcttggacgggatcttataagtcgaatgttagatcgagatgtctcttctagaataactgctgatcaagttctttgtcatccatgggtgttgttctacacggaatgtaccctgaaggctgtaacacctaatgtcactaacaagattgtagcacccaaaattacatgggacagaattagatcacattgtgagtcgtcagcttcagattcgtctagccagaggtcggaggaccaggatgaatgtggcatagtcgacgcactgacagcggcaataacacatgttagaatatcggagccgaaaaggacccggctttgcagccccggcattcccatacagcaggagtgctcctcaaacataaagagcaacctgtgtacggcgttctgacatgaccccaatgtatagccccttgtgtgttggtctgatgtcagtgatggctcgccctgctggttgtctctgtgctgaggataataactcgggttttcctgtcagagcaagcaagcgttcgacatggtgatgctgtagattgcggtgatggctgatgaacccgacatggtagctgatgctgtaaattttgtaaatagaatgatccatgtagctaatttatatcttgagagagttgagaataatttcagtctatgatgaacatagtgcgcgcc

SEQ ID NO: 9125 - protein, 448 aa, Triticum aestivum
  misc_feature (1)..(448): Ceres Seq. ID no. 14307905
MESLPRKRKGARSLAGSLHDASADRKRTCRERKPRPDKKKKKPSTAGDDAATASGRGGVVMTAPPASGRAAPDSPGRGLKRKVGCIESATRIGRKKRLEAEYELGDEIGQGKFGSVRICRAKAGGEEFACKALPKNGEETVHREVEIMQHLSGHPGVVTLKAVFEDADKFYLVMELCSGGRLLDEMARDGTFSEQRAALVIKDLMSVVKYCHEMGVIHRDIKPENILLTKTGKMKLADFGLAARVTNGQKLSGVAGSPAYVAPEVLSGSYSEKVDIWGAGVLLHVLLLGSLPFQGGSLEAVFEAIKTVELDFNSGPWESMSVLGRDLISRMLDRDVSSRITADQVLCHPWVLFYTECTLKAVTPNVTNKIVAPKITWDRIRSHCESSASDSSSQRSEDQDECGIVDALTAAITHVRISEPKRTRLCSPGIPIQQECSSNIKSNLCTAF

SEQ ID NO: 9126 - protein, 388 aa, Triticum aestivum
  misc_feature (1)..(388): Ceres Seq. ID no. 14307906
MTAPPASGRAAPDSPGRGLKRKVGCIESATRIGRKKRLEAEYELGDEIGQGKFGSVRICRAKAGGEEFACKALPKNGEETVHREVEIMQHLSGHPGVVTLKAVFEDADKFYLVMELCSGGRLLDEMARDGTFSEQRAALVIKDLMSVVKYCHEMGVIHRDIKPENILLTKTGKMKLADFGLAARVTNGQKLSGVAGSPAYVAPEVLSGSYSEKVDIWGAGVLLHVLLLGSLPFQGGSLEAVFEAIKTVELDFNSGPWESMSVLGRDLISRMLDRDVSSRITADQVLCHPWVLFYTECTLKAVTPNVTNKIVAPKITWDRIRSHCESSASDSSSQRSEDQDECGIVDALTAAITHVRISEPKRTRLCSPGIPIQQECSSNIKSNLCTAF

SEQ ID NO: 9127 - protein, 301 aa, Triticum aestivum
  misc_feature (1)..(301): Ceres Seq. ID no. 14307907
MQHLSGHPGVVTLKAVFEDADKFYLVMELCSGGRLLDEMARDGTFSEQRAALVIKDLMSVVKYCHEMGVIHRDIKPENILLTKTGKMKLADFGLAARVTNGQKLSGVAGSPAYVAPEVLSGSYSEKVDIWGAGVLLHVLLLGSLPFQGGSLEAVFEAIKTVELDFNSGPWESMSVLGRDLISRMLDRDVSSRITADQVLCHPWVLFYTECTLKAVTPNVTNKIVAPKITWDRIRSHCESSASDSSSQRSEDQDECGIVDALTAAITHVRISEPKRTRLCSPGIPIQQECSSNIKSNLCTAF

SEQ ID NO: 9128 - protein, 448 aa, Triticum aestivum; identical to SEQ ID NO: 9125
  misc_feature (1)..(448): Ceres Seq. ID no. 16625469

SEQ ID NO: 9129 - DNA, 1981 bp, Triticum aestivum
  misc_feature (1)..(1981): Ceres Seq. ID no. 14307908
gtagtcgcgtgcctccacctccactacaccgcaccgcgccatcagaaggccggccgggtcggtcggtgcaaggatattgcacacacacgctcgcagacacggtgtgacagcaattgcctccggcgatgtccgtttcttggccggcgccgtcgacgtgcgcggccgccggggccctcctggccgccgcgtggctgctgtgcttcaggctgttcccggccgtggcgaggccgagaaggcgggcgatgaagacgggggcgcagctccctcccggcatcttcgggtggccggtcgtcggcgagacgctggacttcgtctcctgcgcctactccccacgccccgaggcgttcgttgacaagcgccgcctccggtacggcagcgcggtgttccggtcgcacctgttcgggtcggcgacggtagtgacggcggacgcggaggtgaaccggttcgtgctgcagagcgacgcgcggtcgttcgtaccgtggtacccgcggtcgctgacggagctcatgggcaagtcctccatcctcgtcatcaacggcagcctgcagcgccgcgtccacggcctcgtcggcgccttcttcaagtcgccgcagctcaaggcgcaggtcaccgccgacatgcagcgccgcctcgccccggcgctcgccgcctggcgcgagcagggccccggcgcgcgcctccgcatccaggaccacgccaagacgattgtgttccagatcctggtgcgggctctgatcgggctggaggcaggcccagagatgcagcagctcaagcagcaattccaggaatttattgtcggactcatgtcccttcccattaagctgccagggactaggctctacagatccctccaggccaagaagaggatggcgagggtcgtacagaggatcatacaggagaagaggaggaggagggccctggacggcggcggcgcgccgagagacgccatcgacgtgctcatgggcgacggcagtgaggagctcaccgacgagctcatatccgacaacatgatcgacttcatgatccccgccgaggactccgtgccggtgctcatcacgctcgccgtcaagttcctcagcgagtgccccctcgccttgcaacagcttgaggaggagaacatgcagctcaagatgagaaaaaccgacctgggtgaaaccttgcaatggactgactacatgtccttgtcattcacgcagcatgtgataacggagacgctgcggattgggaatatcatcagtgggatcatgcgcaaggcggtccgcgacgtcgaagtgaaggggcatctcatccccaaaggatggcgtgtgttcatgtacttccggtcggtccacctcgacgacatgctctacgaggatccctgcaagttcaatccatggaggtggaagtgtgtcaatcaacaggagaaggacatgagcactagcagcttcaccccttttggtggtgggcagaggctgtgcccgggcctggatctggccaggctggaagcttccatctttctccaccacttggtcaccagcttcaggtgggtggccgaggaggaccacatcgtcaacttccccaccgtgcgcctcaagggaggcatgcccatcagggtcaccgccaaagactagctacccgttactcggaccatcgtccttgatcaactccccgcagcagccaagccagccaaaggctcaagttacatgtgcatatacataatgctactgctacaagtatgtggtgttatccatagcaaggttaaaagccccttcaaggagtaagctagctaggcaacatctgatgtgagtacataggggggtatgttgaagtgttgtaggggagcttaattagccaaggagtagtaggtgccactgatgatcactgtggctcgttaatcatagccgagggagactctgaccgatgatgcatgctgttatagtagtataagtagtagtatagtgctggtgtcacaaggaatagatatatcatctatgtatacatg

SEQ ID NO: 9130 - protein, 494 aa, Triticum aestivum
  misc_feature (1)..(494): Ceres Seq. ID no. 14307909
MSVSWPAPSTCAAAGALLAAAWLLCFRLFPAVARPRRRAMKTGAQLPPGIFGWPVVGETLDFVSCAYSPRPEAFVDKRRLRYGSAVFRSHLFGSATVVTADAEVNRFVLQSDARSFVPWYPRSLTELMGKSSILVINGSLQRRVHGLVGAFFKSPQLKAQVTADMQRRLAPALAAWREQGPGARLRIQDHAKTIVFQILVRALIGLEAGPEMQQLKQQFQEFIVGLMSLPIKLPGTRLYRSLQAKKRMARVVQRIIQEKRRRRALDGGGAPRDAIDVLMGDGSEELTDELISDNMIDFMIPAEDSVPVLITLAVKFLSECPLALQQLEEENMQLKMRKTDLGETLQWTDYMSLSFTQHVITETLRIGNIISGIMRKAVRDVEVKGHLIPKGWRVFMYFRSVHLDDMLYEDPCKFNPWRWKCVNQQEKDMSTSSFTPFGGGQRLCPGLDLARLEASIFLHHLVTSFRWVAEEDHIVNFPTVRLKGGMPIRVTAKD

SEQ ID NO: 9131 - protein, 455 aa, Triticum aestivum
  misc_feature (1)..(455): Ceres Seq. ID no. 14307910
MKTGAQLPPGIFGWPVVGETLDFVSCAYSPRPEAFVDKRRLRYGSAVFRSHLFGSATVVTADAEVNRFVLQSDARSFVPWYPRSLTELMGKSSILVINGSLQRRVHGLVGAFFKSPQLKAQVTADMQRRLAPALAAWREQGPGARLRIQDHAKTIVFQILVRALIGLEAGPEMQQLKQQFQEFIVGLMSLPIKLPGTRLYRSLQAKKRMARVVQRIIQEKRRRRALDGGGAPRDAIDVLMGDGSEELTDELISDNMIDFMIPAEDSVPVLITLAVKFLSECPLALQQLEEENMQLKMRKTDLGETLQWTDYMSLSFTQHVITETLRIGNIISGIMRKAVRDVEVKGHLIPKGWRVFMYFRSVHLDDMLYEDPCKFNPWRWKCVNQQEKDMSTSSFTPFGGGQRLCPGLDLARLEASIFLHHLVTSFRWVAEEDHIVNFPTVRLKGGMPIRVTAKD

SEQ ID NO: 9132 - protein, 367 aa, Triticum aestivum
  misc_feature (1)..(367): Ceres Seq. ID no. 14307911
MGKSSILVINGSLQRRVHGLVGAFFKSPQLKAQVTADMQRRLAPALAAWREQGPGARLRIQDHAKTIVFQILVRALIGLEAGPEMQQLKQQFQEFIVGLMSLPIKLPGTRLYRSLQAKKRMARVVQRIIQEKRRRRALDGGGAPRDAIDVLMGDGSEELTDELISDNMIDFMIPAEDSVPVLITLAVKFLSECPLALQQLEEENMQLKMRKTDLGETLQWTDYMSLSFTQHVITETLRIGNIISGIMRKAVRDVEVKGHLIPKGWRVFMYFRSVHLDDMLYEDPCKFNPWRWKCVNQQEKDMSTSSFTPFGGGQRLCPGLDLARLEASIFLHHLVTSFRWVAEEDHIVNFPTVRLKGGMPIRVTAKD

SEQ ID NO: 9133 - protein, 494 aa, Triticum aestivum; identical to SEQ ID NO: 9130
  misc_feature (1)..(494): Ceres Seq. ID no. 16625470

SEQ ID NO: 9134 - DNA, 1725 bp, Triticum aestivum
  misc_feature (1)..(1725): Ceres Seq. ID no. 14307944
atcactatcgtgtaacttcgtacgttgccgactactttcaatggcggcctttgcaaagatcgccatggagtgcctgcacgatcccctcatctggctacttcttgcgtcggtggccttggtcatcctgcaaagacggcggctgaaactgaacccgccgccgctccctccaggccccaagccgctaccgatcatcggcaacctgatgatggcggaccagctgacccaccgtggcctggcggcgctggccaagcagtacggcgggttgctgcacctccgcctgggctcgctccgcgtcttcgcggtgtccaccccggagtacgcgcgcgaggtgctccaggcgcaggacagcgacttctggtaccgcccagcctccatcgccgtccgctacctcacctacggctgctccgacatggcgttcgcgcgcgacgggccctactggcgccagatgcgcaagctgtgcgtcaccaagctcttcagccgccggcgcgccgagacctggctggccgtgcgcgacgggtacggggagctcgcccgggccgtcggcaggtccagcggcgaggccgtgaacctcggcgagctcatcttcaagcacaccgttagcatcatcttccgggccgccttcggcgtgcgcgacgtccaaggactggacgagttcatccccatgttcaaggagttctccaagctcttagaggcgttccacgtcggtgacttcttcccttggctaagctggatgggccggcggggcttcgaccggcgccttcgcaccgtgcgcggcgctctaggaacgtttgtggacaagatcattgacgagcacgtgaggaggggcaagaaccccgacgacgccgacgctgacatggtagacggcctactcgcgctcctcgctgatgccaaccaagccagcggggaggacgacctccgcttcacccgcgacaacgttagggccatgatgatggacatgttgtttggcgggccggacacggtggggttcaccattgagtgggcgatggcagagatgatgcattgccctgacatccttctgcggctgcagcaggagctcgtcgacattgtggggcttgatcggactgttgacgaatcggaccttggcaagctccccttcctcaagtgtgtcatcaaggagacgctccgaatgcacccaccgatcccgattcacctccacgggaacaccaaagattgcgtcctcggtggctactccgtgcccaggggctcccgtgtctttatcaacgcgtgggcgatcaaccgcgacggcgaggcgtggaaggaccctaacgcgttccggccatcgaggttcatgccagatggggaagccaccgggctggatctcaagggcggctgctacgagctattgtcgttcggttcgggggggcgctcgtgcccagcacaggggcttggccagcacgccgtggagtttgccatcgcgcagcttgtgcatgggttcaactggaagctacccggtgacatgaaaccaacggagctcgacatgagcgacatgaacggtgtcactgtgtcccgcgccacacgactctatgcagttcccacaccccggctcaattgtcctttgtaatattaattagaacatcgagctctttgttgtgacgtattgtaggtggaactacttgccataagattgcgtgtcaggctttagatacaaacacgtggtacacaactacacaccatggaatatggagtgtgcaaccgccttcctcc

SEQ ID NO: 9135 - protein, 526 aa, Triticum aestivum
  misc_feature (1)..(526): Ceres Seq. ID no. 14307945
SLSCNFVRCRLLSMAAFAKIAMECLHDPLIWLLLASVALVILQRRRLKLNPPPLPPGPKPLPIIGNLMMADQLTHRGLAALAKQYGGLLHLRLGSLRVFAVSTPEYAREVLQAQDSDFWYRPASIAVRYLTYGCSDMAFARDGPYWRQMRKLCVTKLFSRRRAETWLAVRDGYGELARAVGRSSGEAVNLGELIFKHTVSIIFRAAFGVRDVQGLDEFIPMFKEFSKLLEAFHVGDFFPWLSWMGRRGFDRRLRTVRGALGTFVDKIIDEHVRRGKNPDDADADMVDGLLALLADANQASGEDDLRFTRDNVRAMMMDMLFGGPDTVGFTIEWAMAEMMHCPDILLRLQQELVDIVGLDRTVDESDLGKLPFLKCVIKETLRMHPPIPIHLHGNTKDCVLGGYSVPRGSRVFINAWAINRDGEAWKDPNAFRPSRFMPDGEATGLDLKGGCYELLSFGSGGRSCPAQGLGQHAVEFAIAQLVHGFNWKLPGDMKPTELDMSDMNGVTVSRATRLYAVPTPRLNCPL

SEQ ID NO: 9136 - protein, 513 aa, Triticum aestivum
  misc_feature (1)..(513): Ceres Seq. ID no. 14307946
MAAFAKIAMECLHDPLIWLLLASVALVILQRRRLKLNPPPLPPGPKPLPIIGNLMMADQLTHRGLAALAKQYGGLLHLRLGSLRVFAVSTPEYAREVLQAQDSDFWYRPASIAVRYLTYGCSDMAFARDGPYWRQMRKLCVTKLFSRRRAETWLAVRDGYGELARAVGRSSGEAVNLGELIFKHTVSIIFRAAFGVRDVQGLDEFIPMFKEFSKLLEAFHVGDFFPWLSWMGRRGFDRRLRTVRGALGTFVDKIIDEHVRRGKNPDDADADMVDGLLALLADANQASGEDDLRFTRDNVRAMMMDMLFGGPDTVGFTIEWAMAEMMHCPDILLRLQQELVDIVGLDRTVDESDLGKLPFLKCVIKETLRMHPPIPIHLHGNTKDCVLGGYSVPRGSRVFINAWAINRDGEAWKDPNAFRPSRFMPDGEATGLDLKGGCYELLSFGSGGRSCPAQGLGQHAVEFAIAQLVHGFNWKLPGDMKPTELDMSDMNGVTVSRATRLYAVPTPRLNCPL

SEQ ID NO: 9137 - protein, 505 aa, Triticum aestivum
  misc_feature (1)..(505): Ceres Seq. ID no. 14307947
MECLHDPLIWLLLASVALVILQRRRLKLNPPPLPPGPKPLPIIGNLMMADQLTHRGLAALAKQYGGLLHLRLGSLRVFAVSTPEYAREVLQAQDSDFWYRPASIAVRYLTYGCSDMAFARDGPYWRQMRKLCVTKLFSRRRAETWLAVRDGYGELARAVGRSSGEAVNLGELIFKHTVSIIFRAAFGVRDVQGLDEFIPMFKEFSKLLEAFHVGDFFPWLSWMGRRGFDRRLRTVRGALGTFVDKIIDEHVRRGKNPDDADADMVDGLLALLADANQASGEDDLRFTRDNVRAMMMDMLFGGPDTVGFTIEWAMAEMMHCPDILLRLQQELVDIVGLDRTVDESDLGKLPFLKCVIKETLRMHPPIPIHLHGNTKDCVLGGYSVPRGSRVFINAWAINRDGEAWKDPNAFRPSRFMPDGEATGLDLKGGCYELLSFGSGGRSCPAQGLGQHAVEFAIAQLVHGFNWKLPGDMKPTELDMSDMNGVTVSRATRLYAVPTPRLNCPL

SEQ ID NO: 9138 - protein, 513 aa, Triticum aestivum; identical to SEQ ID NO: 9136
  misc_feature (1)..(513): Ceres Seq. ID no. 16625471

SEQ ID NO: 9139 - DNA, 1613 bp, Triticum aestivum
  misc_feature (1)..(1613): Ceres Seq. ID no. 14307952
aaatcattcactcaacaatggaattcgttatgctcctggccgctctcttttgcctcctagccggagtggtctttctgcggagctacaccaggagatcccaggccaccacccaccacatcggggaccccgatgttgctcatcgagcgctcattgggaacgccgacgacttcttaaaccggccggcagcaagcttccccacctccctggccacctggcgccatggcgaacggaacgacaacatagccactgtgacctacggcccgcagtggcgagtgctccggtgcaacctcacggctgagatcctctcacgcctcggttccttagccccgcttcatgaggaggccgcccaggcactcgtcgcagacttctcggcccgatgcggcggaggaggtgacgtggccgtccgtgagcccgtcaccaaagccgtgttcacgctggccacgcgcctgtgcttcggcgacattgtggacgacggccagagacacgccataggacgcgtgatacgggactccatcgtcgccgcaggtaagctcagccccgggttcgatggctcgatgctatccaagctcgcgaactggagggggtttcgccggatctccgccgtgctcaaacggcagaccgagctgtacctccctctgatcgcggcacggaggcagtcgcagtctcagctctgtggcggcatcgtccatccttacgaggactcgctcctggatctccgtgtccccgacaatggtgatgcctccggccccggccgtcctcttcaagacggcgagctggtgggccttgtgttcgagttcctgggtgcagccactgggtcaaccgcagcctgcctcgagtggaccctcgcccatctcatcgaccagcaggagaccctggacaggctgcgccgggagatcgaagacgaggccgacgccggcgggatactctccagcaagagccttcgcagcggcatgccctacctgaacgcggtagtccttgaatgcctccgcatgcaccagccggtgccggtcatcttgagcagcgcccacggggacggcgccaaagcgatcggtggaatgagagctgtgccgctggacggcttgagcgtgcagttcaatttagccgacattggaagagatgcgaagcggtggacccatcctgacaagttctggccggagcggttccttgccggaggcgaggcggaagacatcgggccggcgccgggccccaaggagatcaggatgatgccgttcggtgcgggacatcggcactgccctggcgtgaacatgggaatgttgcacatcaagtgcttcttagcggcgctcgtgcacaacttcgactgggcactgtccgccgaagactgcagcagcggtgtcgacatgacggagcaggacggcttcataaaaataatgaagaagccgctctccgcgcgtgtcactggacgcacttgagttcttctaaaatctttgacaaacttgtgtccggtttctgaatgtgtgtggtcctatttttcatgcacgtcttgttctgctttcctgttgaagtttgtttgagcttgcttaccacacggaccgtgtggtatgtgtgattgtacttgcatcaaataataagaaatcgtgtgcttcttgcttttc

SEQ ID NO: 9140 - protein, 475 aa, Triticum aestivum
  misc_feature (1)..(475): Ceres Seq. ID no. 14307953
IIHSTMEFVMLLAALFCLLAGVVFLRSYTRRSQATTHHIGDPDVAHRALIGNADDFLNRPAASFPTSLATWRHGERNDNIATVTYGPQWRVLRCNLTAEILSRLGSLAPLHEEAAQALVADFSARCGGGGDVAVREPVTKAVFTLATRLCFGDIVDDGQRHAIGRVIRDSIVAAGKLSPGFDGSMLSKLANWRGFRRISAVLKRQTELYLPLIAARRQSQSQLCGGIVHPYEDSLLDLRVPDNGDASGPGRPLQDGELVGLVFEFLGAATGSTAACLEWTLAHLIDQQETLDRLRREIEDEADAGGILSSKSLRSGMPYLNAVVLECLRMHQPVPVILSSAHGDGAKAIGGMRAVPLDGLSVQFNLADIGRDAKRWTHPDKFWPERFLAGGEAEDIGPAPGPKEIRMMPFGAGHRHCPGVNMGMLHIKCFLAALVHNFDWALSAEDCSSGVDMTEQDGFIKIMKKPLSARVTGRT

SEQ ID NO: 9141 - protein, 470 aa, Triticum aestivum
  misc_feature (1)..(470): Ceres Seq. ID no. 14307954
MEFVMLLAALFCLLAGVVFLRSYTRRSQATTHHIGDPDVAHRALIGNADDFLNRPAASFPTSLATWRHGERNDNIATVTYGPQWRVLRCNLTAEILSRLGSLAPLHEEAAQALVADFSARCGGGGDVAVREPVTKAVFTLATRLCFGDIVDDGQRHAIGRVIRDSIVAAGKLSPGFDGSMLSKLANWRGFRRISAVLKRQTELYLPLIAARRQSQSQLCGGIVHPYEDSLLDLRVPDNGDASGPGRPLQDGELVGLVFEFLGAATGSTAACLEWTLAHLIDQQETLDRLRREIEDEADAGGILSSKSLRSGMPYLNAVVLECLRMHQPVPVILSSAHGDGAKAIGGMRAVPLDGLSVQFNLADIGRDAKRWTHPDKFWPERFLAGGEAEDIGPAPGPKEIRMMPFGAGHRHCPGVNMGMLHIKCFLAALVHNFDWALSAEDCSSGVDMTEQDGFIKIMKKPLSARVTGRT

SEQ ID NO: 9142 - protein, 466 aa, Triticum aestivum
  misc_feature (1)..(466): Ceres Seq. ID no. 14307955
MLLAALFCLLAGVVFLRSYTRRSQATTHHIGDPDVAHRALIGNADDFLNRPAASFPTSLATWRHGERNDNIATVTYGPQWRVLRCNLTAEILSRLGSLAPLHEEAAQALVADFSARCGGGGDVAVREPVTKAVFTLATRLCFGDIVDDGQRHAIGRVIRDSIVAAGKLSPGFDGSMLSKLANWRGFRRISAVLKRQTELYLPLIAARRQSQSQLCGGIVHPYEDSLLDLRVPDNGDASGPGRPLQDGELVGLVFEFLGAATGSTAACLEWTLAHLIDQQETLDRLRREIEDEADAGGILSSKSLRSGMPYLNAVVLECLRMHQPVPVILSSAHGDGAKAIGGMRAVPLDGLSVQFNLADIGRDAKRWTHPDKFWPERFLAGGEAEDIGPAPGPKEIRMMPFGAGHRHCPGVNMGMLHIKCFLAALVHNFDWALSAEDCSSGVDMTEQDGFIKIMKKPLSARVTGRT

SEQ ID NO: 9143 - protein, 466 aa, Triticum aestivum; identical to SEQ ID NO: 9142
  misc_feature (1)..(466): Ceres Seq. ID no. 16625472

SEQ ID NO: 9144 - DNA, 1775 bp, Triticum aestivum
  misc_feature (1)..(1775): Ceres Seq. ID no. 14307980
atatcgaacgcaacaatgcacctcgtcgccatggatatccctctcccgttgctcctctccaccttggccgttgccgtgaccatatgctatgtcctcttcttccgtgctgacaaggggcgcgcgccgctgccgcccgggccgaggggctggccggtgctggggaacctcccgcagctcggcggcaagacgcaccagaccatgcacgagatgtccaaggtgtacgggcccgtgctccggctccggttcggcagctccgtcgtggtggtggccgggtcggccgccgtggccgagcagttcctccgcacccacgacgccaagttcagcagccggccgcccaactccggcggcgagcacatggcgtacaactaccaggacgtggtgttcgcgccctacggcccccggtggcgcgcgatgaggaaggtgtgcgccgtgaacctcttctcggcccgcgcgctcgacgacctccgcgggttccgcgagcgggaggccgcgctcatggtgaggtccctcgctgatgccgctgctaccggcggggtggtggcggtcggcaaggcggcgaacgtgtgcacgaccaacgctctctcgcgggcggcggtggggctccgggtgttcgccgcggccggcgccgagcttggcgccaaggagttcaaggagatcgtgctggaggtgatggaggtgggcggcgtgctcaacgtcggggacttcgtgccggctctccggtggctcgacccgcagggtgttgttgccaggttgaagaaactgcaccgccggttcgacgacatgatgaacgggatcatcgccgagagaagggccggaggtagcacggccggcgaggagaaggaaggtaaggacctgctcggcttgctgctcgccatggtgcaggaagacaagtccctcaccggcggcgaggaggacaggatcacggacacggacgtcaaggcgctcatactgaacttgttcgtggcgggcacggagacgacgtcgacgatagtggagtgggcggtggcggagctgatccggcacccggacatgctgaagcgggcgcaggaggagatggacgccgtcgtgggccgggacaggctcgtctcggagtccgacctgccgcgcctcacgttcctgaacgcggtcatcaaggagaccttccggctgcacccgtcgacgccgctctcgctgccgcggatggcctccgaggagtgcgaggtcgccggctaccgcatccccaagggcacggagctgctggtcaacgtgtggggcatcgcccgcgacccggccctgtggcccgacccgctcgagttccggcccgcccggttcctcccgggagggacccacgccgacgtcgacgtcaaggggggcgacttcgggctgatcccgttcggggccggccggcggatctgcgcgggcctcagctggggcctgcgggtggtcaccgtgacggcggccacgctcgtgcactcgttcgactgggagctgccggcgggccagacgcccgacaagctcaacatggaggaggccttctctctgctgctgcagcgggccgtgccgctgatggcccacccggtgcccaggctgctcccgtcggcgtacgaaattgcataaacaaagacagagggaagcgcgccactgatttgtcgtgatgatctatggaggagaagctccagttgtgctatgtattgttgtcgatgggggtgtgcctcatcgttttcaactaaaatagttccacatgtaacttctgtactgtttttagatatagcatggaaaataacattttatgtatc

SEQ ID NO: 9145 - protein, 531 aa, Triticum aestivum
  misc_feature (1)..(531): Ceres Seq. ID no. 14307981
ISNATMHLVAMDIPLPLLLSTLAVAVTICYVLFFRADKGRAPLPPGPRGWPVLGNLPQLGGKTHQTMHEMSKVYGPVLRLRFGSSVVVVAGSAAVAEQFLRTHDAKFSSRPPNSGGEHMAYNYQDVVFAPYGPRWRAMRKVCAVNLFSARALDDLRGFREREAALMVRSLADAAATGGVVAVGKAANVCTTNALSRAAVGLRVFAAAGAELGAKEFKEIVLEVMEVGGVLNVGDFVPALRWLDPQGVVARLKKLHRRFDDMMNGIIAERRAGGSTAGEEKEGKDLLGLLLAMVQEDKSLTGGEEDRITDTDVKALILNLFVAGTETTSTIVEWAVAELIRHPDMLKRAQEEMDAVVGRDRLVSESDLPRLTFLNAVIKETFRLHPSTPLSLPRMASEECEVAGYRIPKGTELLVNVWGIARDPALWPDPLEFRPARFLPGGTHADVDVKGGDFGLIPFGAGRRICAGLSWGLRVVTVTAATLVHSFDWELPAGQTPDKLNMEEAFSLLLQRAVPLMAHPVPRLLPSAYEIA

SEQ ID NO: 9146 - protein, 526 aa, Triticum aestivum
  misc_feature (1)..(526): Ceres Seq. ID no. 14307982
MHLVAMDIPLPLLLSTLAVAVTICYVLFFRADKGRAPLPPGPRGWPVLGNLPQLGGKTHQTMHEMSKVYGPVLRLRFGSSVVVVAGSAAVAEQFLRTHDAKFSSRPPNSGGEHMAYNYQDVVFAPYGPRWRAMRKVCAVNLFSARALDDLRGFREREAALMVRSLADAAATGGVVAVGKAANVCTTNALSRAAVGLRVFAAAGAELGAKEFKEIVLEVMEVGGVLNVGDFVPALRWLDPQGVVARLKKLHRRFDDMMNGIIAERRAGGSTAGEEKEGKDLLGLLLAMVQEDKSLTGGEEDRITDTDVKALILNLFVAGTETTSTIVEWAVAELIRHPDMLKRAQEEMDAVVGRDRLVSESDLPRLTFLNAVIKETFRLHPSTPLSLPRMASEECEVAGYRIPKGTELLVNVWGIARDPALWPDPLEFRPARFLPGGTHADVDVKGGDFGLIPFGAGRRICAGLSWGLRVVTVTAATLVHSFDWELPAGQTPDKLNMEEAFSLLLQRAVPLMAHPVPRLLPSAYEIA

SEQ ID NO: 9147 - protein, 521 aa, Triticum aestivum
  misc_feature (1)..(521): Ceres Seq. ID no. 14307983
MDIPLPLLLSTLAVAVTICYVLFFRADKGRAPLPPGPRGWPVLGNLPQLGGKTHQTMHEMSKVYGPVLRLRFGSSVVVVAGSAAVAEQFLRTHDAKFSSRPPNSGGEHMAYNYQDVVFAPYGPRWRAMRKVCAVNLFSARALDDLRGFREREAALMVRSLADAAATGGVVAVGKAANVCTTNALSRAAVGLRVFAAAGAELGAKEFKEIVLEVMEVGGVLNVGDFVPALRWLDPQGVVARLKKLHRRFDDMMNGIIAERRAGGSTAGEEKEGKDLLGLLLAMVQEDKSLTGGEEDRITDTDVKALILNLFVAGTETTSTIVEWAVAELIRHPDMLKRAQEEMDAVVGRDRLVSESDLPRLTFLNAVIKETFRLHPSTPLSLPRMASEECEVAGYRIPKGTELLVNVWGIARDPALWPDPLEFRPARFLPGGTHADVDVKGGDFGLIPFGAGRRICAGLSWGLRVVTVTAATLVHSFDWELPAGQTPDKLNMEEAFSLLLQRAVPLMAHPVPRLLPSAYEIA

SEQ ID NO: 9148 - protein, 521 aa, Triticum aestivum; identical to SEQ ID NO: 9147
  misc_feature (1)..(521): Ceres Seq. ID no. 16625473

SEQ ID NO: 9149 - DNA, 1885 bp, Triticum aestivum
  misc_feature (1)..(1885): Ceres Seq. ID no. 14308011
agggacagaccagaacaacccaaccgcacccgttccagagcgcgatcacacaacagagcggtaacagtttcccgggcagttcccgccccggccggcgccatggacttcgtcttcgtggagaagctcctcgcgggcctcctcgcggccgtggtgggcgccatcgtggtgtccaagatccggggccgcaagctgaggctgccgccgggccccttcccggtccccatcttcggcaactggctgcaggtcggcgacgacctgaaccaccgcaacctggcggcgatggcccgcaagttcggcgaggtcttcctcctccgcatgggccagcgcaacctggtggtggtctcctctccgccgctcgcccgcgaggtgctccacacgcagggcgtggagttcgggtcccgcacccgcaacgtggtgttcgacatcttcacgggcgagggccaagacatggtgttcaccgtgtacggtgaccactggcgcaagatgcggcgcatcatgacggtgcccttcttcaccaacaaggtggtgcagcagtaccggcccgggtgggaggccgaggcggccttcgtcatcgacaacgtccgcgccgaccccagggccgccacagagggcgtcgtgctccgccgccacctgcagctcatgatgtacaacaacatgtaccgcatcatgttcgaccggcggttcgagagcatggacgacccgctgttcctccggctccgggcgctcaacggcgagcgcagccgcctcgcgcaaagcttcgagtacaactacggcgacttcatccccatcctccgccccttcctccgcggctacctcaggctctgcaaggaggtcaaggagacccgcctcaagctcttcaaggattacttcctggacgagaggaagaagctggtgagcaccaaggccatggacaacaacggtgggctcaagtgcgccattgatcacatcctggaggctgagcagaagggggagatcaacgaggacaacgtcctctacatcatcgagaacatcaacgtcgcagcgatcgagacgacgctgtggtcgatcgagtgggggctggcagagctggtgaaccacccggagatccagcagaagcttcgcgacgaaatggacgcggtgctgggcgcggggcaccagatcacggagccggagacgcacaagctcccctacctgcaggcggtgatcaaggagacgctccggctgcgcatggccatcccgctgctggtgccccacatgaacctccacgacgccaagctcgccggctacaacatccccgccgagagcaagatcctcgtcaacgcctggttcctcgccaacaacccggagcagtggaagcggcccgacgagttccggccggagcgcttcctggaggaggagaagcacgtggaggccaacggcaacgacttcaggtacctgcccttcggcgtcggccgccggagctgccccggcatcatcctcgcgctgcccatcctcggcatcaccatcggccgcctcgtccagaacttcgtgctcacgccgccgcccggccaggacaagctcgacaccacggagaagggcggccagttcagcctccacatcctcaagcactccaccatcgtcgccaagcccagagtgttctagagcagcgacgtacgtgctctggagtttggacttccagcattttggtttggtggtgttgtactttcacgattgttcgctcgtcctaagtatacttgattatagtatccgtcacagagtagacacacgtttcgttaatgttatccgcaagaaaacagaggagctgaagaaatgtcgaacggggaggaaaagactggacgatttccgtcagatgtactcctgatgctgccataaattaaatcctcaaaatattgatgattttttcacg

SEQ ID NO: 9150 - protein, 539 aa, Triticum aestivum
  misc_feature (1)..(539): Ceres Seq. ID no. 14308012
RDRPEQPNRTRSRARSHNRAVTVSRAVPAPAGAMDFVFVEKLLAGLLAAVVGAIVVSKIRGRKLRLPPGPFPVPIFGNWLQVGDDLNHRNLAAMARKFGEVFLLRMGQRNLVVVSSPPLAREVLHTQGVEFGSRTRNVVFDIFTGEGQDMVFTVYGDHWRKMRRIMTVPFFTNKVVQQYRPGWEAEAAFVIDNVRADPRAATEGVVLRRHLQLMMYNNMYRIMFDRRFESMDDPLFLRLRALNGERSRLAQSFEYNYGDFIPILRPFLRGYLRLCKEVKETRLKLFKDYFLDERKKLVSTKAMDNNGGLKCAIDHILEAEQKGEINEDNVLYIIENINVAAIETTLWSIEWGLAELVNHPEIQQKLRDEMDAVLGAGHQITEPETHKLPYLQAVIKETLRLRMAIPLLVPHMNLHDAKLAGYNIPAESKILVNAWFLANNPEQWKRPDEFRPERFLEEEKHVEANGNDFRYLPFGVGRRSCPGIILALPILGITIGRLVQNFVLTPPPGQDKLDTTEKGGQFSLHILKHSTIVAKPRVF

SEQ ID NO: 9151 - protein, 506 aa, Triticum aestivum
  misc_feature (1)..(506): Ceres Seq. ID no. 14308013
MDFVFVEKLLAGLLAAVVGAIVVSKIRGRKLRLPPGPFPVPIFGNWLQVGDDLNHRNLAAMARKFGEVFLLRMGQRNLVVVSSPPLAREVLHTQGVEFGSRTRNVVFDIFTGEGQDMVFTVYGDHWRKMRRIMTVPFFTNKVVQQYRPGWEAEAAFVIDNVRADPRAATEGVVLRRHLQLMMYNNMYRIMFDRRFESMDDPLFLRLRALNGERSRLAQSFEYNYGDFIPILRPFLRGYLRLCKEVKETRLKLFKDYFLDERKKLVSTKAMDNNGGLKCAIDHILEAEQKGEINEDNVLYIIENINVAAIETTLWSIEWGLAELVNHPEIQQKLRDEMDAVLGAGHQITEPETHKLPYLQAVIKETLRLRMAIPLLVPHMNLHDAKLAGYNIPAESKILVNAWFLANNPEQWKRPDEFRPERFLEEEKHVEANGNDFRYLPFGVGRRSCPGIILALPILGITIGRLVQNFVLTPPPGQDKLDTTEKGGQFSLHILKHSTIVAKPRVF

SEQ ID NO: 9152 - protein, 446 aa, Triticum aestivum
  misc_feature (1)..(446): Ceres Seq. ID no. 14308014
MARKFGEVFLLRMGQRNLVVVSSPPLAREVLHTQGVEFGSRTRNVVFDIFTGEGQDMVFTVYGDHWRKMRRIMTVPFFTNKVVQQYRPGWEAEAAFVIDNVRADPRAATEGVVLRRHLQLMMYNNMYRIMFDRRFESMDDPLFLRLRALNGERSRLAQSFEYNYGDFIPILRPFLRGYLRLCKEVKETRLKLFKDYFLDERKKLVSTKAMDNNGGLKCAIDHILEAEQKGEINEDNVLYIIENINVAAIETTLWSIEWGLAELVNHPEIQQKLRDEMDAVLGAGHQITEPETHKLPYLQAVIKETLRLRMAIPLLVPHMNLHDAKLAGYNIPAESKILVNAWFLANNPEQWKRPDEFRPERFLEEEKHVEANGNDFRYLPFGVGRRSCPGIILALPILGITIGRLVQNFVLTPPPGQDKLDTTEKGGQFSLHILKHSTIVAKPRVF

SEQ ID NO: 9153 - protein, 506 aa, Triticum aestivum; identical to SEQ ID NO: 9151
  misc_feature (1)..(506): Ceres Seq. ID no. 16625474

SEQ ID NO: 9154 - DNA, 1632 bp, Triticum aestivum
  misc_feature (1)..(1632): Ceres Seq. ID no. 14308041
atcgatccaagctgccatggccgcggttctcccgatctgcctgcttctcgtgcttctcctcgccatcccgctcatcctcttcaagtccaggcgcccggcgcctcatcgtggccccggtggcagggccgtgcggctcccgccagggccatgggcgctcccggtcatcggtcacctgcaccatctcgccggcgcccttccgcaccgtgctctgcgcgacctcgcgcggcgccacggcccgctcatgatgctccgcctcggcgagctcgacgccgtggtcgcgtcgtcccctgacgccgcgcgcgagatcatgaagacccacgacgcttccttcgcgtccaggcctctgacgtcgatgcagcagatggcgtacggcgacgccgagggcctcatcttcgcgccctacggcgacgcatggcggcagcttcgcaagatatgcactgtcgagatcttcagctcccgccgcgtccagtccttccgccccgcccgcgaggaggagctcggtcacctcctccgctccgtcgcggcggcttctgcctcgtcttcgccggtgaacctgagcgagcgcatatcggcgtacgtcgcggattctacggtgcgcgccatcgtcggcagccggttcaagcagagggacacgtacctggagatgctgcaagagggactcaaaatcgtgcccgggatgacccttcccgacattttcccctcctcgcgtctcgtgcggctccttagcagcgtccccggcaggatacagcgccatagccaagacatgaagctgttcatggacaccatcatccaagagcaccaggtgaacagcggccccgactgcgacggcgacaaagaagaagacttgctcgacgtgctcctgagactccaaaaggaaggggactcgcagtatccactcaccactgacaacatcaagaccgtcatgctggacatgtttggcgccggcagcgagacgtcggcgacgacgctgcagtgggcgatggcggagctgatacggaacccgcgggttatgcggaaggcgcaagacgaggtccggcagcaactcgccgggcacgacaaggtgagggaggccgacctggcagatctgcgataccttgggtttgtcatcaaggagacgctgaggatgcacccgccggcgccattgctgctgccgcgtaggtgcgggagcccgtgtcaggttctgggcctggacgtgccggagggggtcatggtgatcgtgaacgcgtgggcgatcggcatggacccggcgcactgggaggcacccgaggagttcgcaccggagcggttcgagcagaacgggagggacttcaagggggcggacttcgagttcgtgccgttcggcggcgggaggaggatatgccccggcatggctttcgggctggcgcacgtggagctcgcgctcgcggcgctgctgttccacttcgactgggagctgccaggcggggcggcggccgaggatctggacatgaccgaggagtttggcgtcacggcacggctccggtctgaccttgtcgtggtcgccgtggccacggagtaaacgcacttttggtgatgtgcatcctatatttgtttttttgaggtgacctatatttgttgatcctgtgcaagttgattagcccatcaccgtggcgt

SEQ ID NO: 9155 - protein, 511 aa, Triticum aestivum
  misc_feature (1)..(511): Ceres Seq. ID no. 14308042
SIQAAMAAVLPICLLLVLLLAIPLILFKSRRPAPHRGPGGRAVRLPPGPWALPVIGHLHHLAGALPHRALRDLARRHGPLMMLRLGELDAVVASSPDAAREIMKTHDASFASRPLTSMQQMAYGDAEGLIFAPYGDAWRQLRKICTVEIFSSRRVQSFRPAREEELGHLLRSVAAASASSSPVNLSERISAYVADSTVRAIVGSRFKQRDTYLEMLQEGLKIVPGMTLPDIFPSSRLVRLLSSVPGRIQRHSQDMKLFMDTIIQEHQVNSGPDCDGDKEEDLLDVLLRLQKEGDSQYPLTTDNIKTVMLDMFGAGSETSATTLQWAMAELIRNPRVMRKAQDEVRQQLAGHDKVREADLADLRYLGFVIKETLRMHPPAPLLLPRRCGSPCQVLGLDVPEGVMVIVNAWAIGMDPAHWEAPEEFAPERFEQNGRDFKGADFEFVPFGGGRRICPGMAFGLAHVELALAALLFHFDWELPGGAAAEDLDMTEEFGVTARLRSDLVVVAVATE

SEQ ID NO: 9156 - protein, 506 aa, Triticum aestivum
  misc_feature (1)..(506): Ceres Seq. ID no. 14308043
MAAVLPICLLLVLLLAIPLILFKSRRPAPHRGPGGRAVRLPPGPWALPVIGHLHHLAGALPHRALRDLARRHGPLMMLRLGELDAVVASSPDAAREIMKTHDASFASRPLTSMQQMAYGDAEGLIFAPYGDAWRQLRKICTVEIFSSRRVQSFRPAREEELGHLLRSVAAASASSSPVNLSERISAYVADSTVRAIVGSRFKQRDTYLEMLQEGLKIVPGMTLPDIFPSSRLVRLLSSVPGRIQRHSQDMKLFMDTIIQEHQVNSGPDCDGDKEEDLLDVLLRLQKEGDSQYPLTTDNIKTVMLDMFGAGSETSATTLQWAMAELIRNPRVMRKAQDEVRQQLAGHDKVREADLADLRYLGFVIKETLRMHPPAPLLLPRRCGSPCQVLGLDVPEGVMVIVNAWAIGMDPAHWEAPEEFAPERFEQNGRDFKGADFEFVPFGGGRRICPGMAFGLAHVELALAALLFHFDWELPGGAAAEDLDMTEEFGVTARLRSDLVVVAVATE

SEQ ID NO: 9157 - protein, 431 aa, Triticum aestivum
  misc_feature (1)..(431): Ceres Seq. ID no. 14308044
MMLRLGELDAVVASSPDAAREIMKTHDASFASRPLTSMQQMAYGDAEGLIFAPYGDAWRQLRKICTVEIFSSRRVQSFRPAREEELGHLLRSVAAASASSSPVNLSERISAYVADSTVRAIVGSRFKQRDTYLEMLQEGLKIVPGMTLPDIFPSSRLVRLLSSVPGRIQRHSQDMKLFMDTIIQEHQVNSGPDCDGDKEEDLLDVLLRLQKEGDSQYPLTTDNIKTVMLDMFGAGSETSATTLQWAMAELIRNPRVMRKAQDEVRQQLAGHDKVREADLADLRYLGFVIKETLRMHPPAPLLLPRRCGSPCQVLGLDVPEGVMVIVNAWAIGMDPAHWEAPEEFAPERFEQNGRDFKGADFEFVPFGGGRRICPGMAFGLAHVELALAALLFHFDWELPGGAAAEDLDMTEEFGVTARLRSDLVVVAVATE

SEQ ID NO: 9158 - protein, 431 aa, Triticum aestivum; identical to SEQ ID NO: 9157
  misc_feature (1)..(431): Ceres Seq. ID no. 16625475

SEQ ID NO: 9159 - DNA, 1655 bp, Triticum aestivum
  misc_feature (1)..(1655): Ceres Seq. ID no. 14308045
acccgatgcgcctggctggctttcgattgatcacacgagacatgtagaaaccacatgcgtttccaacctagttagatagaaggatggacgccttggcggggctctcggcctttgccgcggtggcgctgccgctcctcctgctgtacagcgtgcaccggtggaggaaccctcggtgcaacggccggctcccgccggggtccatgggcctcccgctcgtcggcgagacgttccagttcttctccccggacgcctccttggacgtccctcgcttcatccgagacaggctcacgaggtacggcccgatcttcaagacgagcgtggtggggcacccggtggtggtgtcggcggacgaggagctgaaccacatggtgttccagcaggagggggagctgttccagagctggtacccggactcgttcgtggagatcctcggccgcgacaacgtcggggagcagaagggcaccatgttcaagtacctcaagaacatggtgctcaggttcttcggcccggagagcctcaaggagtccatcctccgcgacgtccagcgcgccgtctgcagctcgctctgcacctggtccaccctgccggccgtcgacttcaaagaagccgtctccaccatggtgtttgaactttcggcgagcaagctgctcggcctggagccgtcgaggtccaaggttctacggaagagcttcttcgacttcgttctagggctcatctccttcccgctctacctgccaggaacagcctactacgcatgcatgcagggacggatgagtgtaatggaggtgctgcagcaggtgttggaggagaggacgagatcagctgaggcggccggaggaggggaagcacggtgccacggcgacttcctggactacgtcgtccaggagatcaccaaggagaagccggtcctgacggagggaatggcgctggacctcctgtttgtgctcctcttcgccagcttccacaccacgtcgctggccatcaccctggccgtcaagctcctcaccgacaaccctcgcgtcctggaggaactcacggtggagcatgaaacgattctgaacgagcgtgaggcaggcggtgagactgatggcgacagacttacatggaaagagtacaaatccatgacattcacatcccaggtgataaacgagacggtccgactggccaacattgcgcctggcatcttcagaaagacactgaaagatgtacagttcagagtctacacaattccagctggatggggagtgatggtctgccctctcgcggtgcacctgaatccagatatttaccctgaccccctcaccttcaatccttcaaggtttaaggataaactagaggcaaaccgtgggtcaagacacttcatggctttcggaggaggtctccggtcctgtgttggagcagacttcagcaagctacaaatggccattttccttcactttcttgtcaccaaatataggtggatacaactaggtggaggcaagatagtccggtgtccagggctggaatttcctgatggttacctcattcagattagacagagagactaatcaacacctgctttcaagtcatgctagcagtaggaaaagcttatatcacacgtgtacaattgttctagcatgttgtttgatgaaataacagttgtgcagaagtattat

SEQ ID NO: 9160 - protein, 487 aa, Triticum aestivum
  misc_feature (1)..(487): Ceres Seq. ID no. 14308046
MDALAGLSAFAAVALPLLLLYSVHRWRNPRCNGRLPPGSMGLPLVGETFQFFSPDASLDVPRFIRDRLTRYGPIFKTSVVGHPVVVSADEELNHMVFQQEGELFQSWYPDSFVEILGRDNVGEQKGTMFKYLKNMVLRFFGPESLKESILRDVQRAVCSSLCTWSTLPAVDFKEAVSTMVFELSASKLLGLEPSRSKVLRKSFFDFVLGLISFPLYLPGTAYYACMQGRMSVMEVLQQVLEERTRSAEAAGGGEARCHGDFLDYVVQEITKEKPVLTEGMALDLLFVLLFASFHTTSLAITLAVKLLTDNPRVLEELTVEHETILNEREAGGETDGDRLTWKEYKSMTFTSQVINETVRLANIAPGIFRKTLKDVQFRVYTIPAGWGVMVCPLAVHLNPDIYPDPLTFNPSRFKDKLEANRGSRHFMAFGGGLRSCVGADFSKLQMAIFLHFLVTKYRWIQLGGGKIVRCPGLEFPDGYLIQIRQRD

SEQ ID NO: 9161 - protein, 448 aa, Triticum aestivum
  misc_feature (1)..(448): Ceres Seq. ID no. 14308047
MGLPLVGETFQFFSPDASLDVPRFIRDRLTRYGPIFKTSVVGHPVVVSADEELNHMVFQQEGELFQSWYPDSFVEILGRDNVGEQKGTMFKYLKNMVLRFFGPESLKESILRDVQRAVCSSLCTWSTLPAVDFKEAVSTMVFELSASKLLGLEPSRSKVLRKSFFDFVLGLISFPLYLPGTAYYACMQGRMSVMEVLQQVLEERTRSAEAAGGGEARCHGDFLDYVVQEITKEKPVLTEGMALDLLFVLLFASFHTTSLAITLAVKLLTDNPRVLEELTVEHETILNEREAGGETDGDRLTWKEYKSMTFTSQVINETVRLANIAPGIFRKTLKDVQFRVYTIPAGWGVMVCPLAVHLNPDIYPDPLTFNPSRFKDKLEANRGSRHFMAFGGGLRSCVGADFSKLQMAIFLHFLVTKYRWIQLGGGKIVRCPGLEFPDGYLIQIRQRD

SEQ ID NO: 9162 - protein, 393 aa, Triticum aestivum
  misc_feature (1)..(393): Ceres Seq. ID no. 14308048
MVFQQEGELFQSWYPDSFVEILGRDNVGEQKGTMFKYLKNMVLRFFGPESLKESILRDVQRAVCSSLCTWSTLPAVDFKEAVSTMVFELSASKLLGLEPSRSKVLRKSFFDFVLGLISFPLYLPGTAYYACMQGRMSVMEVLQQVLEERTRSAEAAGGGEARCHGDFLDYVVQEITKEKPVLTEGMALDLLFVLLFASFHTTSLAITLAVKLLTDNPRVLEELTVEHETILNEREAGGETDGDRLTWKEYKSMTFTSQVINETVRLANIAPGIFRKTLKDVQFRVYTIPAGWGVMVCPLAVHLNPDIYPDPLTFNPSRFKDKLEANRGSRHFMAFGGGLRSCVGADFSKLQMAIFLHFLVTKYRWIQLGGGKIVRCPGLEFPDGYLIQIRQRD

SEQ ID NO: 9163 - protein, 487 aa, Triticum aestivum; identical to SEQ ID NO: 9160
  misc_feature (1)..(487): Ceres Seq. ID no. 16625476

SEQ ID NO: 9164 - DNA, 1681 bp, Triticum aestivum
  misc_feature (1)..(1681): Ceres Seq. ID no. 15169501
acttctccaccgtgactgcgactgccactgcgactgcgactgctctctcctgactggagtcagtgtctcgggtgctgctgacccgccgtcttctccgcttgccgtgccgccatcgccatggatggggtttcgacggagcctcgccacccgctcctgcaggccgttctcgacggcgacctccgcctcctcaaagagatggcgggcgtcgtggcggcggacgtcggcatcagggcgcgcgcgctgactgtggcggtcatggaagggcggctggacatctgtaggtgcctcgtcgaggaccacggcgtcgatgtcaaccagcgcaccttcacaggtgacactcctctggccatttctacgacttatgggacgcctgctaccaccagatatcttctggatcgtggtgctgatccaactttagctggtgccctgtggccacctcttcatgctgctgcaatttttggacaatgtgagatagtggaattgctgctttcaactggaattgatgtggatcatttcgattctgtgtatgggaccgcattgcatgttgccgctactaatggtcaagatggctcgatgaatattttgttgcagcatcatgcagatcccaataaggttttccgccttgatagtaccccgttaaggctggccatgatttctgaatcactggaatgtgtgaagctactcattaaggctggcgctgatgtgaataaaattgactatactggtgttacttacttgatgatagcagcgggcaatggcttatctgataccctgaaatgcttactagatgctggcgctaacccagatattgatgatgggtttggtacaactccaatcgaaattgccgccctccaagccagatgggatatggttgcgatgttatttcctttaacttctcccatttcaagattgccggattggagtgttgatggaattatttctcatgtgcaatctttcggtttgaagccgagggatatacatctatgtgaagcgaaaagagctgaactaaagttgcaagctacagaggcttttaagagaaaggaatatatcatagcaggagacctatatacttgtgcaatgagttttcagcctagtccaaaaggtcttgcaaacctgctagcacataggagtttctgtatgttgcacgcgggaataggaaaagaggctctctccgactctgctaggtgcacagtgctacgacctctttggcccaaaggttactatcgactaggagcagcctttatgttgctacaggactatggaaaagcagctcagacgttcgaagctggcttgaaactggaccctacaaatgcggatatggcaaacgctttaagggaagcccaagagacggcgaggaatcctcctcgcaccaggggggctggagtgccttcacccatttggaatgagacgttcctggagtgattgaggcgctgtttcgttgctatgtccagtccagggtatgcatgcctgcctgttattctcttttcctatgtccagtccaaggtatgcgtgcctgttattctctggagagactgagactctgtttcgttgcttaagactctgttttgtgttgaaccgtccaagagtactgatctcatgtgctatattgtagaccgtgtaaacatggctatctgtacattgtggttatatgtcgtctccgtgaaccattgtggttatatac

SEQ ID NO: 9165 - protein, 434 aa, Triticum aestivum
  misc_feature (1)..(434): Ceres Seq. ID no. 15169502
MDGVSTEPRHPLLQAVLDGDLRLLKEMAGVVAADVGIRARALTVAVMEGRLDICRCLVEDHGVDVNQRTFTGDTPLAISTTYGTPATTRYLLDRGADPTLAGALWPPLHAAAIFGQCEIVELLLSTGIDVDHFDSVYGTALHVAATNGQDGSMNILLQHHADPNKVFRLDSTPLRLAMISESLECVKLLIKAGADVNKIDYTGVTYLMIAAGNGLSDTLKCLLDAGANPDIDDGFGTTPIEIAALQARWDMVAMLFPLTSPISRLPDWSVDGIISHVQSFGLKPRDIHLCEAKRAELKLQATEAFKRKEYIIAGDLYTCAMSFQPSPKGLANLLAHRSFCMLHAGIGKEALSDSARCTVLRPLWPKGYYRLGAAFMLLQDYGKAAQTFEAGLKLDPTNADMANALREAQETARNPPRTRGAGVPSPIWNETFLE

SEQ ID NO: 9166 - protein, 408 aa, Triticum aestivum
  misc_feature (1)..(408): Ceres Seq. ID no. 15169503
MAGVVAADVGIRARALTVAVMEGRLDICRCLVEDHGVDVNQRTFTGDTPLAISTTYGTPATTRYLLDRGADPTLAGALWPPLHAAAIFGQCEIVELLLSTGIDVDHFDSVYGTALHVAATNGQDGSMNILLQHHADPNKVFRLDSTPLRLAMISESLECVKLLIKAGADVNKIDYTGVTYLMIAAGNGLSDTLKCLLDAGANPDIDDGFGTTPIEIAALQARWDMVAMLFPLTSPISRLPDWSVDGIISHVQSFGLKPRDIHLCEAKRAELKLQATEAFKRKEYIIAGDLYTCAMSFQPSPKGLANLLAHRSFCMLHAGIGKEALSDSARCTVLRPLWPKGYYRLGAAFMLLQDYGKAAQTFEAGLKLDPTNADMANALREAQETARNPPRTRGAGVPSPIWNETFLE

SEQ ID NO: 9167 - protein, 388 aa, Triticum aestivum
  misc_feature (1)..(388): Ceres Seq. ID no. 15169504
MEGRLDICRCLVEDHGVDVNQRTFTGDTPLAISTTYGTPATTRYLLDRGADPTLAGALWPPLHAAAIFGQCEIVELLLSTGIDVDHFDSVYGTALHVAATNGQDGSMNILLQHHADPNKVFRLDSTPLRLAMISESLECVKLLIKAGADVNKIDYTGVTYLMIAAGNGLSDTLKCLLDAGANPDIDDGFGTTPIEIAALQARWDMVAMLFPLTSPISRLPDWSVDGIISHVQSFGLKPRDIHLCEAKRAELKLQATEAFKRKEYIIAGDLYTCAMSFQPSPKGLANLLAHRSFCMLHAGIGKEALSDSARCTVLRPLWPKGYYRLGAAFMLLQDYGKAAQTFEAGLKLDPTNADMANALREAQETARNPPRTRGAGVPSPIWNETFLE

SEQ ID NO: 9168 - protein, 434 aa, Triticum aestivum; identical to SEQ ID NO: 9165
  misc_feature (1)..(434): Ceres Seq. ID no. 16612025

SEQ ID NO: 9169 - DNA, 1328 bp, Triticum aestivum
  misc_feature (1)..(1328): Ceres Seq. ID no. 15169505
accatcacaaacagatgatgaagctgctgctctcccagcatcttcccaatcaccagatggacctatgagagccagcacaagcaactgttggctgttgctggctaccaccaccaccgaactctcaagccaacctccatcaccatttggctttgccctgtaattccaagagcgccaaaccaagatctcagctgccaacaccaccaaagctgatccatggacctgtcggcgaacccggacagccctctgtctggagggggcaacggtggcggctcctcgagcagcatcacctcctcgctttccgtggcctcagggggcactccgcagtcgccgagcaggtacgaggcgcagaagcggcgcgactggaacacgttcgggcagtacctgcggaaccaccggccgccgctgagcctggctcagtgcagcggggcgcacgtcctggagttcctgcgctaccttgaccagttcggcaagaccaaggtgcacgcctcggcctgccccttcttcggccacccgagcccgccggcaccctgcccgtgcccgctccgtcaggcctggggcagcctggacgccctcgtcggccgcctccgcgccgcctacgaggagaacggcggcagccccgagtccaaccccttcgctgcgcgcgccgtccgcctctaccttcgcgaggtccgcgagcaccaggcccgcgcccgcggcgtcagctacgagaagaagaagcgcaagaagccgcagcagctggccggcgacagcagcagcggcagcttccatggcaaccagcaccagccccctcccggcccgcctcccgccgccggttgctgagctgatcgaggcgacgacgacgacccgcccccagccggtggtcgatcgaacgatctcctatttggccggtatgccagatatattttatgtgcgctcgcgtatgcatgcatgcgcacgcatggttatggctttgcacttctcatttgtgcgtgtgtgtatcagctagtactgtcagttgtcgtcgtcgaacactgctgcattgctcgtgtttcgacctagttggctttgattagcttgggttaagttctagtcgagtttatcactagtttaatttccttccatgtaggatcgagtcaagtaaaatgatttgctgtagtgtgaagtgaagtgagggggacatgcatgcagggagagagagagataaatgtatggagatctctcttgctacagctagctgcatgtgtgtgtgtgtgtgtgtggttcgtgcaagattgtaagtctgtagtgcagtgtccgttctgcggtctgcgcatcatgtgtcaactcgatctagcatcgcttattgtttc

SEQ ID NO: 9170 - protein, 201 aa, Triticum aestivum
  misc_feature (1)..(201): Ceres Seq. ID no. 15169506
MDLSANPDSPLSGGGNGGGSSSSITSSLSVASGGTPQSPSRYEAQKRRDWNTFGQYLRNHRPPLSLAQCSGAHVLEFLRYLDQFGKTKVHASACPFFGHPSPPAPCPCPLRQAWGSLDALVGRLRAAYEENGGSPESNPFAARAVRLYLREVREHQARARGVSYEKKKRKKPQQLAGDSSSGSFHGNQHQPPPGPPPAAGC

SEQ ID NO: 9171 - protein, 201 aa, Triticum aestivum; identical to SEQ ID NO: 9170
  misc_feature (1)..(201): Ceres Seq. ID no. 16625530

SEQ ID NO: 9172 - DNA, 2061 bp, Triticum aestivum
  misc_feature (1)..(2061): Ceres Seq. ID no. 15169557
atcgtaggcccggcgcttcccccctcattctgttgtgcccaggatccttcgcgcctgctgcgatctggattcggatgatcaatcgagcagcttttcgtccggttcttcctggatgatcctctatctggttggggatttttcttcgatcggcttgtcctcttaagagaaagaacgctgcaatttctttgacacacatctccaagttcatcattctctgtctctgctcaaccaataatacagacttcagtcacacataaagaaatgggtcacaccattggagttgcagatgatgaaatagcagacataccatgttcagatgcttcaccaattctgaccgaatatcacatcacagtccctacccttcacgatggactaatgcaaggggcagaccagcacgagagacggcttctggatgtcctcaaagcaacgccttcagtgcaatggctgaaggacatcaacgtctgcggtccactgggaaaaattcagctgccatcgatcggcgtccaccgctacctccatgtccacttcatcagaacagtcgactggagctcactgctcgccatctgcaagaaccacctcaagcatcctctcaacatcgccctactcatctggctgctatgcgtcgccgccgccggcgccatgctaggactgctcctgttggggctgctgaacaaggcattcccttccagggccttgaggcaccactggatagagatcgacaaccagatcctcaacgccctcttcacgctcatgagcatctaccagcatcccatcctcgtccaccacctcgttctcctctgccggtggcggccggaggacgccgcccagctaaggaaggtgtactgcaagaatggcgcccgccgtcccaacgagcgagcgcacatgtccttcgtggtggccctcctccacgtcacctgcatctcgcagtacatggagtgcagcctctactggggctacccaagcaggtcgcgctccgagctcgcggagaacttcttcttcatcctcggcgtcgccgcgccggtcgtcgccggcgctcacgcggtgtacagccctctaggcagagacgacgacgccgccgccgcctcctgcgaagagaccaagcagctccacgcagccggagccgaagaatcgccggaagaaatgacggtggtcggcaacccgatgtgggcgggggagctgctggactgcggcgaggacccggcggcgtgctacctgtcgttcctctgcaccttctgcgtgttcggctggaacatggagcggctggggctgggcaacatgtacatgcacacggccatgttcctgctgctgtgcgtcgcgcccttctgggtgttcaacgtcacggcgctcagcatccacgactacgccctcagcgatgccttcggcgccgccggggtggtgctctgcttcctcgggctcctgtacgggggcttctggaggatgcagatgaggaagcggctcgggctgccccggagcaggtggtgctgcggctcgtcgtcgctgacggactacgcgcagtggctcctctgctggccgtgcgcgctcgcgcaggaggtgcgcacggcgaacctgtacgacccgaggggcgacggcggtttctacgggaagctggtggacggcggtgacccggagcgagggccggacgtgccggtctccgctgaagtgcaggaggtggtcggcggtgttgtcaatccgacggtggacggcgagatgatcccgcccgtgcagccggtggtggagtctggacggcagaggcaagccggccacgaagaaattgttgcaaatggcagtagcgtccagctcaaaagttgaccgcagctgttggatggtgactgatgctgtagagtattcgcaagctgacggatatattcttcctttttgggggatcgatgtcaccattttgacattgttatgctcctggtttgtcatgctctgcacgggactttaggtcgttataagtcattagttagtccagttttattcagatcagctaccttgacactccaacagatgtcatctttcatcgattcttttcgtattgcacgttactggaagaagaagaac

SEQ ID NO: 9173 - protein, 515 aa, Triticum aestivum
  misc_feature (1)..(515): Ceres Seq. ID no. 15169558
MGHTIGVADDEIADIPCSDASPILTEYHITVPTLHDGLMQGADQHERRLLDVLKATPSVQWLKDINVCGPLGKIQLPSIGVHRYLHVHFIRTVDWSSLLAICKNHLKHPLNIALLIWLLCVAAAGAMLGLLLLGLLNKAFPSRALRHHWIEIDNQILNALFTLMSIYQHPILVHHLVLLCRWRPEDAAQLRKVYCKNGARRPNERAHMSFVVALLHVTCISQYMECSLYWGYPSRSRSELAENFFFILGVAAPVVAGAHAVYSPLGRDDDAAAASCEETKQLHAAGAEESPEEMTVVGNPMWAGELLDCGEDPAACYLSFLCTFCVFGWNMERLGLGNMYMHTAMFLLLCVAPFWVFNVTALSIHDYALSDAFGAAGVVLCFLGLLYGGFWRMQMRKRLGLPRSRWCCGSSSLTDYAQWLLCWPCALAQEVRTANLYDPRGDGGFYGKLVDGGDPERGPDVPVSAEVQEVVGGVVNPTVDGEMIPPVQPVVESGRQRQAGHEEIVANGSSVQLKS

SEQ ID NO: 9174 - protein, 477 aa, Triticum aestivum
  misc_feature (1)..(477): Ceres Seq. ID no. 15169559
MQGADQHERRLLDVLKATPSVQWLKDINVCGPLGKIQLPSIGVHRYLHVHFIRTVDWSSLLAICKNHLKHPLNIALLIWLLCVAAAGAMLGLLLLGLLNKAFPSRALRHHWIEIDNQILNALFTLMSIYQHPILVHHLVLLCRWRPEDAAQLRKVYCKNGARRPNERAHMSFVVALLHVTCISQYMECSLYWGYPSRSRSELAENFFFILGVAAPVVAGAHAVYSPLGRDDDAAAASCEETKQLHAAGAEESPEEMTVVGNPMWAGELLDCGEDPAACYLSFLCTFCVFGWNMERLGLGNMYMHTAMFLLLCVAPFWVFNVTALSIHDYALSDAFGAAGVVLCFLGLLYGGFWRMQMRKRLGLPRSRWCCGSSSLTDYAQWLLCWPCALAQEVRTANLYDPRGDGGFYGKLVDGGDPERGPDVPVSAEVQEVVGGVVNPTVDGEMIPPVQPVVESGRQRQAGHEEIVANGSSVQLKS

SEQ ID NO: 9175 - protein, 437 aa, Triticum aestivum
  misc_feature (1)..(437): Ceres Seq. ID no. 15169560
MFRCFTNSDRISHHSPYPSRWTNARGRPARETASGCPQSNAFSAMAEGHQRLRSTGKNSAAIDRRPPLPPCPLHQNSRLELTARHLQEPPQASSQHRPTHLAAMRRRRRRHARTAPVGAAEQGIPFQGLEAPLDRDRQPDPQRPLHAHEHLPASHPRPPPRSPLPVAAGGRRPAKEGVLQEWRPPSQRASAHVLRGGPPPRHLHLAVHGVQPLLGLPKQVALRARGELLLHPRRRRAGRRRRSRGVQPSRQRRRRRRRLLRRDQAAPRSRSRRIAGRNDGGRQPDVGGGAAGLRRGPGGVLPVVPLHLLRVRLEHGAAGAGQHVHAHGHVPAAVRRALLGVQRHGAQHPRLRPQRCLRRRRGGALLPRAPVRGLLEDADEEAARAAPEQVVLRLVVADGLRAVAPLLAVRARAGGAHGEPVRPEGRRRFLREAGGRR

SEQ ID NO: 9176 - protein, 515 aa, Triticum aestivum; identical to SEQ ID NO: 9173
  misc_feature (1)..(515): Ceres Seq. ID no. 16625531

SEQ ID NO: 9177 - DNA, 1754 bp, Triticum aestivum
  misc_feature (1)..(1754): Ceres Seq. ID no. 15169595
aacgttctctagtctccattccccaactccacaccaccattggcgcgctccaccgcgaccttaagtgtgtacggtgcaagagagctggcgaaaatggcgttcgtctccttcctcgagctctcgctctccttgctctgcttcgtcgtcttctactacttccacgccaggtccaagcggaagaacccggtgatcccgctggagtggccgctggtgggcatgctcccggcgctcctcgccaacctcccgcgcctccacgactgggtcacctccctgctcaccgccagcccgctcaacttccgcttcgtcggcccgccgcgctccggcatggagctcttcctcacctccgatccggccaacgtccgccacgttttcacctccaacttcgccaactaccccaagggccccgagttcgccgagatcatggacatcctcggcggcggcatcttcaacgccgacggcgactcctggcgccgccagcgcgccaaggcgcagcttctcatgtccggcccccggttccgggccttcgtgacacggtgcagccgccgcaaggtcgagcgcgacctgctcccgctgctcgcccacgtcgccggcggcggcaccggcgtgtgcgacctgcaggacgtgttcctcaggctgacgttcgacacgacgaccacgctggtgttcggcgtcgacccgggctgcctggccatcggcttcccggaggtgccgttcgctcgcgccatggacgacgccatggacgtgctcctcgtccgcaacgtgctccctccgtcgtggtggaagctggtgcggtggctcggggtcgggtacgagcggaagatggccgtcgcgtggcgcgacatcgaccggttcatcggcgagacgatcgccaagcggcgggaggcggtgaaggcgagaggcggcatcgaagactcggccgacctgctctcctcctacatcgacgacgacgacgaagcgagcacggtcgtcgacgccttcctccgcgacacgaccatgaacctcatgctggccggccgcgacacgaccggctcggggctctcctggttcttctacctcctcacgaggaacccgggcgtggtgtccaagatcctcgcggagctcgacaccgtgagttccagcaccaccacaccggacggcatggtgacgtacgacccggacgagctggggcggctgacgtacctgcacgcggcgctgtgcgagtcgctccggctgtacccgccggtgccgatggagcacaagggcgtggtggccgcggaggcgctgccgagcgggcacgaggtgcggccgggggacaaggtgatggtgtcgctgtacgcgatggggaggatggaggcggtgtggggcaaggactgccgggagttccggccggagcggtggatcggggaggacggcaaggcgcggtacgtgccgtcgtacaagttcgtgtccttcaactccggcccgcggacgtgcctcggcaaggacatggcgttcgtgcagctcaaggcggtggcggccgccgtggtgaggaacttcgaggtggaggcggtgcccgggcacgccgtggagcccaagatctccatcatcctccacatcaagaacggcttcaaggccaggatcaagaggaggcatgcagatgcttgattgaacagtgaactcggagtaattgatcgtgtgcctgatggtgaaagaaagatgcatggagtcggcgaatttgtagctgcgcttgatcgatcgctgagaagtgagaagtgacgccgcatgcagatagaagg

SEQ ID NO: 9178 - protein, 543 aa, Triticum aestivum
  misc_feature (1)..(543): Ceres Seq. ID no. 15169596
RSLVSIPQLHTTIGALHRDLKCVRCKRAGENGVRLLPRALALLALLRRLLLLPRQVQAEEPGDPAGVAAGGHAPGAPRQPPAPPRLGHLPAHRQPAQLPLRRPAALRHGALPHLRSGQRPPRFHLQLRQLPQGPRVRRDHGHPRRRHLQRRRRLLAPPARQGAASHVRPPVPGLRDTVQPPQGRARPAPAARPRRRRRHRRVRPAGRVPQADVRHDDHAGVRRRPGLPGHRLPGGAVRSRHGRRHGRAPRPQRAPSVVVEAGAVARGRVRAEDGRRVARHRPVHRRDDRQAAGGGEGERRHRRLGRPALLLHRRRRRSEHGRRRLPPRHDHEPHAGRPRHDRLGALLVLLPPHEEPGRGVQDPRGARHREFQHHHTGRHGDVRPGRAGAADVPARGAVRVAPAVPAGADGAQGRGGRGGAAERARGAAGGQGDGVAVRDGEDGGGVGQGLPGVPAGAVDRGGRQGAVRAVVQVRVLQLRPADVPRQGHGVRAAQGGGGRRGEELRGGGGARARRGAQDLHHPPHQERLQGQDQEEACRCLIEQ

SEQ ID NO: 9179 - protein, 509 aa, Triticum aestivum
  misc_feature (1)..(509): Ceres Seq. ID no. 15169597
MAFVSFLELSLSLLCFVVFYYFHARSKRKNPVIPLEWPLVGMLPALLANLPRLHDWVTSLLTASPLNFRFVGPPRSGMELFLTSDPANVRHVFTSNFANYPKGPEFAEIMDILGGGIFNADGDSWRRQRAKAQLLMSGPRFRAFVTRCSRRKVERDLLPLLAHVAGGGTGVCDLQDVFLRLTFDTTTTLVFGVDPGCLAIGFPEVPFARAMDDAMDVLLVRNVLPPSWWKLVRWLGVGYERKMAVAWRDIDRFIGETIAKRREAVKARGGIEDSADLLSSYIDDDDEASTVVDAFLRDTTMNLMLAGRDTTGSGLSWFFYLLTRNPGVVSKILAELDTVSSSTTTPDGMVTYDPDELGRLTYLHAALCESLRLYPPVPMEHKGVVAAEALPSGHEVRPGDKVMVSLYAMGRMEAVWGKDCREFRPERWIGEDGKARYVPSYKFVSFNSGPRTCLGKDMAFVQLKAVAAAVVRNFEVEAVPGHAVEPKISIILHIKNGFKARIKRRHADA

SEQ ID NO: 9180 - protein, 468 aa, Triticum aestivum
  misc_feature (1)..(468): Ceres Seq. ID no. 15169598
MLPALLANLPRLHDWVTSLLTASPLNFRFVGPPRSGMELFLTSDPANVRHVFTSNFANYPKGPEFAEIMDILGGGIFNADGDSWRRQRAKAQLLMSGPRFRAFVTRCSRRKVERDLLPLLAHVAGGGTGVCDLQDVFLRLTFDTTTTLVFGVDPGCLAIGFPEVPFARAMDDAMDVLLVRNVLPPSWWKLVRWLGVGYERKMAVAWRDIDRFIGETIAKRREAVKARGGIEDSADLLSSYIDDDDEASTVVDAFLRDTTMNLMLAGRDTTGSGLSWFFYLLTRNPGVVSKILAELDTVSSSTTTPDGMVTYDPDELGRLTYLHAALCESLRLYPPVPMEHKGVVAAEALPSGHEVRPGDKVMVSLYAMGRMEAVWGKDCREFRPERWIGEDGKARYVPSYKFVSFNSGPRTCLGKDMAFVQLKAVAAAVVRNFEVEAVPGHAVEPKISIILHIKNGFKARIKRRHADA

SEQ ID NO: 9181 - protein, 509 aa, Triticum aestivum; identical to SEQ ID NO: 9179
  misc_feature (1)..(509): Ceres Seq. ID no. 16625532

SEQ ID NO: 9182 - DNA, 1642 bp, Triticum aestivum
  misc_feature (1)..(1642): Ceres Seq. ID no. 15170155
agctccgcccacagggaggcaaccaagaatttaaagcggcaacaagatcgtcggcgccgccggatcctgctccgccttgttatctccgccccgtaaccacacgcccgaagctgcagccgagccgagatgcatctgagcgagaacgaggggatcgagggcgtgcggttcgtggtgacaggcgggcagggcttcgtcggcgccgccctctgcctggagctgatccgccgcggcgccctggaggtccgctccctcgacctgcgcgcctcctcctcctggtcccagcagctcctcgacgccggcgtccgcttcttccaaggggatgttcggaagaaggaggatgtggggaaggttttccgcaatgtggactgtgtcttccaccttgcttcatatggaatgtcagggaaagaaatggtacaggcaggacgaacagatgaggtcaatataaatgggacgtgcaatgtactggatgcttgccatgagcatggtgttagaaggcttgtgtatgttagcacatataatgtggtgtttgggggaaagccaattgtcaatggcagtgagacgttgccttattttcccattgaagaccatgttgatgcttatgggcgtagcaaatcgatcgctgaacagttggtgctgaagagcaatggtcggcaagctaagagtagtaaaggtactcgcctttatacatgtgcaatacgcccggctgctatctatggtccaggtgaagagcgtcatcttccaagaatcctgtctcttggaaaattgggattagcatctttcaggattgggggtccaaatgtgaagacagattgggtctatgctgataatcttgttcttgcactgatattggcaagtatgggacttttagatgacattcctggcaggaagggaactcctgtagcagctggtcaagcatacttcatatgtgatggagagcctattaatagttttgattttatcatcagtcccttgtttcgaagtttgggctatcctgtacctcgagctacactagatacctctgttgcccttgcaatttcaagaatcattttgttcatgtccacactattctatccatggttagatagtaaatggattcctcagcctcttattcttcctgctgaagtatacaaggtgggtgttacacattacttttcatatctgaaagctaaggaggaacttggctacgtgcctgtgacgagtccacaggaaggcctggccgcaacgatctcctattggcaagagcggaagaggagagagctcgatggcccgacgatattcacctgggttgcagtaatagccgggatgctggctgtgttctccgccgctttccttccacccgtcggtccgctcaaatgggtgctcgccatcaatctgttcgttttccgctcgatgctggtgatccggatagtctttgtggccgcggtcgcggcgcacgcgagtgaagccgtctacgcctggttcctggcaaagaaggtcgacccgaggaacgcgacggggtggttttggcagaccttcgccctggggttcctctccctccggtttctgctcaagagggcgagggcggggacgggaccgtgatttgtgtgttgtacttcagtaacaatggattctagtagaaattccccagaggttctaggtttgc

SEQ ID NO: 9183 - protein, 483 aa, Triticum aestivum
  misc_feature (1)..(483): Ceres Seq. ID no. 15170156
MHLSENEGIEGVRFVVTGGQGFVGAALCLELIRRGALEVRSLDLRASSSWSQQLLDAGVRFFQGDVRKKEDVGKVFRNVDCVFHLASYGMSGKEMVQAGRTDEVNINGTCNVLDACHEHGVRRLVYVSTYNVVFGGKPIVNGSETLPYFPIEDHVDAYGRSKSIAEQLVLKSNGRQAKSSKGTRLYTCAIRPAAIYGPGEERHLPRILSLGKLGLASFRIGGPNVKTDWVYADNLVLALILASMGLLDDIPGRKGTPVAAGQAYFICDGEPINSFDFIISPLFRSLGYPVPRATLDTSVALAISRIILFMSTLFYPWLDSKWIPQPLILPAEVYKVGVTHYFSYLKAKEELGYVPVTSPQEGLAATISYWQERKRRELDGPTIFTWVAVIAGMLAVFSAAFLPPVGPLKWVLAINLFVFRSMLVIRIVFVAAVAAHASEAVYAWFLAKKVDPRNATGWFWQTFALGFLSLRFLLKRARAGTGP

SEQ ID NO: 9184 - protein, 394 aa, Triticum aestivum
  misc_feature (1)..(394): Ceres Seq. ID no. 15170157
MSGKEMVQAGRTDEVNINGTCNVLDACHEHGVRRLVYVSTYNVVFGGKPIVNGSETLPYFPIEDHVDAYGRSKSIAEQLVLKSNGRQAKSSKGTRLYTCAIRPAAIYGPGEERHLPRILSLGKLGLASFRIGGPNVKTDWVYADNLVLALILASMGLLDDIPGRKGTPVAAGQAYFICDGEPINSFDFIISPLFRSLGYPVPRATLDTSVALAISRIILFMSTLFYPWLDSKWIPQPLILPAEVYKVGVTHYFSYLKAKEELGYVPVTSPQEGLAATISYWQERKRRELDGPTIFTWVAVIAGMLAVFSAAFLPPVGPLKWVLAINLFVFRSMLVIRIVFVAAVAAHASEAVYAWFLAKKVDPRNATGWFWQTFALGFLSLRFLLKRARAGTGP

SEQ ID NO: 9185 - protein, 389 aa, Triticum aestivum
  misc_feature (1)..(389): Ceres Seq. ID no. 15170158
MVQAGRTDEVNINGTCNVLDACHEHGVRRLVYVSTYNVVFGGKPIVNGSETLPYFPIEDHVDAYGRSKSIAEQLVLKSNGRQAKSSKGTRLYTCAIRPAAIYGPGEERHLPRILSLGKLGLASFRIGGPNVKTDWVYADNLVLALILASMGLLDDIPGRKGTPVAAGQAYFICDGEPINSFDFIISPLFRSLGYPVPRATLDTSVALAISRIILFMSTLFYPWLDSKWIPQPLILPAEVYKVGVTHYFSYLKAKEELGYVPVTSPQEGLAATISYWQERKRRELDGPTIFTWVAVIAGMLAVFSAAFLPPVGPLKWVLAINLFVFRSMLVIRIVFVAAVAAHASEAVYAWFLAKKVDPRNATGWFWQTFALGFLSLRFLLKRARAGTGP

SEQ ID NO: 9186 - protein, 483 aa, Triticum aestivum; identical to SEQ ID NO: 9183
  misc_feature (1)..(483): Ceres Seq. ID no. 16625537

SEQ ID NO: 9187 - DNA, 2162 bp, Triticum aestivum
  misc_feature (1)..(2162): Ceres Seq. ID no. 15170171
cccagatctccccgcccgcctctccctcgctccccaccccgcgccgcaatggccgacgagcccctcgacgcgtcgccggcgcccgcggcccccgctgcggcgtcggaccccgccccctcccccgtgcccgccccagcccccgcacccgcgcccgcggcgaccgcatccctggtcctccggccgcggcgggagtcgttcgagcacggcctcctgccgatccccaagctggtcttcccggagggcacgctcacgcaaaccctagcgcagctcagggcgaagctcgcggcgccgggggccgggcgcgtgggcgccgcggcgctcgcggaggcgctgcagatccccgccgaccaggccgcgctcgcgctcgggacgctcgccgcggtcctccccggcgaaggcgacggccccgccgcggacggcgcgtgggcggccgacctccgcgacgtgctcctcttcctctacatccagtcctacaagcgcctcgtgccgcgcgcccacaaggactcgccgtccgtcgccgacgtctggccctccacctccgccttcgacggctatctctccgcgctgtccccgatccagcttgtacgcagtaatagccgtcggtttatgccttcgcaagcagatgaagaagctcatcagttatcttatttacaaaagcatatggccaatgttttaactcttttggcagattctgttgatggagagggtgatgaatctatggtactgacaatggagacttttgagcaccttggattcttgttgcagttctccgaaggaactcctttaagccaagctgctccattttttgcgaattctgatccagacatgcctgctgctcctgttccggctactcaagttcatgactggattctgcagaatatagcttcttccttggaatatactgcagaaaaagctataaccaaggaaaacaatcaacggagtgtatctgatcctgatgtggcaatggctgatgctgtcacaaatacaagaatccagagcagctcatcaactggtgcttctgtgcaaaacaatcctggatactaccgaaatacatcttttgtggagggtatctccaaaacttctgttgtcaaacacgggtctgatattaaagggcattcaataaaggttttgaactgccatgattctgttatctacatcctagcccctctcaaatatgctacggtgtatggatgttctgacacaactgttgttcttggtgctattggcaaggtggtaaaagttgagcattgtgaacgtgtgcaaatagttgtggcttctaaaagaatttgtattgccaattgtcgagaatgtatcttctacttgggagtaaatcaccaaccacttatcgtgggggacaaccataaattacaagttgctccatttaatacttgttatccacaacttggggagcatttggcacaagttggtgtggaccctaacgtcaacaagtgggatcaaccttttgtgctgggagttgttgatccacacgattcattatctcatcctgcaggggtttctgatgtccaagccgagtctgccacttgtctagatcctgatctattcacagacttcatgattcctagttggtttgaggcagaaggtcctaccaaatacaatccatttacgttacctgaagtttactgggcatcacagaggaaaaagaatgcttccctggaagacattcaaaagaatatacgagagctggagcttgatgataaccggaaaaaagaattggcatgtgcccttcatgctcaattcaaggactggctatatgcttcaggaaatatccgccagctttactgtttgcaaggcgaataagcatatatgatcttcatccgtaagtgcttaggcacacctgtgaagattgtgcatcctttgcccggtccccttccatagtccagtcctgtccatccgaccgcatcatccacgctgacttctcgtcgactgagctgattcaaccatgtagtgtttgtcaatgtaaaagaaataatgtactgcccattttgtctattaattttgatcggcttccccttgtgttggttgtggttggtgcaaggatctaaatgggggtttggtagtttcatatttatatcctttgtaacatatacgaccatgaaagcggttactcgattctttagtggaaataaacatttttttgctcg

SEQ ID NO: 9188 - protein, 605 aa, Triticum aestivum
  misc_feature (1)..(605): Ceres Seq. ID no. 15170172
PRSPRPPLPRSPPRAAMADEPLDASPAPAAPAAASDPAPSPVPAPAPAPAPAATASLVLRPRRESFEHGLLPIPKLVFPEGTLTQTLAQLRAKLAAPGAGRVGAAALAEALQIPADQAALALGTLAAVLPGEGDGPAADGAWAADLRDVLLFLYIQSYKRLVPRAHKDSPSVADVWPSTSAFDGYLSALSPIQLVRSNSRRFMPSQADEEAHQLSYLQKHMANVLTLLADSVDGEGDESMVLTMETFEHLGFLLQFSEGTPLSQAAPFFANSDPDMPAAPVPATQVHDWILQNIASSLEYTAEKAITKENNQRSVSDPDVAMADAVTNTRIQSSSSTGASVQNNPGYYRNTSFVEGISKTSVVKHGSDIKGHSIKVLNCHDSVIYILAPLKYATVYGCSDTTVVLGAIGKVVKVEHCERVQIVVASKRICIANCRECIFYLGVNHQPLIVGDNHKLQVAPFNTCYPQLGEHLAQVGVDPNVNKWDQPFVLGVVDPHDSLSHPAGVSDVQAESATCLDPDLFTDFMIPSWFEAEGPTKYNPFTLPEVYWASQRKKNASLEDIQKNIRELELDDNRKKELACALHAQFKDWLYASGNIRQLYCLQGE

SEQ ID NO: 9189 - protein, 589 aa, Triticum aestivum
  misc_feature (1)..(589): Ceres Seq. ID no. 15170173
MADEPLDASPAPAAPAAASDPAPSPVPAPAPAPAPAATASLVLRPRRESFEHGLLPIPKLVFPEGTLTQTLAQLRAKLAAPGAGRVGAAALAEALQIPADQAALALGTLAAVLPGEGDGPAADGAWAADLRDVLLFLYIQSYKRLVPRAHKDSPSVADVWPSTSAFDGYLSALSPIQLVRSNSRRFMPSQADEEAHQLSYLQKHMANVLTLLADSVDGEGDESMVLTMETFEHLGFLLQFSEGTPLSQAAPFFANSDPDMPAAPVPATQVHDWILQNIASSLEYTAEKAITKENNQRSVSDPDVAMADAVTNTRIQSSSSTGASVQNNPGYYRNTSFVEGISKTSVVKHGSDIKGHSIKVLNCHDSVIYILAPLKYATVYGCSDTTVVLGAIGKVVKVEHCERVQIVVASKRICIANCRECIFYLGVNHQPLIVGDNHKLQVAPFNTCYPQLGEHLAQVGVDPNVNKWDQPFVLGVVDPHDSLSHPAGVSDVQAESATCLDPDLFTDFMIPSWFEAEGPTKYNPFTLPEVYWASQRKKNASLEDIQKNIRELELDDNRKKELACALHAQFKDWLYASGNIRQLYCLQGE

SEQ ID NO: 9190 - protein, 403 aa, Triticum aestivum
  misc_feature (1)..(403): Ceres Seq. ID no. 15170174
MPSQADEEAHQLSYLQKHMANVLTLLADSVDGEGDESMVLTMETFEHLGFLLQFSEGTPLSQAAPFFANSDPDMPAAPVPATQVHDWILQNIASSLEYTAEKAITKENNQRSVSDPDVAMADAVTNTRIQSSSSTGASVQNNPGYYRNTSFVEGISKTSVVKHGSDIKGHSIKVLNCHDSVIYILAPLKYATVYGCSDTTVVLGAIGKVVKVEHCERVQIVVASKRICIANCRECIFYLGVNHQPLIVGDNHKLQVAPFNTCYPQLGEHLAQVGVDPNVNKWDQPFVLGVVDPHDSLSHPAGVSDVQAESATCLDPDLFTDFMIPSWFEAEGPTKYNPFTLPEVYWASQRKKNASLEDIQKNIRELELDDNRKKELACALHAQFKDWLYASGNIRQLYCLQGE

SEQ ID NO: 9191 - protein, 589 aa, Triticum aestivum; identical to SEQ ID NO: 9189
  misc_feature (1)..(589): Ceres Seq. ID no. 16612035

SEQ ID NO: 9192 - DNA, 1839 bp, Triticum aestivum
  misc_feature (1)..(1839): Ceres Seq. ID no. 15170670
cctccttcctcctccccctcgcttcttcacggaatccaaaccccaaacaccagccatggcgatggcgtcctttcgcccccttcctctcgcgctcctgctcgccgcgtgcctctccgcgctcgtgctggccgtggcgcacgcgcggaccccacggctggagcccaccatccggctgccgtcgcagcgcgccggcgggcaggaggacgatggctccatcgggaccaggtgggccgtcctcatcgccggctccaacggctactacaactaccgccaccaggcggatatctgccacgcctaccagatcatgaagaagggtggtctcaaggatgagaacatcatcgtattcatgtacgatgacattgcgcacaacccggagaacccgaggccgggcgtcatcatcaaccacccccagggtggagatgtctatgctggggtccctaaggactacactggaaaggaggttaatgtcaagaacttctttgctgtcctgctcggtaataaaaccgcggtgagtggtgggaacggcaaagttgtggacagtggccctaatgatcacatttttgtgttttacagtgaccatgggggtcctggggtccttgggatgcctacctatccatacctttacggtgacgatcttgtagatgtcctgaagaaaaagcacgctgctggaacctacaaaagcctggtattttaccttgaagcctgcgaatctgggagcatctttgagggacttctgccaaatgacatcggtgtctatgcgaccaccgcttcgaatgcagaggaaagcagttggggaacgtattgccccggcgagtacccgagccctccgccggaatatgacacttgcttgggcgacctgtacagcatttcttggatggaagacagtgatgtccacaacctgagaactgaatctctcaagcagcagtataacctggtcaagaagagaacggcagctcaggactcatacagctatggttcccatgtgatgcaatacggttctttggacctgaatgctgaacatttgttctcgtacattgggtcaaaccctgctaacgagaacactacatttgttgaagataacgcactgccatcattctcaagagctgttaatcagagggatgctgatcttgtttatttctggcagaagtaccggaaattggccgagagctcccctgagaaaaacgatgctcggaagcaattgcttgaaatgatgggtcatagatctcatattgacaacagcatcgagctgattggaaaccttctgtttggttctgcgggtggtccgatggttctaaaggctgttcgcccagctggtgagcctcttgttgatgactggagttgtctcaagtctacggtgcgcacttttgaatcacaatgtggctcactggcgcagtatggaatgaagcacatgcggccctttgcaaacatctgcaatgccggcattgttcctgaagcgacggcaaaggttgctgctcaggcatgcacgagcatcccaaccaacccctggagtgccacacacaagggttttagtgcttaaaccagaggtgaagcaacttggtccctatctcagctattgtaccatataccaaagtccccttcctattcacacagggttagtagtgcttgaacggacgaaccttagatgaataaataagaattatggcattacttcagctattccaccacaccaaattaccttggttgtgtccaacttatagtgtacatatacccgtagtagaaaggtgatttcctgtgattactgtacatactcgtgatagtttgtgatcagatgtgtagctcgcaattccatatatgaagaatgcaatcgctgctatttgc

SEQ ID NO: 9193 - protein, 511 aa, Triticum aestivum
  misc_feature (1)..(511): Ceres Seq. ID no. 15170671
LLPPPPRFFTESKPQTPAMAMASFRPLPLALLLAACLSALVLAVAHARTPRLEPTIRLPSQRAGGQEDDGSIGTRWAVLIAGSNGYYNYRHQADICHAYQIMKKGGLKDENIIVFMYDDIAHNPENPRPGVIINHPQGGDVYAGVPKDYTGKEVNVKNFFAVLLGNKTAVSGGNGKVVDSGPNDHIFVFYSDHGGPGVLGMPTYPYLYGDDLVDVLKKKHAAGTYKSLVFYLEACESGSIFEGLLPNDIGVYATTASNAEESSWGTYCPGEYPSPPPEYDTCLGDLYSISWMEDSDVHNLRTESLKQQYNLVKKRTAAQDSYSYGSHVMQYGSLDLNAEHLFSYIGSNPANENTTFVEDNALPSFSRAVNQRDADLVYFWQKYRKLAESSPEKNDARKQLLEMMGHRSHIDNSIELIGNLLFGSAGGPMVLKAVRPAGEPLVDDWSCLKSTVRTFESQCGSLAQYGMKHMRPFANICNAGIVPEATAKVAAQACTSIPTNPWSATHKGFSA

SEQ ID NO: 9194 - protein, 493 aa, Triticum aestivum
  misc_feature (1)..(493): Ceres Seq. ID no. 15170672
MAMASFRPLPLALLLAACLSALVLAVAHARTPRLEPTIRLPSQRAGGQEDDGSIGTRWAVLIAGSNGYYNYRHQADICHAYQIMKKGGLKDENIIVFMYDDIAHNPENPRPGVIINHPQGGDVYAGVPKDYTGKEVNVKNFFAVLLGNKTAVSGGNGKVVDSGPNDHIFVFYSDHGGPGVLGMPTYPYLYGDDLVDVLKKKHAAGTYKSLVFYLEACESGSIFEGLLPNDIGVYATTASNAEESSWGTYCPGEYPSPPPEYDTCLGDLYSISWMEDSDVHNLRTESLKQQYNLVKKRTAAQDSYSYGSHVMQYGSLDLNAEHLFSYIGSNPANENTTFVEDNALPSFSRAVNQRDADLVYFWQKYRKLAESSPEKNDARKQLLEMMGHRSHIDNSIELIGNLLFGSAGGPMVLKAVRPAGEPLVDDWSCLKSTVRTFESQCGSLAQYGMKHMRPFANICNAGIVPEATAKVAAQACTSIPTNPWSATHKGFSA

SEQ ID NO: 9195 - protein, 491 aa, Triticum aestivum
  misc_feature (1)..(491): Ceres Seq. ID no. 15170673
MASFRPLPLALLLAACLSALVLAVAHARTPRLEPTIRLPSQRAGGQEDDGSIGTRWAVLIAGSNGYYNYRHQADICHAYQIMKKGGLKDENIIVFMYDDIAHNPENPRPGVIINHPQGGDVYAGVPKDYTGKEVNVKNFFAVLLGNKTAVSGGNGKVVDSGPNDHIFVFYSDHGGPGVLGMPTYPYLYGDDLVDVLKKKHAAGTYKSLVFYLEACESGSIFEGLLPNDIGVYATTASNAEESSWGTYCPGEYPSPPPEYDTCLGDLYSISWMEDSDVHNLRTESLKQQYNLVKKRTAAQDSYSYGSHVMQYGSLDLNAEHLFSYIGSNPANENTTFVEDNALPSFSRAVNQRDADLVYFWQKYRKLAESSPEKNDARKQLLEMMGHRSHIDNSIELIGNLLFGSAGGPMVLKAVRPAGEPLVDDWSCLKSTVRTFESQCGSLAQYGMKHMRPFANICNAGIVPEATAKVAAQACTSIPTNPWSATHKGFSA

SEQ ID NO: 9196 - protein, 491 aa, Triticum aestivum; identical to SEQ ID NO: 9195
  misc_feature (1)..(491): Ceres Seq. ID no. 16625538

SEQ ID NO: 9197 - DNA, 594 bp, Triticum aestivum
  misc_feature (1)..(594): Ceres Seq. ID no. 15172978
ctctctccgcctcacagaaatctctcccctcgcccaaaccctcgccgccgccatggccgccgccacctcccccgccgtcgcatgcggcggcggcgacaacgggcggcgggggtggcagcagcccgagctcttcgtcgttctcgacggtgacggcaatggtaggggggcagcagttcgggatggaggaggtggagaccgacctcacctacatgagcgagtacgcctacaccaactacatgatggacttggcggccggcggctacctcggaggggtgtacgatcagttcagctgatctggatagaggggtgaaagaacagtgctagtagtttactatgatcaatcaatgttaattaattaatcaaccgggattgccgggtaatcgtatgcacgtagcagcaagtcagaactcagtaggtattggtggtggtttcaatgggtggatgccctaacggtgaatcttagtagtacgtagtactccctctgtagtttagggagggagtatttgctaagccatgtacattatgaatcggcaatctttgtaagtatcatgtatggactatctcattctcgaaaaanaaaatgtatggattacc

SEQ ID NO: 9198 - protein, 102 aa, Triticum aestivum
  misc_feature (1)..(102): Ceres Seq. ID no. 15172979
SLRLTEISPLAQTLAAAMAAATSPAVACGGGDNGRRGWQQPELFVVLDGDGNGRGAAVRDGGGGDRPHLHERVRLHQLHDGLGGRRLPRRGVRSVQLIWIEG

SEQ ID NO: 9199 - protein, 96 aa, Triticum aestivum
  misc_feature (1)..(96): Ceres Seq. ID no. 15172980
LSASQKSLPSPKPSPPPWPPPPPPPSHAAAATTGGGGGSSPSSSSFSTVTAMVGGQQFGMEEVETDLTYMSEYAYTNYMMDLAAGGYLGGVYDQFS

SEQ ID NO: 9200 - protein, 85 aa, Triticum aestivum
  misc_feature (1)..(85): Ceres Seq. ID no. 15172981
MAAATSPAVACGGGDNGRRGWQQPELFVVLDGDGNGRGAAVRDGGGGDRPHLHERVRLHQLHDGLGGRRLPRRGVRSVQLIWIEG

SEQ ID NO: 9201 - protein, 85 aa, Triticum aestivum; identical to SEQ ID NO: 9200
  misc_feature (1)..(85): Ceres Seq. ID no. 16625554

SEQ ID NO: 9202 - DNA, 1164 bp, Triticum aestivum
  misc_feature (1)..(1164): Ceres Seq. ID no. 15173077
atcatccacacatacgaacacacacaacattgtcatttagttgttcttgcttgctgctgctgaaatacctgcatgctagcatcccctgctcagaagaaacagaggtctggaggtctgtcttttcatcctggttttgttattggttcgtcgaggagaagatagtttcttggaggtgcaagctaggcgctgaggaggtcggacatggaggatgtggccaagttcttgtttgggatttccgggaatgtcattgctctatttctcttcctatccccggtgcctactttctggaggatcattcggaacaaatccacagaggaattctccggggtgccatacaacatgacgctcctcaactgcctcctctccgcctggtacgggctgccgttcgtgtccccgaacaacgtcctggtgtcgacgatcaacggcgtgggcgcggcgatcgagacggtgtacgtggtgatcttcctcgtcttcgcgtcgaacaagaaggcgaggctccggacgctcggcctggcgtcggccgtcgcgacggtgttcgcggtcgtggcgctcgtctcgatgctcgtcctgcacggcccggcacgcaagctcctcgccggcctcgccatgaccgtcttctccatctgcatgtacgcctcgcccctctccatcatgaggatggtgatcaagacgaagagcgtggagtacatgccgttcctgctgtcgctggcggtgttcctgtgcggcacgtcgtggttcatttacggcttgctcggccacgacctcttcgtcacgatccccaacgggtgcgggagcgtcctgggcgccgcgcagctcatcctttacgccatctaccggaacaacaagggcaacgccgcggccggcgctggcaagctacagggcgacgacgtggagatgtccgtcgacggcaggaacggcaaggtcgccgatagcgacgatcgcggtgcggcggggtcgacgaagaccggcaagatggtcggccaggtttagctagatcggtcgaagatcagccatattatgtgctttttctaccagtatcttgttactgcaagaatcccgcgtgttggccttgcgtaattagccaatataggactagcctttaattgccaccttgtacctgtttgtaagctatgtattgcatacgtgtactaatgtctcaagctg

SEQ ID NO: 9203 - protein, 309 aa, Triticum aestivum
  misc_feature (1)..(309): Ceres Seq. ID no. 15173078
HPHIRTHTTLSFSCSCLLLLKYLHASIPCSEETEVWRSVFSSWFCYWFVEEKIVSWRCKLGAEEVGHGGCGQVLVWDFRECHCSISLPIPGAYFLEDHSEQIHRGILRGAIQHDAPQLPPLRLVRAAVRVPEQRPGVDDQRRGRGDRDGVRGDLPRLRVEQEGEAPDARPGVGRRDGVRGRGARLDARPARPGTQAPRRPRHDRLLHLHVRLAPLHHEDGDQDEERGVHAVPAVAGGVPVRHVVVHLRLARPRPLRHDPQRVRERPGRRAAHPLRHLPEQQGQRRGRRWQATGRRRGDVRRRQERQGRR

SEQ ID NO: 9204 - protein, 262 aa, Triticum aestivum
  misc_feature (1)..(262): Ceres Seq. ID no. 15173079
MEDVAKFLFGISGNVIALFLFLSPVPTFWRIIRNKSTEEFSGVPYNMTLLNCLLSAWYGLPFVSPNNVLVSTINGVGAAIETVYVVIFLVFASNKKARLRTLGLASAVATVFAVVALVSMLVLHGPARKLLAGLAMTVFSICMYASPLSIMRMVIKTKSVEYMPFLLSLAVFLCGTSWFIYGLLGHDLFVTIPNGCGSVLGAAQLILYAIYRNNKGNAAAGAGKLQGDDVEMSVDGRNGKVADSDDRGAAGSTKTGKMVGQV

SEQ ID NO: 9205 - protein, 216 aa, Triticum aestivum
  misc_feature (1)..(216): Ceres Seq. ID no. 15173080
MTLLNCLLSAWYGLPFVSPNNVLVSTINGVGAAIETVYVVIFLVFASNKKARLRTLGLASAVATVFAVVALVSMLVLHGPARKLLAGLAMTVFSICMYASPLSIMRMVIKTKSVEYMPFLLSLAVFLCGTSWFIYGLLGHDLFVTIPNGCGSVLGAAQLILYAIYRNNKGNAAAGAGKLQGDDVEMSVDGRNGKVADSDDRGAAGSTKTGKMVGQV

SEQ ID NO: 9206 - protein, 262 aa, Triticum aestivum; identical to SEQ ID NO: 9204
  misc_feature (1)..(262): Ceres Seq. ID no. 16612054

SEQ ID NO: 9207 - DNA, 1086 bp, Triticum aestivum
  misc_feature (1)..(1086): Ceres Seq. ID no. 15173410
gcattgtcgcatcgagttgcacacccactgcctgcacacgtctacgtacaccatggcagccatgcagagacttgtgctccttctgtccgtggcgatcgcggcgtcggcgcagggcccggcggtggcgcccgcggcgccgacgacgcccacggccccggcggcgcccgctccggcggccggcacgacgaacatcacgggggtgctggccaaggccgggcagttcaacaccttcatccggctgctcaagtcgacgggcgtggcggcgcagatcgacaaccagctcaacaacagcttcggcagcggcatgacggtgttcgcgcccaccgacaacgccttcacctcgctcgcctccggcacgctcaactcgctgtccgacagccagaagaacgcgctcatccagtaccacgtcctctccaccgccatccccatgtcgcagttcgacaccgtcagcaacccgctccgcacgcaggccggcagcacctcccccgcccagtacccgctcaacgtcaccgccgagggccagcaggtcaacatcaccaccggcgtcgtcaacgccaccgtcgacaacacgctctacaccggcgaccagctcgtcgtctaccaggtcaacaaggtgctcctgcccatggccatcgccggcacggccgcacccgcgcccgcgccgctcgcgcccaccaagaccaaggggaagacgcccacgtcgacggtcgccgacgcgcccgaggccgaagcgtcgacggacacgtcgctcgcggcgccggcacgggtggtcacactcacaggaggtggtgtcgtcgcggtggttcacgtgcttgccctggcctgcgtctggtgggggccgtgacagcgccgcgcccgatcagagtgtgagccccaacctgaggtctagatccatgcatcacaatctttttttgctcactttcttttcaaaggtgttggtctttttcgtttgatttgttctttttatttcagctcatttttatacctctgtaattgctagggacatgtaaagtgaaatgtactattacgggagtcacatttttatgtaatgttgttactaaataaatatacatatttttatagtgc

SEQ ID NO: 9208 - protein, 289 aa, Triticum aestivum
  misc_feature (1)..(289): Ceres Seq. ID no. 15173411
ALSHRVAHPLPAHVYVHHGSHAETCAPSVRGDRGVGAGPGGGARGADDAHGPGGARSGGRHDEHHGGAGQGRAVQHLHPAAQVDGRGGADRQPAQQQLRQRHDGVRAHRQRLHLARLRHAQLAVRQPEERAHPVPRPLHRHPHVAVRHRQQPAPHAGRQHLPRPVPAQRHRRGPAGQHHHRRRQRHRRQHALHRRPARRLPGQQGAPAHGHRRHGRTRARAARAHQDQGEDAHVDGRRRARGRSVDGHVARGAGTGGHTHRRWCRRGGSRACPGLRLVGAVTAPRPIRV

SEQ ID NO: 9209 - protein, 280 aa, Triticum aestivum
  misc_feature (1)..(280): Ceres Seq. ID no. 15173412
HCRIELHTHCLHTSTYTMAAMQRLVLLLSVAIAASAQGPAVAPAAPTTPTAPAAPAPAAGTTNITGVLAKAGQFNTFIRLLKSTGVAAQIDNQLNNSFGSGMTVFAPTDNAFTSLASGTLNSLSDSQKNALIQYHVLSTAIPMSQFDTVSNPLRTQAGSTSPAQYPLNVTAEGQQVNITTGVVNATVDNTLYTGDQLVVYQVNKVLLPMAIAGTAAPAPAPLAPTKTKGKTPTSTVADAPEAEASTDTSLAAPARVVTLTGGGVVAVVHVLALACVWWGP

SEQ ID NO: 9210 - protein, 263 aa, Triticum aestivum
  misc_feature (1)..(263): Ceres Seq. ID no. 15173413
MAAMQRLVLLLSVAIAASAQGPAVAPAAPTTPTAPAAPAPAAGTTNITGVLAKAGQFNTFIRLLKSTGVAAQIDNQLNNSFGSGMTVFAPTDNAFTSLASGTLNSLSDSQKNALIQYHVLSTAIPMSQFDTVSNPLRTQAGSTSPAQYPLNVTAEGQQVNITTGVVNATVDNTLYTGDQLVVYQVNKVLLPMAIAGTAAPAPAPLAPTKTKGKTPTSTVADAPEAEASTDTSLAAPARVVTLTGGGVVAVVHVLALACVWWGP

SEQ ID NO: 9211 - protein, 260 aa, Triticum aestivum
  misc_feature (1)..(260): Ceres Seq. ID no. 16625556
MQRLVLLLSVAIAASAQGPAVAPAAPTTPTAPAAPAPAAGTTNITGVLAKAGQFNTFIRLLKSTGVAAQIDNQLNNSFGSGMTVFAPTDNAFTSLASGTLNSLSDSQKNALIQYHVLSTAIPMSQFDTVSNPLRTQAGSTSPAQYPLNVTAEGQQVNITTGVVNATVDNTLYTGDQLVVYQVNKVLLPMAIAGTAAPAPAPLAPTKTKGKTPTSTVADAPEAEASTDTSLAAPARVVTLTGGGVVAVVHVLALACVWWGP

SEQ ID NO: 9212 - DNA, 968 bp, Triticum aestivum
  misc_feature (1)..(968): Ceres Seq. ID no. 15173586
ctcttgagtttaccttattgcttctgttcttttgatgtttacgcaggagcagcggctcgtgcatggacagctaacacctgtacgcttctgaatatgagccagtaaaataccccggaaagaaataaaagttgtgcagctcccaagatcaatgagcagtaccaatcccccttccgcgaccagccatgttgccctcacacgccatccgctggagcatggatgcgggctctctgaatggcggtccagatgcagaggaactgactccacgagtttaaaaaacgggcttcttcaggcatcagctccatccatccccttgtgctgcctctgcccgatgtcgacgacggtgcaggagccgccgcacgtcctggccgtggacgacagcctcgtcgaccgcgtcgtcatctccaggctcctccgcagctccaagtacagagtgacgacggtggacagcgggaagaaggcgctggaggtgctgagcctgggccacgagagcgtgcagctgatcatcacggactactgcatgccggagatgaccggctacgacctgctgaagcgggtcaaggagtcggcagagctgcgcggcatcccggtggtgatcatgtcgtcggagaactcgccgtccaggatccgccggtgcctcgacgagggcgcggaggagttcctcatcaagccggtgcgcccctccgacgtctcccgcctctgcaaccgggccatcgccgccatgcccatgcggtagcaacggccggtcggtgccgtgctgctgatcggtgctagcctgctagcttgctaatccaatcctccctccctcctctgctgagttctcactgacgagatatccccatgtacatgcgtctgctgcagggttgcatcccatggtgaaatcaaaactgaatgaattccatgacaacccacggaatgtatgtattccttacttgccaatgtatgaaatccaccactaactgtgaaacagt

SEQ ID NO: 9213 - protein, 194 aa, Triticum aestivum
  misc_feature (1)..(194): Ceres Seq. ID no. 15173587
MSSTNPPSATSHVALTRHPLEHGCGLSEWRSRCRGTDSTSLKNGLLQASAPSIPLCCLCPMSTTVQEPPHVLAVDDSLVDRVVISRLLRSSKYRVTTVDSGKKALEVLSLGHESVQLIITDYCMPEMTGYDLLKRVKESAELRGIPVVIMSSENSPSRIRRCLDEGAEEFLIKPVRPSDVSRLCNRAIAAMPMR

SEQ ID NO: 9214 - protein, 134 aa, Triticum aestivum
  misc_feature (1)..(134): Ceres Seq. ID no. 15173588
MSTTVQEPPHVLAVDDSLVDRVVISRLLRSSKYRVTTVDSGKKALEVLSLGHESVQLIITDYCMPEMTGYDLLKRVKESAELRGIPVVIMSSENSPSRIRRCLDEGAEEFLIKPVRPSDVSRLCNRAIAAMPMR

SEQ ID NO: 9215 - protein, 194 aa, Triticum aestivum; identical to SEQ ID NO: 9213
  misc_feature (1)..(194): Ceres Seq. ID no. 16612059

SEQ ID NO: 9216 - DNA, 1101 bp, Triticum aestivum
  misc_feature (1)..(1101): Ceres Seq. ID no. 15173621
gccaagagcacttgccaatcacttgcaccccaaaagaagtttttgccgagagcacttgccaatcacttgcacctcaaaaggctttcttgctgccacagctgaatccatggcgaaatgcgggctgctgctcctgttcattgcgttcctcttgccggcggcacgtgcgacatcgtgccaccccgatgacctccgtgcgctacggggcttcgccggaaacctcagcggtggggctgtcctcctccgtgctgcctggtccggtgcctcctgctgcgtctgggaaggcgtgaactgcgatggcactagcggccgtgtcacggcgctgcggctccctgggcacggccttgtggggctcatcccaggagcatccttggcaggccttgcacggctagaggagctcaaccttgccaacaacaaactggtcggcaccatcccatcatggattggcgagcttgatcacctttgctacttggatctgtcggataattcattggttggcgaggtacccaagagtttgatacggctcaagggtcttgtcatcgctggtcattcactaggtatggtttttactaacatgccattgtatgtgaagcgtaatagaagaacacttgatgaacaaccaaatacaatatctgggagcaacaacactgtcagatctgggagcaccaacgttgtttctgggaatgacaacactgtcatatccgggaataacaacaatgtggctgggagcaacaacactgtcataaccgggaacgacaataccgtaactggtagcaaccatgttgtatctggggacaaacatatcgtgactgacaataacaatgccgtatccgggaacgacaataatgtatccgggagcttccataccgtatccgggagccacaatactgtatctgggaccaacaacactgtatctgggagcaaccatgtcgtatctgggagcaacaaggtcgtaggagatgaatgatttgtaagtgaattgtttgcatcttccttgacggagctcatgtggttgtccaatttcagtgtagcccacaatcacttgggtggggtcaatagtgttatgtaacttcatggatatatatagcatcttatttctacttt

SEQ ID NO: 9217 - protein, 320 aa, Triticum aestivum
  misc_feature (1)..(320): Ceres Seq. ID no. 15173622
PRALANHLHPKRSFCREHLPITCTSKGFLAATAESMAKCGLLLLFIAFLLPAARATSCHPDDLRALRGFAGNLSGGAVLLRAAWSGASCCVWEGVNCDGTSGRVTALRLPGHGLVGLIPGASLAGLARLEELNLANNKLVGTIPSWIGELDHLCYLDLSDNSLVGEVPKSLIRLKGLVIAGHSLGMVFTNMPLYVKRNRRTLDEQPNTISGSNNTVRSGSTNVVSGNDNTVISGNNNNVAGSNNTVITGNDNTVTGSNHVVSGDKHIVTDNNNAVSGNDNNVSGSFHTVSGSHNTVSGTNNTVSGSNHVVSGSNKVVGDE

SEQ ID NO: 9218 - protein, 285 aa, Triticum aestivum
  misc_feature (1)..(285): Ceres Seq. ID no. 15173623
MAKCGLLLLFIAFLLPAARATSCHPDDLRALRGFAGNLSGGAVLLRAAWSGASCCVWEGVNCDGTSGRVTALRLPGHGLVGLIPGASLAGLARLEELNLANNKLVGTIPSWIGELDHLCYLDLSDNSLVGEVPKSLIRLKGLVIAGHSLGMVFTNMPLYVKRNRRTLDEQPNTISGSNNTVRSGSTNVVSGNDNTVISGNNNNVAGSNNTVITGNDNTVTGSNHVVSGDKHIVTDNNNAVSGNDNNVSGSFHTVSGSHNTVSGTNNTVSGSNHVVSGSNKVVGDE

SEQ ID NO: 9219 - protein, 130 aa, Triticum aestivum
  misc_feature (1)..(130): Ceres Seq. ID no. 16612060
MPLYVKRNRRTLDEQPNTISGSNNTVRSGSTNVVSGNDNTVISGNNNNVAGSNNTVITGNDNTVTGSNHVVSGDKHIVTDNNNAVSGNDNNVSGSFHTVSGSHNTVSGTNNTVSGSNHVVSGSNKVVGDE

SEQ ID NO: 9220 - DNA, 1021 bp, Triticum aestivum
  misc_feature (1)..(1021): Ceres Seq. ID no. 15173688
catttaagcttaaacccatgtcccctaacccccccgtaggtctccgtcccgaattccccattccccatctccctccctctccatggccgccgccgccgcttccatggcccgcaggctgctctcccccaccacctcctcgccgtccaccgccatacgcctcctcatctcccgccgcatcgcctccgccccgtccatcccgcacgccccggccgcggcggcgagggagatgctgcgcccggcggccgtcgcctcctcgtcctccttcctcctccgcggcgccgggggcgccaggggaatggcgcggcggccggggggcgacgggtactcccccgcgcggggcgggggcgggggcggggccggaggggaccgcgcgcccacggagatggcgccgctgttccccgggtgcgactacaagcactggctgatcgtcatggacaagcccggcggcgagggcgcctccaagcaccagatgatcgactgctacgtccagaccctcgccaaggtcctcggaagcgaggaggaggccaagaggaagatttacaacgtctcgtgcgagcgctacttcgggttcgggtgtgagattgatgaggagacatccaacaagcttgaagggattcctggtgttctgtttgtactccccgattcctatgtggaccctgaacacaaggactatggagccgagctgtttgtgaatggggagattgtgcagagatcacccgagaggcagaggagggtggagcccgttccgcagagagcgtcggacaggccgaggtacaacgacaggacccggtacgcgcgccggagggagaaccagcagcagcagcagcagcgatgatccaccacacgaccgagctagaggcaacctgctgtgctgttttcatcccctcgacacagcaagtagctggtattgcttggttttagcaatccgtttcatgttgctactactctgttatgtgtatgtatttgacgacttggagcttgaaactaagaagcttgatagcataaaagaattttagagctg

SEQ ID NO: 9221 - protein, 250 aa, Triticum aestivum
  misc_feature (1)..(250): Ceres Seq. ID no. 15173689
MAAAAASMARRLLSPTTSSPSTAIRLLISRRIASAPSIPHAPAAAAREMLRPAAVASSSSFLLRGAGGARGMARRPGGDGYSPARGGGGGGAGGDRAPTEMAPLFPGCDYKHWLIVMDKPGGEGASKHQMIDCYVQTLAKVLGSEEEAKRKIYNVSCERYFGFGCEIDEETSNKLEGIPGVLFVLPDSYVDPEHKDYGAELFVNGEIVQRSPERQRRVEPVPQRASDRPRYNDRTRYARRRENQQQQQQR

SEQ ID NO: 9222 - protein, 243 aa, Triticum aestivum
  misc_feature (1)..(243): Ceres Seq. ID no. 15173690
MARRLLSPTTSSPSTAIRLLISRRIASAPSIPHAPAAAAREMLRPAAVASSSSFLLRGAGGARGMARRPGGDGYSPARGGGGGGAGGDRAPTEMAPLFPGCDYKHWLIVMDKPGGEGASKHQMIDCYVQTLAKVLGSEEEAKRKIYNVSCERYFGFGCEIDEETSNKLEGIPGVLFVLPDSYVDPEHKDYGAELFVNGEIVQRSPERQRRVEPVPQRASDRPRYNDRTRYARRRENQQQQQQR

SEQ ID NO: 9223 - protein, 202 aa, Triticum aestivum
  misc_feature (1)..(202): Ceres Seq. ID no. 15173691
MLRPAAVASSSSFLLRGAGGARGMARRPGGDGYSPARGGGGGGAGGDRAPTEMAPLFPGCDYKHWLIVMDKPGGEGASKHQMIDCYVQTLAKVLGSEEEAKRKIYNVSCERYFGFGCEIDEETSNKLEGIPGVLFVLPDSYVDPEHKDYGAELFVNGEIVQRSPERQRRVEPVPQRASDRPRYNDRTRYARRRENQQQQQQR

SEQ ID NO: 9224 - protein, 243 aa, Triticum aestivum; identical to SEQ ID NO: 9222
  misc_feature (1)..(243): Ceres Seq. ID no. 16625560

SEQ ID NO: 9225 - DNA, 1003 bp, Triticum aestivum
  misc_feature (1)..(1003): Ceres Seq. ID no. 15173911
gactttggcttgatcaagtaggtatatatacatatcctctgctgctcctcccccgcaaacgatcgacgggcctggccggcgcagcctgcgacgtccgagctcccgccgcgccgtctccggccatggggttccccctggtgtgctactgcgtcgccatccccaagccgatcatcgccttctgcaagctcgtcgccgccgtccgggacgccctcctcctgctgctctccctcgtcggcctctgccgctccccgcgccgctccgtccacgacgccccgctgcccgaggaggtcaaggagcgcctcccggccgtcgagttctccttgctggcgcgtccggcgcagcagcagcaggggtgccacgacggggacgccgcggcggcggcgacgtgcatcgtgtgcctggagcggctgcgggcggcggacgaggtgcggcggctgggcaactgcgcgcacgccttccaccgcggctgcatcgacgggtggatcgacctcggccggaccacctgcccgctgtgccgctcccacctactgccccgccccgcggagggacggcccgctcgccagcctcctcacgcgcgtttggtgacgaccaaccgcgccactcgttcgttagctccaaggccacgtctttccttgtcccagcgcggtggcggccgacacagagattcgcgatctcgaccggctgcacgtatatttattgtgggtttacatcgtctcaaaatcgggattttatttagtaatttagtttagggcgccactttgtatagccatccaatcacgaggtcaccaataggtgcacaagcatagttttttttttccgtagagaaggattagtcggtcaaatatatgcgtggtcgtgtttggctagtggatctgaaatgtcaacagctcgagaacgcatgtcgctgttcgacttgtccaatcccactcgtgggactacgacgtacagttgtagtataactcatacttgattcttcatatcaaattgatgattgtttgctgcc

SEQ ID NO: 9226 - protein, 248 aa, Triticum aestivum
  misc_feature (1)..(248): Ceres Seq. ID no. 15173912
LWLDQVGIYTYPLLLLPRKRSTGLAGAACDVRAPAAPSPAMGFPLVCYCVAIPKPIIAFCKLVAAVRDALLLLLSLVGLCRSPRRSVHDAPLPEEVKERLPAVEFSLLARPAQQQQGCHDGDAAAAATCIVCLERLRAADEVRRLGNCAHAFHRGCIDGWIDLGRTTCPLCRSHLLPRPAEGRPARQPPHARLVTTNRATRSLAPRPRLSLSQRGGGRHRDSRSRPAARIFIVGLHRLKIGILFSNLV

SEQ ID NO: 9227 - protein, 208 aa, Triticum aestivum
  misc_feature (1)..(208): Ceres Seq. ID no. 15173913
MGFPLVCYCVAIPKPIIAFCKLVAAVRDALLLLLSLVGLCRSPRRSVHDAPLPEEVKERLPAVEFSLLARPAQQQQGCHDGDAAAAATCIVCLERLRAADEVRRLGNCAHAFHRGCIDGWIDLGRTTCPLCRSHLLPRPAEGRPARQPPHARLVTTNRATRSLAPRPRLSLSQRGGGRHRDSRSRPAARIFIVGLHRLKIGILFSNLV

SEQ ID NO: 9228 - protein, 208 aa, Triticum aestivum; identical to SEQ ID NO: 9227
  misc_feature (1)..(208): Ceres Seq. ID no. 16625565

SEQ ID NO: 9229 - DNA, 917 bp, Triticum aestivum
  misc_feature (1)..(917): Ceres Seq. ID no. 15174100
ctctctcctctctacactgtgttgcgtagcccggaccgacatgaccggcggcgtgaacggcaacggcggaggcggtgggggcggcggcggggcgtgcgcggtgtgcaagcaccagcggcgcaagtgcgagcccaactgcgagctggccgcctacttcccggccaacaggatgaacgacttccgcgcgctgcacctcgtcttcggggtggccaacctcaccaagctcatcaaggccaacgccaccgaggcggcgcgccgccgcgccgccgagacgctgacgtgggaggcgcggtggcgcgagcgcgacccctccgaggggtgctaccgcgaggtctcctgcctccgccgcgagaacgccgtgctgcgcgccgagaacgccgcgctcaggcgccgggccgaccagtgcgcgtgctgtgtcaccacgttgcagcagcagcagcagcagatattgctcgtctcggcttacaacaacggcgcccggccccccggcggcgtgctgcacggggccagcgccggagtcgtgcccggcggcttctacgccggcgcgccgaggcccggggcagctggtcaggcggagcccagggagaagagcagcgcgaggtgtgacgctcagcgcacagctagctagcagtgggctatgggagaagatgaaggcagaaattcaaccgtttcatatgaaattcatgtcctgagtaggaaaaagccctaagtgttggttttggaataaaaagtactccctccgtcccataatataatagtgtcaaaaacgttcttatattatgggacgaagggaatactagctttactcttttttttcttcttctgcttgagcaggacatctaaagttcaaagtgtaaaaactcagctttgtataactggtgattcatttaattagaagccangaagatgattcatac

SEQ ID NO: 9230 - protein, 208 aa, Triticum aestivum
  misc_feature (1)..(208): Ceres Seq. ID no. 15174101
SLLSTLCCVARTDMTGGVNGNGGGGGGGGGACAVCKHQRRKCEPNCELAAYFPANRMNDFRALHLVFGVANLTKLIKANATEAARRRAAETLTWEARWRERDPSEGCYREVSCLRRENAVLRAENAALRRRADQCACCVTTLQQQQQQILLVSAYNNGARPPGGVLHGASAGVVPGGFYAGAPRPGAAGQAEPREKSSARCDAQRTAS

SEQ ID NO: 9231 - protein, 201 aa, Triticum aestivum
  misc_feature (1)..(201): Ceres Seq. ID no. 15174102
LSPLYTVLRSPDRHDRRRERQRRRRWGRRRGVRGVQAPAAQVRAQLRAGRLLPGQQDERLPRAAPRLRGGQPHQAHQGQRHRGGAPPRRRDADVGGAVARARPLRGVLPRGLLPPPRERRAARRERRAQAPGRPVRVLCHHVAAAAAADIARLGLQQRRPAPRRRAARGQRRSRARRLLRRRAEARGSWSGGAQGEEQREV

SEQ ID NO: 9232 - protein, 195 aa, Triticum aestivum
  misc_feature (1)..(195): Ceres Seq. ID no. 15174103
MTGGVNGNGGGGGGGGGACAVCKHQRRKCEPNCELAAYFPANRMNDFRALHLVFGVANLTKLIKANATEAARRRAAETLTWEARWRERDPSEGCYREVSCLRRENAVLRAENAALRRRADQCACCVTTLQQQQQQILLVSAYNNGARPPGGVLHGASAGVVPGGFYAGAPRPGAAGQAEPREKSSARCDAQRTAS

SEQ ID NO: 9233 - protein, 195 aa, Triticum aestivum; identical to SEQ ID NO: 9232
  misc_feature (1)..(195): Ceres Seq. ID no. 16625567

SEQ ID NO: 9234 - DNA, 975 bp, Triticum aestivum
  misc_feature (1)..(975): Ceres Seq. ID no. 15174194
acaccagtcacactcacacgggttcagacacatcgcctcgcctcggcccgctgttcgccgccaccagctagctagtccagcgccaccgccaggcagcccacggccgcagcaatggcgcgtctcgccaccatcctcagcttcggggaccacgccgaggagggcgccggcgccttcacggagccgcaggaggactaccagcaagaacacgacgacgacgacgacgcggcgtcggacgccagcggcgacagcttcgagttcgcgttcgcgcggccgctggcgccggcgggcggggaggcgctggccgacgacctcttcgcgcacggccgcatcctcccggcctacccggtcttccaccgccgccaggcccacgacgacgacgcctcggcctcggccacctccgcgacggcgccgccctcgccggacacgtactgcgcgtgggcgccgcggtccgcgccggggtcgcccgcgcgcgaaccggccgccttccccaagagcgcgtccacgggcacgggcgaggccgcgcgccgcttccgcctgcgcgacatcctcggctccggcggccgctcccacagcgacggcaaggagaagttcctcttcctccagccgactcccgccaaacccaagtccaagacgagcgcattatccgccgcgtcggctccggccaacaagaagacttcgcagcagaagcagggcaagaagaagggcgcggccgccgctccgacggagatggacatggccaccgcgcacaggctcttctacagcaagcccggagccgcggccggccccggcggcgagaggacgacgacgacgacgaaaaagtcgtacctgccctaccggccggccatcgtcggcttcttcgccaccgcgcacgcgctgcgccccaagcaccacccctactagccatcacatcccatcccctgctccgctgctgccacgataaatctcatcaaattaaattagttcgttaattcgttc

SEQ ID NO: 9235 - protein, 312 aa, Triticum aestivum
  misc_feature (1)..(312): Ceres Seq. ID no. 15174195
HQSHSHGFRHIASPRPAVRRHQLASPAPPPGSPRPQQWRVSPPSSASGTTPRRAPAPSRSRRRTTSKNTTTTTTRRRTPAATASSSRSRGRWRRRAGRRWPTTSSRTAASSRPTRSSTAARPTTTTPRPRPPPRRRRPRRTRTARGRRGPRRGRPRANRPPSPRARPRARARPRAASACATSSAPAAAPTATARRSSSSSSRLPPNPSPRRAHYPPRRLRPTRRLRSRSRARRRARPPLRRRWTWPPRTGSSTASPEPRPAPAARGRRRRRKSRTCPTGRPSSASSPPRTRCAPSTTPTSHHIPSPAPLLPR

SEQ ID NO: 9236 - protein, 262 aa, Triticum aestivum
  misc_feature (1)..(262): Ceres Seq. ID no. 15174196
MARLATILSFGDHAEEGAGAFTEPQEDYQQEHDDDDDAASDASGDSFEFAFARPLAPAGGEALADDLFAHGRILPAYPVFHRRQAHDDDASASATSATAPPSPDTYCAWAPRSAPGSPAREPAAFPKSASTGTGEAARRFRLRDILGSGGRSHSDGKEKFLFLQPTPAKPKSKTSALSAASAPANKKTSQQKQGKKKGAAAAPTEMDMATAHRLFYSKPGAAAGPGGERTTTTTKKSYLPYRPAIVGFFATAHALRPKHHPY

SEQ ID NO: 9237 - protein, 262 aa, Triticum aestivum; identical to SEQ ID NO: 9236
  misc_feature (1)..(262): Ceres Seq. ID no. 16612071

SEQ ID NO: 9238 - DNA, 981 bp, Triticum aestivum
  misc_feature (1)..(981): Ceres Seq. ID no. 15174247
atacatccatcgaggagccactccacacaggcaagcaagggtagtgagactcagaggttcaggcatggcagctccaagagcactcgccctcgccgtcctgctggcgatcgctgtcaccaacgccgaggccgcttccgtggtcgtcggcctggccaagtgcgccgactgcaccaggaggaacatcaaggccgaggaagctttcaagggtcttcaggtggcgatcaagtgcaagaacgtccacggcgactacgagagcaaggcagtgggtaccctcgaccgcaccggcgctttcagcgtgcccctggccgccgacctccacggcgccgactgcgtcgcgcagctccacagcgccgcctccagcgccccgtgccctggccaggagccgtctaagatcgtgccggtgtcggagggcaccaccttcggcgtcgtcgccggcgacaacattaccacaccttctgcagcagcgtcgccggagtgcgcgtccatgaccctgtgcgggccgatcaagaagcacatcatcgagcacttccatcacaagaagcccgtgccgcccaagccggagcccaagccccagccccaccctgactacggccccgtgcccaagcccgagcccaagccgcagccccacccggactaccaccccgtccctcccacgcccacctacggcggcggcggtggataccacggacaccactgagtccgatctaccaccgtcctgcccagcgctgaaatctcatcaccgggttcatgggcatgaactcatgatcggcgttgctatttatgatcggtttgcatgtgtgggtatcgttaggtcttctgccattcgctgcagagttgagagttcagaataacagatgtatgtgtgtcactgtgtcaaccgagtgtgaaggtgtgttgctttatcaagattttgtaatttcggtgcgtttaccgaagttattatgaatcaagtaatgtatttaaacaagtcgatttgtcaat

SEQ ID NO: 9239 - protein, 231 aa, Triticum aestivum
  misc_feature (1)..(231): Ceres Seq. ID no. 15174248
YIHRGATPHRQARVVRLRGSGMAAPRALALAVLLAIAVTNAEAASVVVGLAKCADCTRRNIKAEEAFKGLQVAIKCKNVHGDYESKAVGTLDRTGAFSVPLAADLHGADCVAQLHSAASSAPCPGQEPSKIVPVSEGTTFGVVAGDNITTPSAAASPECASMTLCGPIKKHIIEHFHHKKPVPPKPEPKPQPHPDYGPVPKPEPKPQPHPDYHPVPPTPTYGGGGGYHGHH

SEQ ID NO: 9240 - protein, 210 aa, Triticum aestivum
  misc_feature (1)..(210): Ceres Seq. ID no. 15174249
MAAPRALALAVLLAIAVTNAEAASVVVGLAKCADCTRRNIKAEEAFKGLQVAIKCKNVHGDYESKAVGTLDRTGAFSVPLAADLHGADCVAQLHSAASSAPCPGQEPSKIVPVSEGTTFGVVAGDNITTPSAAASPECASMTLCGPIKKHIIEHFHHKKPVPPKPEPKPQPHPDYGPVPKPEPKPQPHPDYHPVPPTPTYGGGGGYHGHH

SEQ ID NO: 9241 - protein, 129 aa, Triticum aestivum
  misc_feature (1)..(129): Ceres Seq. ID no. 15174250
IHPSRSHSTQASKGSETQRFRHGSSKSTRPRRPAGDRCHQRRGRFRGRRPGQVRRLHQEEHQGRGSFQGSSGGDQVQERPRRLREQGSGYPRPHRRFQRAPGRRPPRRRLRRAAPQRRLQRPVPWPGAV

SEQ ID NO: 9242 - protein, 210 aa, Triticum aestivum; identical to SEQ ID NO: 9240
  misc_feature (1)..(210): Ceres Seq. ID no. 16625569

SEQ ID NO: 9243 - DNA, 1156 bp, Triticum aestivum
  misc_feature (1)..(1156): Ceres Seq. ID no. 15174281
gacgattagaaaacatcgggaaaccccctccccgtgctccaactaccccaagcgccgccactcccaccgtaccgcggcaatgccgacgccacgaaaccggaaggtccctgcccctgccccgccgcgccggcggcctccccgcctggagtaccgcgcaaaggacggcgcgtggtacggcgcgcgcatggcgctgcagggcgactcgctgcgcgtcatgttcgaggaattccgcgaggagttcgacgagtggcacgacccaaacacggccgacctcgcctccccgggcgacgtgaccgcgctccgcaccaggttccgcccggcgagcccgcccctcgaggacgcccgctgcggcgacctccgccgcggccagctgctctgcgtcctccgcgccatgtccaacggcgagcgcaagtactacgacgccatccttgattccgtgaaaagagcggctcacgtcaccgtgggcggcgaggagcggtgcgcgtgccgcttcacagtgcggtggacggacgggccgctccgcggcggcctggacgaggtcggcgtcgacgaggtctgctgcgtgcgggactcgccggtcaacgacccggtgctgagcgagttcctggaccgcgtgacgaggtcgttcggcttcggcgacggcgaggagaacgcgaaggcggtgcaggactcgccggtccaggagccgcggctaaacgagttcctggaccgcgtgacgaaatcgttcggctactgcaacggcgaggagaaaccgaaggcggcgcctcaggggaccggggccacgttgcccccgggcggcgagcagagcgcgacggcggcccctcaggcgaccggggccacgtcgctctgcggcggcgagggggagactgccttcataatcatcgactaggtcgcggcctgcactgcattcctgcgcttctgtttcgatgtatccatgtgcctgccctgctcgacgattggtgagggtatttcgtgccttcgcgttgtttcattcagttactgtctttgtcttccttgtttcgtgtctatgtctaatcttgttcggccccgaaatggacgccatcgttggtagtagtacttggtagtcggtgcgattatgtatctctgttcctgttgccatctttccctggaacctgaaagccatattatgcattgg

SEQ ID NO: 9244 - protein, 295 aa, Triticum aestivum
  misc_feature (1)..(295): Ceres Seq. ID no. 15174282
TIRKHRETPSPCSNYPKRRHSHRTAAMPTPRNRKVPAPAPPRRRPPRLEYRAKDGAWYGARMALQGDSLRVMFEEFREEFDEWHDPNTADLASPGDVTALRTRFRPASPPLEDARCGDLRRGQLLCVLRAMSNGERKYYDAILDSVKRAAHVTVGGEERCACRFTVRWTDGPLRGGLDEVGVDEVCCVRDSPVNDPVLSEFLDRVTRSFGFGDGEENAKAVQDSPVQEPRLNEFLDRVTKSFGYCNGEEKPKAAPQGTGATLPPGGEQSATAAPQATGATSLCGGEGETAFIIID

SEQ ID NO: 9245 - protein, 269 aa, Triticum aestivum
  misc_feature (1)..(269): Ceres Seq. ID no. 15174283
MPTPRNRKVPAPAPPRRRPPRLEYRAKDGAWYGARMALQGDSLRVMFEEFREEFDEWHDPNTADLASPGDVTALRTRFRPASPPLEDARCGDLRRGQLLCVLRAMSNGERKYYDAILDSVKRAAHVTVGGEERCACRFTVRWTDGPLRGGLDEVGVDEVCCVRDSPVNDPVLSEFLDRVTRSFGFGDGEENAKAVQDSPVQEPRLNEFLDRVTKSFGYCNGEEKPKAAPQGTGATLPPGGEQSATAAPQATGATSLCGGEGETAFIIID

SEQ ID NO: 9246 - protein, 234 aa, Triticum aestivum
  misc_feature (1)..(234): Ceres Seq. ID no. 15174284
MALQGDSLRVMFEEFREEFDEWHDPNTADLASPGDVTALRTRFRPASPPLEDARCGDLRRGQLLCVLRAMSNGERKYYDAILDSVKRAAHVTVGGEERCACRFTVRWTDGPLRGGLDEVGVDEVCCVRDSPVNDPVLSEFLDRVTRSFGFGDGEENAKAVQDSPVQEPRLNEFLDRVTKSFGYCNGEEKPKAAPQGTGATLPPGGEQSATAAPQATGATSLCGGEGETAFIIID

SEQ ID NO: 9247 - protein, 269 aa, Triticum aestivum; identical to SEQ ID NO: 9245
  misc_feature (1)..(269): Ceres Seq. ID no. 16625572

SEQ ID NO: 9248 - DNA, 2346 bp, Triticum aestivum
  misc_feature (1)..(2346): Ceres Seq. ID no. 15174921
acctcacccactccccccttctccccccctcctcttgtcacaatcaatcaagaacgtactggaaggaagaaagaggaggaagaaccgagcaagaaccgtctctcctctccccggcgctcttaacgagaacgcagagtctcttttgaacccttgttagcagcggacaggccttcctccgtcatgtgctccggcccgcgcaagccgtcgaccccgccgccggcggcggcggcgcccaaggatccggcggccgtggcctcgctgctcctggagctggcggcggcggacgacgtggttgagttcaggcgggtcgtggaggaggagaaggcgtgccttgatgccgcgggatcgtggtatgggccctcggctgtcggccagggacggctggccgcggagagccggacgccggccatggtcgccgcgctctacgggagcacggccgtgctggcgcacgcgctgtccgtcgcgccgggcgaggcctgccgcgcgtccggcacggacggcgccaccgcgctgcatatggctgccgccggtggcgcggccaacgccgtcgcggccacgcacctgctgctcgccgcgggggcctccacggaggcgctctcggtgtccgggctccgcgccggggacctgctcccgcgcgccgccggcgtggccgagaagcccctccgcctgctgctcaagtcccccgttgtgtcgccctcctcgtcgcccaagaagtccgcctcgccgcctgcggcgatggccgccgcgcaggagcccaggaaggagtacccgccggacctcacgctgccggacctcaagagcgggctcttcagcaccgacgagttccgcatgtacagcttcaaggtgaagccctgctcccgcgcctactcccacgactggaccgagtgccccttcgtgcaccccggcgagaacgcgcgccgccgcgacccgcgccgctactcctacagctgcgtgccctgcccggagttccgcaagggcgggtcctgccgcaagggcgacggctgcgagtacgcgcacggcgtcttcgagtgctggctccacccggcgcagtaccggacgcgcctctgcaaggacgaggtcggctgcgcgcgccgcatctgcttcttcgcccacaggcgcgacgagctccgctccgtcaacccctccgccgtctccgtgggcatgatgcagcccgtgtccccgcgctcctcgccccccaacgggatggacatggggatgctcaaccccgcggggtggccgtcgtcgccggtcagccggctcaagacggcgcgggagctcgacttcgacctggagatgctcgcgctggaccagtaccagcagaagctgttcgacaaggtgtccagcagcgcgcactcgccgagggcgagctggggcgcgcccaacggcggcctcggctcgccgcacgccgccgggtcgcccgccagaaacatgccggactacaccgacctgctgggctccatggacccggccatgctctcccagctccacgcgctgtcgctgaagcaggcgggcgacatgtcgccgtacagctccatgccggacacgccgctgcacatgccgacctcgccgatggtgggcgcgaacaactcgttcggcctcgaccactccatggccaaggccatcatgacctcccgcgcctccgcgttcgccaagcgtagccagagcttcatcgaccgcggcgcgcgcgccccggccgcgcgctccctcatgtcgccggccaccacgatcggcgagccttccatgctcaccgactggggctcccccaacggcggcaacctcgactggggctcacccggcggcaagctggactggggcgtgcagggagacgagctgcacaagttccgcaagtcggcgtccttcgggttccgcgggcagtccgccatgccggcggcctccgcagccacgccagccgagcccgacgtgtcatgggtgaactctcttgtcaaggatggccacacaggcgaccattttccgcagtggctggagcaggagcagatggtggcctgatcccaccccgtcgacgaccaaccgatcgatcactggctcatagcatctagctgaccaaagttctttccttcaaattttttcacccctttttatttgcttaatttgattcatatgagatggttctttagtacgtacatatatgctgttcacaaaaataacattgctgctcatcagcaatcagcatggatgcccaaagggagccttaggttgatgaagaaagaacagccaatatttactctcttttccccccctttcccttcggtttattataaatagctgtatacaagaattccatcaagagtttacttacttgatatttatacatactttgagaccagc

SEQ ID NO: 9249 - protein, 608 aa, Triticum aestivum
  misc_feature (1)..(608): Ceres Seq. ID no. 15174922
MCSGPRKPSTPPPAAAAPKDPAAVASLLLELAAADDVVEFRRVVEEEKACLDAAGSWYGPSAVGQGRLAAESRTPAMVAALYGSTAVLAHALSVAPGEACRASGTDGATALHMAAAGGAANAVAATHLLLAAGASTEALSVSGLRAGDLLPRAAGVAEKPLRLLLKSPVVSPSSSPKKSASPPAAMAAAQEPRKEYPPDLTLPDLKSGLFSTDEFRMYSFKVKPCSRAYSHDWTECPFVHPGENARRRDPRRYSYSCVPCPEFRKGGSCRKGDGCEYAHGVFECWLHPAQYRTRLCKDEVGCARRICFFAHRRDELRSVNPSAVSVGMMQPVSPRSSPPNGMDMGMLNPAGWPSSPVSRLKTARELDFDLEMLALDQYQQKLFDKVSSSAHSPRASWGAPNGGLGSPHAAGSPARNMPDYTDLLGSMDPAMLSQLHALSLKQAGDMSPYSSMPDTPLHMPTSPMVGANNSFGLDHSMAKAIMTSRASAFAKRSQSFIDRGARAPAARSLMSPATTIGEPSMLTDWGSPNGGNLDWGSPGGKLDWGVQGDELHKFRKSASFGFRGQSAMPAASAATPAEPDVSWVNSLVKDGHTGDHFPQWLEQEQMVA

SEQ ID NO: 9250 - protein, 532 aa, Triticum aestivum
  misc_feature (1)..(532): Ceres Seq. ID no. 15174923
MVAALYGSTAVLAHALSVAPGEACRASGTDGATALHMAAAGGAANAVAATHLLLAAGASTEALSVSGLRAGDLLPRAAGVAEKPLRLLLKSPVVSPSSSPKKSASPPAAMAAAQEPRKEYPPDLTLPDLKSGLFSTDEFRMYSFKVKPCSRAYSHDWTECPFVHPGENARRRDPRRYSYSCVPCPEFRKGGSCRKGDGCEYAHGVFECWLHPAQYRTRLCKDEVGCARRICFFAHRRDELRSVNPSAVSVGMMQPVSPRSSPPNGMDMGMLNPAGWPSSPVSRLKTARELDFDLEMLALDQYQQKLFDKVSSSAHSPRASWGAPNGGLGSPHAAGSPARNMPDYTDLLGSMDPAMLSQLHALSLKQAGDMSPYSSMPDTPLHMPTSPMVGANNSFGLDHSMAKAIMTSRASAFAKRSQSFIDRGARAPAARSLMSPATTIGEPSMLTDWGSPNGGNLDWGSPGGKLDWGVQGDELHKFRKSASFGFRGQSAMPAASAATPAEPDVSWVNSLVKDGHTGDHFPQWLEQEQMVA

SEQ ID NO: 9251 - protein, 496 aa, Triticum aestivum
  misc_feature (1)..(496): Ceres Seq. ID no. 15174924
MAAAGGAANAVAATHLLLAAGASTEALSVSGLRAGDLLPRAAGVAEKPLRLLLKSPVVSPSSSPKKSASPPAAMAAAQEPRKEYPPDLTLPDLKSGLFSTDEFRMYSFKVKPCSRAYSHDWTECPFVHPGENARRRDPRRYSYSCVPCPEFRKGGSCRKGDGCEYAHGVFECWLHPAQYRTRLCKDEVGCARRICFFAHRRDELRSVNPSAVSVGMMQPVSPRSSPPNGMDMGMLNPAGWPSSPVSRLKTARELDFDLEMLALDQYQQKLFDKVSSSAHSPRASWGAPNGGLGSPHAAGSPARNMPDYTDLLGSMDPAMLSQLHALSLKQAGDMSPYSSMPDTPLHMPTSPMVGANNSFGLDHSMAKAIMTSRASAFAKRSQSFIDRGARAPAARSLMSPATTIGEPSMLTDWGSPNGGNLDWGSPGGKLDWGVQGDELHKFRKSASFGFRGQSAMPAASAATPAEPDVSWVNSLVKDGHTGDHFPQWLEQEQMVA

SEQ ID NO: 9252 - protein, 608 aa, Triticum aestivum; identical to SEQ ID NO: 9249
  misc_feature (1)..(608): Ceres Seq. ID no. 16612080

SEQ ID NO: 9253 - DNA, 660 bp, Triticum aestivum
  misc_feature (1)..(660): Ceres Seq. ID no. 15175277
ctactcctccagaatgttcccttctaccacggccacggcctcccgcctcctcgtccccgccgcctctcgccgcgccatggccactgccgcctccgccaacccgccgcccccgcagcaatcgccctccaaggcggtgcgggtcgtggtgaagggccgcgtgcagggcgtcttcttccgcgactggacggtggagacggcccgcgcgctcgggctcgccggctgggtccgcaaccgccgcgacggcaccgtggaggccctcctctccggcgaacccgccagggtcgacgagatggtctcccggcgccttcccgtcgggcctcccgccgccgccgtcaccgcggtgctgccttcccccgccgatccgctcgacccctccgagggcttccaccgcaagcccaccgcctgatgaccactggttcttgtcagtgacatggtaataaaacctctgtatatttcgcattcaatgatttttagcatgttatcgagcgagatgtcagcttattgaatcgaactattggaatcggaattcctagtgacaggatcacgagtgtggtgtttattgaatcaatgcccccccctccccaacggtaggactgcgagttgtcgagtttgtttccattcagttagattcaatacacactttgtttgtgtgtaagcccg

SEQ ID NO: 9254 - protein, 142 aa, Triticum aestivum
  misc_feature (1)..(142): Ceres Seq. ID no. 15175278
LLLQNVPFYHGHGLPPPRPRRLSPRHGHCRLRQPAAPAAIALQGGAGRGEGPRAGRLLPRLDGGDGPRARARRLGPQPPRRHRGGPPLRRTRQGRRDGLPAPSRRASRRRRHRGAAFPRRSARPLRGLPPQAHRLMTTGSCQ

SEQ ID NO: 9255 - protein, 134 aa, Triticum aestivum
  misc_feature (1)..(134): Ceres Seq. ID no. 15175279
YSSRMFPSTTATASRLLVPAASRRAMATAASANPPPPQQSPSKAVRVVVKGRVQGVFFRDWTVETARALGLAGWVRNRRDGTVEALLSGEPARVDEMVSRRLPVGPPAAAVTAVLPSPADPLDPSEGFHRKPTA

SEQ ID NO: 9256 - protein, 130 aa, Triticum aestivum
  misc_feature (1)..(130): Ceres Seq. ID no. 15175280
MFPSTTATASRLLVPAASRRAMATAASANPPPPQQSPSKAVRVVVKGRVQGVFFRDWTVETARALGLAGWVRNRRDGTVEALLSGEPARVDEMVSRRLPVGPPAAAVTAVLPSPADPLDPSEGFHRKPTA

SEQ ID NO: 9257 - protein, 130 aa, Triticum aestivum; identical to SEQ ID NO: 9256
  misc_feature (1)..(130): Ceres Seq. ID no. 16625583

SEQ ID NO: 9258 - DNA, 1020 bp, Triticum aestivum
  misc_feature (1)..(1020): Ceres Seq. ID no. 15175438
agctcaccaccaccttcactctccatgctcgcagcaagccagctagctcctcgcctcctctcgtcacactactactagcagcttctcttctcttctctttaagtaacagagagcccaagctaggtgacactagagcgtctcaagcacccgcgccatggccacctccaccttctcgctcttcttcccgccgctgcccagcagcaaaggccagtggccgtctgtagaggaggctgcctactcctacgatgaccacagctccgtcaccaccctctccccttcctccccggcctcctctgcttcctcgggatccctggtggactgcacgctctccctcggcacgccgtcgacgcgccgccccgagccagaccgtactaggcacggggctccgccgcaggcctacccgtccgtgtctgccggggccgagccctgctactaccaccagcagcagggcaggggcggcgccgccgggcacgagcagctcctggaccgccgctgcgccaactgcggcacggcgtccacgccgctctggcggaacggccctcgcggacccaagtccctctgcaacgcctgcggcatcaggttcaagaaggaggagcgccgcgcggcggagaccaatgccggcggcgggtgcggctacgtcgcgcagcgggcgcacgtgtcggcccctcgtgccgtgccgtacgcggaggaggcgcttccttacgccggcgccgtcgacgcgcccttcctggcgtggcggctgaacggcgtcccgccggccccggcgttctcgtcgtggcccgacaggcagcacggcgtgtaccagtacaactagctagtagtactagtgagtagtacgtgtaggtacgtgttagggcatggaacgcggttggtgggcgctgcaacgtttttttggggatcttgttggggacgtacggttgcacgcggccggtgggatatgcatgtgcagtagtagcactgtattttgtctgacattatcgttgagcaagcctgccaaacatatgaattatgaagtagtac

SEQ ID NO: 9259 - protein, 219 aa, Triticum aestivum
  misc_feature (1)..(219): Ceres Seq. ID no. 15175439
MATSTFSLFFPPLPSSKGQWPSVEEAAYSYDDHSSVTTLSPSSPASSASSGSLVDCTLSLGTPSTRRPEPDRTRHGAPPQAYPSVSAGAEPCYYHQQQGRGGAAGHEQLLDRRCANCGTASTPLWRNGPRGPKSLCNACGIRFKKEERRAAETNAGGGCGYVAQRAHVSAPRAVPYAEEALPYAGAVDAPFLAWRLNGVPPAPAFSSWPDRQHGVYQYN

SEQ ID NO: 9260 - protein, 165 aa, Triticum aestivum
  misc_feature (1)..(165): Ceres Seq. ID no. 15175440
MTTAPSPPSPLPPRPPLLPRDPWWTARSPSARRRRAAPSQTVLGTGLRRRPTRPCLPGPSPATTTSSRAGAAPPGTSSSWTAAAPTAARRPRRSGGTALADPSPSATPAASGSRRRSAARRRPMPAAGAATSRSGRTCRPLVPCRTRRRRFLTPAPSTRPSWRGG

SEQ ID NO: 9261 - protein, 219 aa, Triticum aestivum; identical to SEQ ID NO: 9259
  misc_feature (1)..(219): Ceres Seq. ID no. 16625585

SEQ ID NO: 9262 - DNA, 1139 bp, Triticum aestivum
  misc_feature (1)..(1139): Ceres Seq. ID no. 15175445
agtccggctcgagcacggtcaacccgcaccgcgtcgcgcacacgccgaagaagcgcagccgaaccctagctccgccccccgctcctccctccccggcggccgccgtccccgccgtcctcgcgccatggccgactccccgcgccggaggtacacaaggccctcaaggtccccttctccttataagggacgccaaaagcaaatgtcaaggtcaagatcacctgtagcccaatcccagtctagatctccatcgcctgatcctagagctcaggcgaggtcaagatctcgaagccctgcgagggagcgggagcctgaagccgtaaatcatggaaatactctgtacattactggactttcttctagggtgactgacaaagaacttagagagtacttcaataaggaaggaaaggtggtttcttgtcatgttgttcttgaaccccacacacgtgtttctcgtggatttgctttcatcaccatggacactgttgaagatgctgaacgctgcatcaagtatctcaaccagtcagaactgcaaggccggaacatcacagttgaaaagtcacgcagaggccgcccaaggacgcctactcctgggagctatctgggccatcgctatgagcgcagagagatgcagcgtggaggtagattccgcagaggaggctatggtcgtgacgactactatggcaacagctaccgcaggtctccgcctcccatgtaccgagaatacagggacacccgggactaccctccctacagggacacccgcgactactccccaccccacagggatgcccgagactactatgacggcaggggtggccggggctactccccccacaggtctccccctccttatggtggcagggcaaggagggagcggtctaggtcgctgccctactccccgtaccgtatgcccgaaaggggctatggccgccgtgctggtggcggtggctatgacaggtgaagggttgttgttctctttgcgtcagcagaggcccgatgtctaagttggatgataacatgctgcgcatgacgggcctcatgctagattatgtgtaagctgtactgtcttgaagaatatattcctggattttgcagtgttgtacctccacctagtttgtgtaacttggatgacattagac

SEQ ID NO: 9263 - protein, 319 aa, Triticum aestivum
  misc_feature (1)..(319): Ceres Seq. ID no. 15175446
VRLEHGQPAPRRAHAEEAQPNPSSAPRSSLPGGRRPRRPRAMADSPRRRYTRPSRSPSPYKGRQKQMSRSRSPVAQSQSRSPSPDPRAQARSRSRSPAREREPEAVNHGNTLYITGLSSRVTDKELREYFNKEGKVVSCHVVLEPHTRVSRGFAFITMDTVEDAERCIKYLNQSELQGRNITVEKSRRGRPRTPTPGSYLGHRYERREMQRGGRFRRGGYGRDDYYGNSYRRSPPPMYREYRDTRDYPPYRDTRDYSPPHRDARDYYDGRGGRGYSPHRSPPPYGGRARRERSRSLPYSPYRMPERGYGRRAGGGGYDR

SEQ ID NO: 9264 - protein, 278 aa, Triticum aestivum
  misc_feature (1)..(278): Ceres Seq. ID no. 15175447
MADSPRRRYTRPSRSPSPYKGRQKQMSRSRSPVAQSQSRSPSPDPRAQARSRSRSPAREREPEAVNHGNTLYITGLSSRVTDKELREYFNKEGKVVSCHVVLEPHTRVSRGFAFITMDTVEDAERCIKYLNQSELQGRNITVEKSRRGRPRTPTPGSYLGHRYERREMQRGGRFRRGGYGRDDYYGNSYRRSPPPMYREYRDTRDYPPYRDTRDYSPPHRDARDYYDGRGGRGYSPHRSPPPYGGRARRERSRSLPYSPYRMPERGYGRRAGGGGYDR

SEQ ID NO: 9265 - protein, 253 aa, Triticum aestivum
  misc_feature (1)..(253): Ceres Seq. ID no. 15175448
MSRSRSPVAQSQSRSPSPDPRAQARSRSRSPAREREPEAVNHGNTLYITGLSSRVTDKELREYFNKEGKVVSCHVVLEPHTRVSRGFAFITMDTVEDAERCIKYLNQSELQGRNITVEKSRRGRPRTPTPGSYLGHRYERREMQRGGRFRRGGYGRDDYYGNSYRRSPPPMYREYRDTRDYPPYRDTRDYSPPHRDARDYYDGRGGRGYSPHRSPPPYGGRARRERSRSLPYSPYRMPERGYGRRAGGGGYDR

SEQ ID NO: 9266 - protein, 278 aa, Triticum aestivum; identical to SEQ ID NO: 9264
  misc_feature (1)..(278): Ceres Seq. ID no. 16612090

SEQ ID NO: 9267 - DNA, 2057 bp, Triticum aestivum
  misc_feature (1)..(2057): Ceres Seq. ID no. 15176081
aaactccacatttccggaggaggcgagccaaaaggacacacagcagccacaacccaattcctatttttttcctggccgccgccgccgcagcttttgtttgatttatatagcccacacacggggcagcgccgagcagagctcctcctccatcctcctctgcatctccgccctcggccacaggaaacagcggcaggcaggaagacacgcacgcacgcacgcacccatggctgcggacagcaagctgcagagcccgctgctgccgccgccggccggtagcgagggcggcggcgacgacgaggggcacggggcggccagcaagcggctggagagcatcctgagtgacgagtcggtgccgtgggcgcggcggatgtgcgcggcgacggcggtggagatgcggatgctggtgcggctggcggcgccggccgtgctggtgtacatgatcaactacctcatgtccatgtccacgcagatcttctccggccacctcggcacgctggagctcgccgccgcctccctcggcaacaccggcatccaggtcttcgcctacggcctcatgcttggcatggggagtgcggtggagactctatgtgggcaggcgtacggcgcgaacaagttcgacatgctgggcatctacatgcaacgttccactgtcctgctcatggccaccggcatcccgctcgccgtcctctacgcgttctcccgccccatcctcatcctcctcggcgagtcccccgagatagccagcgccgcggccatctgcgtgtacggcctcatcccgcagatctttgcctacgccgccaacttccccatccagaagttcatgcaggcgcagagcatcatggcgcccagcgcctacatctcaacggccacgctcgccgtccacctcgtcctcagctacctcgtcgtctacaagtttgggctggggcttctgggcgcctcgctcatgctcagcatcagctggtggattatcgtcattgggcagtttgtatacatcgtcaccagcagccggtgccgcctcacttggactggattctccctccaggcgttctccggcttgcctgagtttttcaagctgtcccttgcctccgctatcatgctctgcctcgagacttggtacttccagatactggtgctcattgctggcctcctcaaggaccccgaaatggctctcgcatcgctctctgtctgcatgaccatttcaggatgggtgttcatgatctcagttggattcaatgcagcagctagcgtgagggtgagcaatgagcttggagccggcaaccccaagtcagcggcgttctcggtggtggtggtgacggtgctgtcgttcatcttggcggcgataatctcgatagtcatcctgttcttccgtgactacatcagttacatttacacggggggcgacgatgtggcagcggcggtgtccaagctgacgcctctcctggcgatcaccctcatcctcaacggcatccagccagtattatcaggggtggccgtggggtgtgggtggcaagcgttcgtcgcctacgtcaacgtcggctgctactacgtcgtcggcatccctcttggctgcctcctcggcttctacttcgaccttggtgcggcgggcatatggagcggcatgattggaggcacctttatgcagaccgtgatcctggtgtgggttaccgtgaggaccgactggaacaaagaggtggccgaagcgaggaaaagattgaacaagtgggaaggcaacaagatgcctctattagcaggccaagaatgaaacggtggatcctgtatatgatcaacagaaatgtggttcgttcgcaagttgatctccctaaaatgtgtaaagtgcatttgttcatcgtgcaattcaccattgaaattccgtacttccgttctgctattccggcttcgcaagcacggtagcagcggcgatcttgtcatgttactactagctagtataacgggattctatggcgatgatagattagtgtgggtggatgagatcactttttgtgtgagatatcaatattgttggacagcggtcaataaaagttcatcctttggtcttc

SEQ ID NO: 9268 - protein, 586 aa, Triticum aestivum
  misc_feature (1)..(586): Ceres Seq. ID no. 15176082
NSTFPEEASQKDTQQPQPNSYFFPGRRRRSFCLIYIAHTRGSAEQSSSSILLCISALGHRKQRQAGRHARTHAPMAADSKLQSPLLPPPAGSEGGGDDEGHGAASKRLESILSDESVPWARRMCAATAVEMRMLVRLAAPAVLVYMINYLMSMSTQIFSGHLGTLELAAASLGNTGIQVFAYGLMLGMGSAVETLCGQAYGANKFDMLGIYMQRSTVLLMATGIPLAVLYAFSRPILILLGESPEIASAAAICVYGLIPQIFAYAANFPIQKFMQAQSIMAPSAYISTATLAVHLVLSYLVVYKFGLGLLGASLMLSISWWIIVIGQFVYIVTSSRCRLTWTGFSLQAFSGLPEFFKLSLASAIMLCLETWYFQILVLIAGLLKDPEMALASLSVCMTISGWVFMISVGFNAAASVRVSNELGAGNPKSAAFSVVVVTVLSFILAAIISIVILFFRDYISYIYTGGDDVAAAVSKLTPLLAITLILNGIQPVLSGVAVGCGWQAFVAYVNVGCYYVVGIPLGCLLGFYFDLGAAGIWSGMIGGTFMQTVILVWVTVRTDWNKEVAEARKRLNKWEGNKMPLLAGQE

SEQ ID NO: 9269 - protein, 512 aa, Triticum aestivum
  misc_feature (1)..(512): Ceres Seq. ID no. 15176083
MAADSKLQSPLLPPPAGSEGGGDDEGHGAASKRLESILSDESVPWARRMCAATAVEMRMLVRLAAPAVLVYMINYLMSMSTQIFSGHLGTLELAAASLGNTGIQVFAYGLMLGMGSAVETLCGQAYGANKFDMLGIYMQRSTVLLMATGIPLAVLYAFSRPILILLGESPEIASAAAICVYGLIPQIFAYAANFPIQKFMQAQSIMAPSAYISTATLAVHLVLSYLVVYKFGLGLLGASLMLSISWWIIVIGQFVYIVTSSRCRLTWTGFSLQAFSGLPEFFKLSLASAIMLCLETWYFQILVLIAGLLKDPEMALASLSVCMTISGWVFMISVGFNAAASVRVSNELGAGNPKSAAFSVVVVTVLSFILAAIISIVILFFRDYISYIYTGGDDVAAAVSKLTPLLAITLILNGIQPVLSGVAVGCGWQAFVAYVNVGCYYVVGIPLGCLLGFYFDLGAAGIWSGMIGGTFMQTVILVWVTVRTDWNKEVAEARKRLNKWEGNKMPLLAGQE

SEQ ID NO: 9270 - protein, 464 aa, Triticum aestivum
  misc_feature (1)..(464): Ceres Seq. ID no. 15176084
MCAATAVEMRMLVRLAAPAVLVYMINYLMSMSTQIFSGHLGTLELAAASLGNTGIQVFAYGLMLGMGSAVETLCGQAYGANKFDMLGIYMQRSTVLLMATGIPLAVLYAFSRPILILLGESPEIASAAAICVYGLIPQIFAYAANFPIQKFMQAQSIMAPSAYISTATLAVHLVLSYLVVYKFGLGLLGASLMLSISWWIIVIGQFVYIVTSSRCRLTWTGFSLQAFSGLPEFFKLSLASAIMLCLETWYFQILVLIAGLLKDPEMALASLSVCMTISGWVFMISVGFNAAASVRVSNELGAGNPKSAAFSVVVVTVLSFILAAIISIVILFFRDYISYIYTGGDDVAAAVSKLTPLLAITLILNGIQPVLSGVAVGCGWQAFVAYVNVGCYYVVGIPLGCLLGFYFDLGAAGIWSGMIGGTFMQTVILVWVTVRTDWNKEVAEARKRLNKWEGNKMPLLAGQE

SEQ ID NO: 9271 - protein, 436 aa, Triticum aestivum
  misc_feature (1)..(436): Ceres Seq. ID no. 16625590
MSMSTQIFSGHLGTLELAAASLGNTGIQVFAYGLMLGMGSAVETLCGQAYGANKFDMLGIYMQRSTVLLMATGIPLAVLYAFSRPILILLGESPEIASAAAICVYGLIPQIFAYAANFPIQKFMQAQSIMAPSAYISTATLAVHLVLSYLVVYKFGLGLLGASLMLSISWWIIVIGQFVYIVTSSRCRLTWTGFSLQAFSGLPEFFKLSLASAIMLCLETWYFQILVLIAGLLKDPEMALASLSVCMTISGWVFMISVGFNAAASVRVSNELGAGNPKSAAFSVVVVTVLSFILAAIISIVILFFRDYISYIYTGGDDVAAAVSKLTPLLAITLILNGIQPVLSGVAVGCGWQAFVAYVNVGCYYVVGIPLGCLLGFYFDLGAAGIWSGMIGGTFMQTVILVWVTVRTDWNKEVAEARKRLNKWEGNKMPLLAGQE

SEQ ID NO: 9272 - DNA, 583 bp, Triticum aestivum
  misc_feature (1)..(583): Ceres Seq. ID no. 15178337
atcgctttccccttccccccgcccgcatgctgggcgccgtcctccgcggcccggcctctccgatcccgcctctcttccccgcgccggggcgcccactcatccacctctctcgccgcctccctgccgcgcccgccatggccgacgccaagaagaccgacgcgccggcgaccccggccccggagccgcccgagaagccgctccccggcgactgctgcggcagcggctgcgtccgctgcgtctgggacatctactacgacgagttccaggactaccagaaggccctcgccgcccactcctccgcgtcccccgccgccgatcccagcggcgacagcaaggcctccgccgacgagaagatcaaatcatgagaccccaggattcaggacccgtatgtgtatgctttgacttcccctgttctcagattggattcttggtcgtgtaagatatgtcagcattactcacagcattacagttaaacatccattgtattctcaccgtgtatgctgcaattgtacttactgctcatcattctttgcgtgaccaaagatgcccctggttatgaatacaagttccatttttgtgcaac

SEQ ID NO: 9273 - protein, 145 aa, Triticum aestivum
  misc_feature (1)..(145): Ceres Seq. ID no. 15178338
SLSPSPRPHAGRRPPRPGLSDPASLPRAGAPTHPPLSPPPCRARHGRRQEDRRAGDPGPGAAREAAPRRLLRQRLRPLRLGHLLRRVPGLPEGPRRPLLRVPRRRSQRRQQGLRRREDQIMRPQDSGPVCVCFDFPCSQIGFLVV

SEQ ID NO: 9274 - protein, 133 aa, Triticum aestivum
  misc_feature (1)..(133): Ceres Seq. ID no. 15178339
IAFPFPPPACWAPSSAARPLRSRLSSPRRGAHSSTSLAASLPRPPWPTPRRPTRRRPRPRSRPRSRSPATAAAAAASAASGTSTTTSSRTTRRPSPPTPPRPPPPIPAATARPPPTRRSNHETPGFRTRMCML

SEQ ID NO: 9275 - protein, 120 aa, Triticum aestivum
  misc_feature (1)..(120): Ceres Seq. ID no. 15178340
RFPLPPARMLGAVLRGPASPIPPLFPAPGRPLIHLSRRLPAAPAMADAKKTDAPATPAPEPPEKPLPGDCCGSGCVRCVWDIYYDEFQDYQKALAAHSSASPAADPSGDSKASADEKIKS

SEQ ID NO: 9276 - protein, 112 aa, Triticum aestivum
  misc_feature (1)..(112): Ceres Seq. ID no. 16625601
MLGAVLRGPASPIPPLFPAPGRPLIHLSRRLPAAPAMADAKKTDAPATPAPEPPEKPLPGDCCGSGCVRCVWDIYYDEFQDYQKALAAHSSASPAADPSGDSKASADEKIKS

SEQ ID NO: 9277 - DNA, 1330 bp, Triticum aestivum
  misc_feature (1)..(1330): Ceres Seq. ID no. 15179743
agttttccccgtcggtctcctcccccagatccacatccacccatcgccatggcgatctccccccgcctcctcctcccgctcctcctcgcggcggcggccgcctccgccttcgccggcgccaacgacctggtcggcgagctccagtccctccgctcccgctcccccgccggcgtgatccacctcaccgacacctccgtcacccgcttcctctcctcgccggccccgcgcccctactccgtcctcgtcttcttcgacgccacctcgctccactccaagaccgacctccacctcccccagctccgccgcgagttcgcgctcctctccgcctccttccacgccaacaaccccgactcctccgacctcttcttcgccgacatcgagttctccgagtcgcagcactccttctcccagttcggcgtcaactccctcccccacgtccgcctcatccgcccggagcactcccgcctcgccgactcggagcagatggaccagtcccacttctcccgcctcgccgactccatggtcgagttcgtggaggcccgcaccggcctcgaggtcggccccatcgtccgcccgcctctcgtctcccgcaaccagatgatcctgctcggcctcttgttcctgatctccatcccgttcgggatcaagaggatcatggaaggggacaccctgcttcatgaccgcaagctttggatggccggggcgctgttcgtctacttcttcagcgtctcagggggcatgtacgggatcatcaggcatacgcccatgttcatcaccgaccgggaggatccaaacaagctcgtcttcttctaccagggctcagggatgcagctcggcgcagaggggtttgctgtcggtttcctgtacaccctcgtggggctgatgatagctgtggtgacacacttgctggtgaaggtggagagcctgcagacacagcgatttgcgatgctggcagtcatggccatcgggtggtgggcagtcaggaaggtgatttacctggataactggaagactgggtacggcattcataccttctggccgagtagctggaggtaaatgttgtctcaaccggcgatcgatgcttctttcctttggttgcagaggacgcggagtcatccagatcggccatactgagatagagcatcattttggttgtaacgtcgtactagcaagtttagcatttcaattctctggtgctttattgtggaatatagagaaccgagtcattttataccgaggattttaacttgcagtattacttgaacaatggtaaatcctagctgatatttgttttcaggcagtaaccccggccaaggatattaaccgtggg

SEQ ID NO: 9278 - protein, 351 aa, Triticum aestivum
  misc_feature (1)..(351): Ceres Seq. ID no. 15179744
SFPRRSPPPDPHPPIAMAISPRLLLPLLLAAAAASAFAGANDLVGELQSLRSRSPAGVIHLTDTSVTRFLSSPAPRPYSVLVFFDATSLHSKTDLHLPQLRREFALLSASFHANNPDSSDLFFADIEFSESQHSFSQFGVNSLPHVRLIRPEHSRLADSEQMDQSHFSRLADSMVEFVEARTGLEVGPIVRPPLVSRNQMILLGLLFLISIPFGIKRIMEGDTLLHDRKLWMAGALFVYFFSVSGGMYGIIRHTPMFITDREDPNKLVFFYQGSGMQLGAEGFAVGFLYTLVGLMIAVVTHLLVKVESLQTQRFAMLAVMAIGWWAVRKVIYLDNWKTGYGIHTFWPSSWR

SEQ ID NO: 9279 - protein, 335 aa, Triticum aestivum
  misc_feature (1)..(335): Ceres Seq. ID no. 15179745
MAISPRLLLPLLLAAAAASAFAGANDLVGELQSLRSRSPAGVIHLTDTSVTRFLSSPAPRPYSVLVFFDATSLHSKTDLHLPQLRREFALLSASFHANNPDSSDLFFADIEFSESQHSFSQFGVNSLPHVRLIRPEHSRLADSEQMDQSHFSRLADSMVEFVEARTGLEVGPIVRPPLVSRNQMILLGLLFLISIPFGIKRIMEGDTLLHDRKLWMAGALFVYFFSVSGGMYGIIRHTPMFITDREDPNKLVFFYQGSGMQLGAEGFAVGFLYTLVGLMIAVVTHLLVKVESLQTQRFAMLAVMAIGWWAVRKVIYLDNWKTGYGIHTFWPSSWR

SEQ ID NO: 9280 - protein, 225 aa, Triticum aestivum
  misc_feature (1)..(225): Ceres Seq. ID no. 15179746
FSPSVSSPRSTSTHRHGDLPPPPPPAPPRGGGRLRLRRRQRPGRRAPVPPLPLPRRRDPPHRHLRHPLPLLAGPAPLLRPRLLRRHLAPLQDRPPPPPAPPRVRAPLRLLPRQQPRLLRPLLRRHRVLRVAALLLPVRRQLPPPRPPHPPGALPPRRLGADGPVPLLPPRRLHGRVRGGPHRPRGRPHRPPASRLPQPDDPARPLVPDLHPVRDQEDHGRGHPAS

SEQ ID NO: 9281 - protein, 335 aa, Triticum aestivum; identical to SEQ ID NO: 9279
  misc_feature (1)..(335): Ceres Seq. ID no. 16625622

SEQ ID NO: 9282 - DNA, 949 bp, Triticum aestivum
  misc_feature (1)..(949): Ceres Seq. ID no. 15179836
aattagtcttgcaggagcaagagcgatgtctccgactgatccccgcctcctcttcatcctgtttgtcgtctttgccccggttccggccagggcggtcgacccgaccgtattggccacttttgcgggcatggggatccgcgtctccaccatggagttcgtcatcgacctggacgacctcaacatgaggcaggacatgctgataaccgtggcgacggcgagaagcatgaagagcgtcgagggactaaaggtggcgctcaagcagaccgacatcacggagctgccgacggaagtagtcctcctcaacttggtggtgccggagcggggctcctgcacgctggcgattcgagctgacaatttttatctgttagcatacacaaatgaccgtttggagtggcaggcattcctcgggagggagcacctggttccgacatcgaccccgctcccgttcacgtcggagtacaacgaaagaggcatggggccccgcaccggcctcgcggcgctccagctgagcagggcggccgtgatcgcggcggtcaacacactgctctcctcccgtcggggcgacacgggcgaccaaggccccctcaagcgcgcgctggccacgatcacgctagtcttctgcgaaggctccaggttccgcttcgtccgcgaccgggtcagagcaggctgggagaccgggagccagatcacgaaggatgaggcgctgagggtgacactctgggcaaagatcagctgcgccctcgccaagggctggaccgggggggcgacagccaggctcgcagaaagaggtggcttcccaaatactctcgagggtgccaagtcttttctgctggtactagtttacggcacgaaatgcttgagcgtcatggacgctctccctgtaacctaatctgtggctgcacctttgtttcgccaatgaataataaagaataaaggatggctccgtttc

SEQ ID NO: 9283 - protein, 287 aa, Triticum aestivum
  misc_feature (1)..(287): Ceres Seq. ID no. 15179837
MSPTDPRLLFILFVVFAPVPARAVDPTVLATFAGMGIRVSTMEFVIDLDDLNMRQDMLITVATARSMKSVEGLKVALKQTDITELPTEVVLLNLVVPERGSCTLAIRADNFYLLAYTNDRLEWQAFLGREHLVPTSTPLPFTSEYNERGMGPRTGLAALQLSRAAVIAAVNTLLSSRRGDTGDQGPLKRALATITLVFCEGSRFRFVRDRVRAGWETGSQITKDEALRVTLWAKISCALAKGWTGGATARLAERGGFPNTLEGAKSFLLVLVYGTKCLSVMDALPVT

SEQ ID NO: 9284 - protein, 253 aa, Triticum aestivum
  misc_feature (1)..(253): Ceres Seq. ID no. 15179838
MGIRVSTMEFVIDLDDLNMRQDMLITVATARSMKSVEGLKVALKQTDITELPTEVVLLNLVVPERGSCTLAIRADNFYLLAYTNDRLEWQAFLGREHLVPTSTPLPFTSEYNERGMGPRTGLAALQLSRAAVIAAVNTLLSSRRGDTGDQGPLKRALATITLVFCEGSRFRFVRDRVRAGWETGSQITKDEALRVTLWAKISCALAKGWTGGATARLAERGGFPNTLEGAKSFLLVLVYGTKCLSVMDALPVT

SEQ ID NO: 9285 - protein, 295 aa, Triticum aestivum
  misc_feature (1)..(295): Ceres Seq. ID no. 15179839
ISLAGARAMSPTDPRLLFILFVVFAPVPARAVDPTVLATFAGMGIRVSTMEFVIDLDDLNMRQDMLITVATARSMKSVEGLKVALKQTDITELPTEVVLLNLVVPERGSCTLAIRADNFYLLAYTNDRLEWQAFLGREHLVPTSTPLPFTSEYNERGMGPRTGLAALQLSRAAVIAAVNTLLSSRRGDTGDQGPLKRALATITLVFCEGSRFRFVRDRVRAGWETGSQITKDEALRVTLWAKISCALAKGWTGGATARLAERGGFPNTLEGAKSFLLVLVYGTKCLSVMDALPVT

SEQ ID NO: 9286 - protein, 287 aa, Triticum aestivum; identical to SEQ ID NO: 9283
  misc_feature (1)..(287): Ceres Seq. ID no. 16625623

SEQ ID NO: 9287 - DNA, 1176 bp, Triticum aestivum
  misc_feature (1)..(1176): Ceres Seq. ID no. 15179881
agatgccgcattagccaccaacgcactcccccgtctccccctccaatcttcaccaatccaagcctccctccggcggcggcgacggcggagagatcggcgagatttccctcttcctcccactctgtctctgtctgagctcgaggagagggagagagattgagagggcctccgtgcggattggctcggttcctctggttcttgctcccagcccggcccgcgcgccatgacggtggtcgacgccgagacccggttccacgtcctggcggtggacgacagcgtcatcgaccggaagctcatcgagatgctgctcaggacctcctcctaccaagtcaccacggtggactccgggagcaaggcgctggaggtcctgggacttagagacgagggggacgactcctcctcctcctcctcacccccttcctcctccgcccctgaccaccaccaggaggtgggcgtgaatttgatcatcactgactactgcatgcctggcatgacaggatacgatctgctgaggagggtcaaggggtcatcttcattgaaggacattccagtggtgatcatgtcgtctgagaatgtgcctgccaggatcagcaggtgcttggaggacggcgcggaggagttyttcctcaagcccgtgaagctcgctgacatgaagaagctcaagtcgcacctggtccggcggaagcagccccagctccagccgcagacacatgagaagccacagccgcaaccacagcagcagcaacagaaaccacagccagagcagcagctgaaggcagagcaagcgccagccgagccggcggcggaggaggaggcagtgacggccggcggaatcacgggtgactgcggcggcggcagcaggaagcggaaggcggcgatgatggagcaggacggggcgagcacgagcctctccagcggcagcagcggcctggcggtggagacctgaatcctgaagaaactcaacagagacacccccaaccaagaaacctcatgtttctcttggctcctgcaatttttttggggtttacttgctcatatgggagaatcatcatcgtcgtcatggctaatagtagctcctggggtggggtaaaatatttacttagttctaagtgaagaactagaaaaaacatactacttttacactagctgaattttggtgtagtgccctgttcgctc

SEQ ID NO: 9288 - protein, 240 aa, Triticum aestivum
  misc_feature (1)..(240): Ceres Seq. ID no. 15179882
  misc_feature (133)..(133): Xaa is any aa, unknown or other
MTVVDAETRFHVLAVDDSVIDRKLIEMLLRTSSYQVTTVDSGSKALEVLGLRDEGDDSSSSSSPPSSSAPDHHQEVGVNLIITDYCMPGMTGYDLLRRVKGSSSLKDIPVVIMSSENVPARISRCLEDGAEEXFLKPVKLADMKKLKSHLVRRKQPQLQPQTHEKPQPQPQQQQQKPQPEQQLKAEQAPAEPAAEEEAVTAGGITGDCGGGSRKRKAAMMEQDGASTSLSSGSSGLAVET

SEQ ID NO: 9289 - protein, 214 aa, Triticum aestivum
  misc_feature (1)..(214): Ceres Seq. ID no. 15179883
  misc_feature (107)..(107): Xaa is any aa, unknown or other
MLLRTSSYQVTTVDSGSKALEVLGLRDEGDDSSSSSSPPSSSAPDHHQEVGVNLIITDYCMPGMTGYDLLRRVKGSSSLKDIPVVIMSSENVPARISRCLEDGAEEXFLKPVKLADMKKLKSHLVRRKQPQLQPQTHEKPQPQPQQQQQKPQPEQQLKAEQAPAEPAAEEEAVTAGGITGDCGGGSRKRKAAMMEQDGASTSLSSGSSGLAVET

SEQ ID NO: 9290 - protein, 154 aa, Triticum aestivum
  misc_feature (1)..(154): Ceres Seq. ID no. 15179884
  misc_feature (47)..(47): Xaa is any aa, unknown or other
MPGMTGYDLLRRVKGSSSLKDIPVVIMSSENVPARISRCLEDGAEEXFLKPVKLADMKKLKSHLVRRKQPQLQPQTHEKPQPQPQQQQQKPQPEQQLKAEQAPAEPAAEEEAVTAGGITGDCGGGSRKRKAAMMEQDGASTSLSSGSSGLAVET

SEQ ID NO: 9291 - protein, 240 aa, Triticum aestivum; identical to SEQ ID NO: 9288
  misc_feature (1)..(240): Ceres Seq. ID no. 16625624
  misc_feature (133)..(133): Xaa is any aa, unknown or other

SEQ ID NO: 9292 - DNA, 730 bp, Triticum aestivum
  misc_feature (1)..(730): Ceres Seq. ID no. 15179892
aaacgccgcagccagtgtgaagcctccaaagtcgctggcgcccccacgttccatcggagcgaggcgccgccgccggatctcgtcccctcccccctccccctttgtgtgcctgaggatgaaccccttgcacccgcgccgacgacctctccgatcagtcctgttgcatcgcgcccggcacacccccccccccccccccatcccagtcgctcgcttgccggaccccggccgccgtggttcccaccgtgcctcgtcccgagccatcggggccgagcggctgtggcgggccagaggcagcgcgtctggcagcgtcggcctgcttcgtcggcctacggagccgtgttggtggtgtaatttttctgtcagatcgggtctctccttcctcagattggaatcatggccattttttttgttccatctttgtagatagcagctttcttcttcagatcggatcacacggccgattttgtatgtatcttcagattggctcttctcatttacgatcggcgattgcccagcggggcgaccagaagacaagcgagcgacatcgaatcgttttttctcatttatttttggactgcgggtttatttccataaaagtgaaggtttttctgcaaaagttcatgacgcacgaccagaaaccctattttctttattattaggtaaagatatagtagataaagcaaggtgcgtcttgctatttttttcatccgttcacccatattattattac

SEQ ID NO: 9293 - protein, 141 aa, Triticum aestivum
  misc_feature (1)..(141): Ceres Seq. ID no. 15179893
NAAASVKPPKSLAPPRSIGARRRRRISSPPPSPFVCLRMNPLHPRRRPLRSVLLHRARHTPPPPPIPVARLPDPGRRGSHRASSRAIGAERLWRARGSASGSVGLLRRPTEPCWWCNFSVRSGLSFLRLESWPFFLFHLCR

SEQ ID NO: 9294 - protein, 116 aa, Triticum aestivum
  misc_feature (1)..(116): Ceres Seq. ID no. 15179894
KRRSQCEASKVAGAPTFHRSEAPPPDLVPSPLPLCVPEDEPLAPAPTTSPISPVASRPAHPPPPPHPSRSLAGPRPPWFPPCLVPSHRGRAAVAGQRQRVWQRRPASSAYGAVLVV

SEQ ID NO: 9295 - protein, 103 aa, Triticum aestivum
  misc_feature (1)..(103): Ceres Seq. ID no. 15179895
MNPLHPRRRPLRSVLLHRARHTPPPPPIPVARLPDPGRRGSHRASSRAIGAERLWRARGSASGSVGLLRRPTEPCWWCNFSVRSGLSFLRLESWPFFLFHLCR

SEQ ID NO: 9296 - protein, 103 aa, Triticum aestivum; identical to SEQ ID NO: 9295
  misc_feature (1)..(103): Ceres Seq. ID no. 16625625

SEQ ID NO: 9297 - DNA, 1117 bp, Triticum aestivum
  misc_feature (1)..(1117): Ceres Seq. ID no. 15179900
acactggtctctcacgcacgcacgcagctgccaacaccagccatcgtcaaagcgctagctccaccggaagccatggcgcgcgccttcgtgcgctccatctccttccctctcagcccctcgaggtctcccaaggcgcgcgctccctccttgtcgtaccacgggcggtccgtgagcctgccatgccgctcgcacccgatcttggcgcacctccacacccacatccgcgccgtgcgcgcctgggcgcagcagggcccagcggcgttgttctcctccgtcgcagcggggctcgcgcacgttgatgcgctccacaccgccgtcggcgacctgctcgacctgcccgaggcccaggacgcgctctccggcgccggcggcagcgtggaccgcctcctcgactccttcctccgcctcgccgacgcgcacggctgtttccaggaggccgtggttgcgctcaagcatgacgtggccgaggcgctggccgccgtgcgccgtcgcgacggtgcacgcctggcatcggccgtgcgggcgcagcgcagggccggcaaggagctcgcccgcctcgccgccgcggccaaagagtgtgccagccgtccctcgcgcctgagcatcctcggaggtggccaaggcagcgcggcggaggtggaggtgacggggctgctgatggagtcggccgcggcgacggcgtcggcgtctgccgcgctgttcggggccgtggcggccatgtccgggtccgtggaggcggagtcgtgctcgtgcaagggcacggcggcgctggtgtgcctcgtgaagaagagcaagaagaagtcgtcggcgccggccgggtgtggggaggaggggatggcggtggcggccgtggcggagaggctggaggagctggaggagtgcatcgaggagctggaggccgggagcgagaaggtgttccggagcctggtgcagaccagggtcgcgctcctcaacatccacacgctccacatcttctagctttactactatcactatcatcgatgatccatccatcttaattctagtacaaatgaaattagtgctagcaatcctgtgtaactgtaaaaaaaagttaagtagatgatgaatagaagaaggaatttgtgcaactcctgcg

SEQ ID NO: 9298 - protein, 325 aa, Triticum aestivum
  misc_feature (1)..(325): Ceres Seq. ID no. 15179901
TLVSHARTQLPTPAIVKALAPPEAMARAFVRSISFPLSPSRSPKARAPSLSYHGRSVSLPCRSHPILAHLHTHIRAVRAWAQQGPAALFSSVAAGLAHVDALHTAVGDLLDLPEAQDALSGAGGSVDRLLDSFLRLADAHGCFQEAVVALKHDVAEALAAVRRRDGARLASAVRAQRRAGKELARLAAAAKECASRPSRLSILGGGQGSAAEVEVTGLLMESAAATASASAALFGAVAAMSGSVEAESCSCKGTAALVCLVKKSKKKSSAPAGCGEEGMAVAAVAERLEELEECIEELEAGSEKVFRSLVQTRVALLNIHTLHIF

SEQ ID NO: 9299 - protein, 301 aa, Triticum aestivum
  misc_feature (1)..(301): Ceres Seq. ID no. 15179902
MARAFVRSISFPLSPSRSPKARAPSLSYHGRSVSLPCRSHPILAHLHTHIRAVRAWAQQGPAALFSSVAAGLAHVDALHTAVGDLLDLPEAQDALSGAGGSVDRLLDSFLRLADAHGCFQEAVVALKHDVAEALAAVRRRDGARLASAVRAQRRAGKELARLAAAAKECASRPSRLSILGGGQGSAAEVEVTGLLMESAAATASASAALFGAVAAMSGSVEAESCSCKGTAALVCLVKKSKKKSSAPAGCGEEGMAVAAVAERLEELEECIEELEAGSEKVFRSLVQTRVALLNIHTLHIF

SEQ ID NO: 9300 - protein, 301 aa, Triticum aestivum; identical to SEQ ID NO: 9299
  misc_feature (1)..(301): Ceres Seq. ID no. 16625627

SEQ ID NO: 9301 - DNA, 1022 bp, Triticum aestivum
  misc_feature (1)..(1022): Ceres Seq. ID no. 15224382
ttcctcccctcccctcccctccatccatcctcagccgccccttcgccggccggccatggcaaatgcttccctccagtccttcctcccccagcaccaccattccttcctcaacagcaacacccacgacggctcccctcccgcgctcctcaagctcaccaccaacagcaccaacgccagcaacagcatttccttcaagctcttcgccagcagctcctcctcggtgaccacaaccgccaactcgccggctccgactccggtcgccgccgccgccgcggcgacaacctcgccgcccaccccctccctggagctcctgggccagcagctcgcggcgggggactaccggcaggccgacgagaccacgcgcgccctcctcatcgtcctcgcgggcgaggccgcgcgccgccgagggtacgtcttcttctcggaggtccagttcatctccgtcgaggacctccgcgccgtggacgcgctctggctggagcacagcggcggcaggttcgggtacagcgtgcagcgccgggtttgggacaagtcgctgcgcgagttcacccgattcttcatcaagatcggctggatgaagaagctggacaccgaggtggagcagttcaactacagggccttccccgacgagttcatctgggagctcaccgacgacacgccggagggccacctgcccctcaccaatgccctcagggggacgcggctcctggagaacatcttcacccaccccgccttcgactgcgaagaagatgaagcagcaggggcagatgaggaggctgacaagggcagtgccactggtcagaataataaggatgacaacaaaggcaggggcaggccaaagagtttgacagatttcaagcccgactactccttttaaggagcgtgcaagtttgtgatgatgctgccatggggcagctgattttaaaaaaaagtcatgtttctgtagttcgttttggctgtttttgtactgaacatgcatgcaaatttgtgaccatatatattactataaagataagtgtttg

SEQ ID NO: 9302 - protein, 291 aa, Triticum aestivum
  misc_feature (1)..(291): Ceres Seq. ID no. 15224383
SSPPLPSIHPQPPLRRPAMANASLQSFLPQHHHSFLNSNTHDGSPPALLKLTTNSTNASNSISFKLFASSSSSVTTTANSPAPTPVAAAAAATTSPPTPSLELLGQQLAAGDYRQADETTRALLIVLAGEAARRRGYVFFSEVQFISVEDLRAVDALWLEHSGGRFGYSVQRRVWDKSLREFTRFFIKIGWMKKLDTEVEQFNYRAFPDEFIWELTDDTPEGHLPLTNALRGTRLLENIFTHPAFDCEEDEAAGADEEADKGSATGQNNKDDNKGRGRPKSLTDFKPDYSF

SEQ ID NO: 9303 - protein, 273 aa, Triticum aestivum
  misc_feature (1)..(273): Ceres Seq. ID no. 15224384
MANASLQSFLPQHHHSFLNSNTHDGSPPALLKLTTNSTNASNSISFKLFASSSSSVTTTANSPAPTPVAAAAAATTSPPTPSLELLGQQLAAGDYRQADETTRALLIVLAGEAARRRGYVFFSEVQFISVEDLRAVDALWLEHSGGRFGYSVQRRVWDKSLREFTRFFIKIGWMKKLDTEVEQFNYRAFPDEFIWELTDDTPEGHLPLTNALRGTRLLENIFTHPAFDCEEDEAAGADEEADKGSATGQNNKDDNKGRGRPKSLTDFKPDYSF

SEQ ID NO: 9304 - protein, 250 aa, Triticum aestivum
  misc_feature (1)..(250): Ceres Seq. ID no. 15224385
FLPSPPLHPSSAAPSPAGHGKCFPPVLPPPAPPFLPQQQHPRRLPSRAPQAHHQQHQRQQQHFLQALRQQLLLGDHNRQLAGSDSGRRRRRGDNLAAHPLPGAPGPAARGGGLPAGRRDHARPPHRPRGRGRAPPRVRLLLGGPVHLRRGPPRRGRALAGAQRRQVRVQRAAPGLGQVAARVHPILHQDRLDEEAGHRGGAVQLQGLPRRVHLGAHRRHAGGPPAPHQCPQGDAAPGEHLHPPRLRLRRR

SEQ ID NO: 9305 - protein, 273 aa, Triticum aestivum; identical to SEQ ID NO: 9303
  misc_feature (1)..(273): Ceres Seq. ID no. 16625645

SEQ ID NO: 9306 - DNA, 1672 bp, Triticum aestivum
  misc_feature (1)..(1672): Ceres Seq. ID no. 15225196
ttgctacacagaacatcctcaccgcataccactcttccctttccctgtacccgaatcatcatccgttccccatctcatccgttcccttgagagctgcagcggcgacatgggcggcggcggcgcagccggggatgccgatgggtgggcggatcaggaccaggggaacggcgggagccgcggcgggggtgaggcgaagcggtcggagatctatacctacgaggccggttggcacatctacggtatgaactggagcgtgcggcgggacaagaagtaccgactcgccatcgcaagttttctcgagcagctcgtcaatcgcgtggaggtggtccagctcgacgagtccacaggtgacatcgcccccgtgctctccttcgaccaccctttccctccccccaagtccatgttcgtcccggacccccaaggcctccgccccgatctgcttgccacctctgcagacctccttcgcatatggcgcatcacggacgacgacgccgctgccccgggcgctgccgactccaacaatggctccgtccgctgcaacggcgtggggagccccgctggtcagcagccgggcgtcaagctgtgctgcgagctcaacggcaaccgcaacagcgacttctgcggcccgctcacctcctttgactggaacgacgccgacccacgccgcatcggaacatcatccatcgataccacttgcaccatctgggacgttgaacgtgaggtagtcgacacccagctcatagcccatgacaaagaggtctatgacatagcctggggtggcgctggtgtctttgcatctgtttctgcggatggctcggtccgcgtgtttgatcttcgggataaggaacattccacaatcatctatgagagtagttctggcggcggctccaattctgctgctacggatggtggggctgtgttgccgacaccattggttaggctggggtggaacaagcaggacccaaggtatatggcaacaatcatcatggatagccccaaggtggtcgtgcttgacattcgctacccaacactgcctgtcgttgaactccaccgccatcatgctcctgtgaatgcaatcgcatgggcgcctcactcttcttgccacatttgcacagctggggatgactcgcaagcactgatatgggacctctcctccatgggcacggggaacaatagcggaggcaatggaaatggaaatggcaatgctgctgcagctgcagcagcagagggtggtcttgaccctatattggcttacactgcaggggcggaggtggagcagctgcagtggtcagctacccagcctgactgggttgccattgtattcgccaataaactgcagattctcagggtctgatttcttcattctagctttatcaatggtggggcagaaagaggcaaagaagcccatcatggatgatgagagttcaggcaatgggaggacggtaattttgcttttgctttagtgatgtatgttgcagacagctgatatgtgtgctgagttgctgatagaaatgatggttcactaggtagaagctggaattgacaatgaactgagttattaagagtaattagacttataggattagtgttggtgatactgaactaaattgctgttatttaaattgctcgactctagtactgctgttaacttgcttattgctgcaattgtcac

SEQ ID NO: 9307 - protein, 450 aa, Triticum aestivum
  misc_feature (1)..(450): Ceres Seq. ID no. 15225197
CYTEHPHRIPLFPFPVPESSSVPHLIRSLESCSGDMGGGGAAGDADGWADQDQGNGGSRGGGEAKRSEIYTYEAGWHIYGMNWSVRRDKKYRLAIASFLEQLVNRVEVVQLDESTGDIAPVLSFDHPFPPPKSMFVPDPQGLRPDLLATSADLLRIWRITDDDAAAPGAADSNNGSVRCNGVGSPAGQQPGVKLCCELNGNRNSDFCGPLTSFDWNDADPRRIGTSSIDTTCTIWDVEREVVDTQLIAHDKEVYDIAWGGAGVFASVSADGSVRVFDLRDKEHSTIIYESSSGGGSNSAATDGGAVLPTPLVRLGWNKQDPRYMATIIMDSPKVVVLDIRYPTLPVVELHRHHAPVNAIAWAPHSSCHICTAGDDSQALIWDLSSMGTGNNSGGNGNGNGNAAAAAAAEGGLDPILAYTAGAEVEQLQWSATQPDWVAIVFANKLQILRV

SEQ ID NO: 9308 - protein, 415 aa, Triticum aestivum
  misc_feature (1)..(415): Ceres Seq. ID no. 15225198
MGGGGAAGDADGWADQDQGNGGSRGGGEAKRSEIYTYEAGWHIYGMNWSVRRDKKYRLAIASFLEQLVNRVEVVQLDESTGDIAPVLSFDHPFPPPKSMFVPDPQGLRPDLLATSADLLRIWRITDDDAAAPGAADSNNGSVRCNGVGSPAGQQPGVKLCCELNGNRNSDFCGPLTSFDWNDADPRRIGTSSIDTTCTIWDVEREVVDTQLIAHDKEVYDIAWGGAGVFASVSADGSVRVFDLRDKEHSTIIYESSSGGGSNSAATDGGAVLPTPLVRLGWNKQDPRYMATIIMDSPKVVVLDIRYPTLPVVELHRHHAPVNAIAWAPHSSCHICTAGDDSQALIWDLSSMGTGNNSGGNGNGNGNAAAAAAAEGGLDPILAYTAGAEVEQLQWSATQPDWVAIVFANKLQILRV

SEQ ID NO: 9309 - protein, 370 aa, Triticum aestivum
  misc_feature (1)..(370): Ceres Seq. ID no. 15225199
MNWSVRRDKKYRLAIASFLEQLVNRVEVVQLDESTGDIAPVLSFDHPFPPPKSMFVPDPQGLRPDLLATSADLLRIWRITDDDAAAPGAADSNNGSVRCNGVGSPAGQQPGVKLCCELNGNRNSDFCGPLTSFDWNDADPRRIGTSSIDTTCTIWDVEREVVDTQLIAHDKEVYDIAWGGAGVFASVSADGSVRVFDLRDKEHSTIIYESSSGGGSNSAATDGGAVLPTPLVRLGWNKQDPRYMATIIMDSPKVVVLDIRYPTLPVVELHRHHAPVNAIAWAPHSSCHICTAGDDSQALIWDLSSMGTGNNSGGNGNGNGNAAAAAAAEGGLDPILAYTAGAEVEQLQWSATQPDWVAIVFANKLQILRV

SEQ ID NO: 9310 - protein, 415 aa, Triticum aestivum; identical to SEQ ID NO: 9308
  misc_feature (1)..(415): Ceres Seq. ID no. 16611624

SEQ ID NO: 9311 - DNA, 1217 bp, Triticum aestivum
  misc_feature (1)..(1217): Ceres Seq. ID no. 15225659
aagcggacaaggccctatccatccatccatccccatcagatcacctccccacacatctgtgcgccacccgaacgaaagctaagccaccagcagccatggcatctcgcgacgccgccaccttccagctctaccggcccatggcaatgccgacggcgacgctcatgccccagacgatggcaatgcccggcttctcgtcggccgaggccgcggacgacgccgtggtgagagtgccggcgccgagaacggcgggggcggcgaagggcgccaaggaccggcacagcaaggtgaacgggcgcgggcggcgcgtgcgcatgccgatcgtgtgcgcggcgcgcgtgttccagctcacccgcgagctggggctcaagtcggacgggcagaccgtggagtggctgctccggcaggccgagccgtccatcctggccgccaccggctccggcaccaccccggccgtcttctcctgctcctccgcgccctccatcgccgccgtctccctcctcgggaagcggccgcgcgaggaccacgagcacgaggcggcgccgtcgttctgggaggcgctgcaggcccggcccgtaccctggggcctctccccgtcgctggaggcgcaggcgtacgcgtcgtcggtggcgcaggggcaccaccaccacctgaacctgctctccgcgctctccggcgcctccaggcggccagaggaggagtcccggtgaccgaccgccgctgcagctagcgccgagccgcgcgcgctctctacgtgatcgcatgcgctgacctgccagtgccctgctgcctaattcttggagccaagctagccaggtgttcctgcttgcttgcctgctgctgtgtggtgtggcttgccctacgtactttatcattttcttttgcttcctttctcctttgcgtgcaccgtgtgttttcttttgcgtggtttttggtctgggaagaaagaatggagaatctgggcagcatcagagattccaaggtagcaactgtagatacaagcctgctagagatcttaccaccccatctcgtcggatttgtgattgtgcttgtcactagttattactacagtgtattacgccactgccacggctctgccattccctgctgtctgtgacaagtcgattgatctatctaacacagtgccactcttgtaccactcgattgttgttttgcgtcaatggaagtccctctatctgtaggaatcgttttgccgatgc

SEQ ID NO: 9312 - protein, 234 aa, Triticum aestivum
  misc_feature (1)..(234): Ceres Seq. ID no. 15225660
ADKALSIHPSPSDHLPTHLCATRTKAKPPAAMASRDAATFQLYRPMAMPTATLMPQTMAMPGFSSAEAADDAVVRVPAPRTAGAAKGAKDRHSKVNGRGRRVRMPIVCAARVFQLTRELGLKSDGQTVEWLLRQAEPSILAATGSGTTPAVFSCSSAPSIAAVSLLGKRPREDHEHEAAPSFWEALQARPVPWGLSPSLEAQAYASSVAQGHHHHLNLLSALSGASRRPEEESR

SEQ ID NO: 9313 - protein, 203 aa, Triticum aestivum
  misc_feature (1)..(203): Ceres Seq. ID no. 15225661
MASRDAATFQLYRPMAMPTATLMPQTMAMPGFSSAEAADDAVVRVPAPRTAGAAKGAKDRHSKVNGRGRRVRMPIVCAARVFQLTRELGLKSDGQTVEWLLRQAEPSILAATGSGTTPAVFSCSSAPSIAAVSLLGKRPREDHEHEAAPSFWEALQARPVPWGLSPSLEAQAYASSVAQGHHHHLNLLSALSGASRRPEEESR

SEQ ID NO: 9314 - protein, 189 aa, Triticum aestivum
  misc_feature (1)..(189): Ceres Seq. ID no. 15225662
MAMPTATLMPQTMAMPGFSSAEAADDAVVRVPAPRTAGAAKGAKDRHSKVNGRGRRVRMPIVCAARVFQLTRELGLKSDGQTVEWLLRQAEPSILAATGSGTTPAVFSCSSAPSIAAVSLLGKRPREDHEHEAAPSFWEALQARPVPWGLSPSLEAQAYASSVAQGHHHHLNLLSALSGASRRPEEESR

SEQ ID NO: 9315 - protein, 203 aa, Triticum aestivum; identical to SEQ ID NO: 9313
  misc_feature (1)..(203): Ceres Seq. ID no. 16625651

SEQ ID NO: 9316 - DNA, 617 bp, Triticum aestivum
  misc_feature (1)..(617): Ceres Seq. ID no. 15226315
acaccgatctagggtttcctgctagggttttggtccttcggtttcggcggcgcaagatggaggagggccacatctccagggactgcccccagggcggcggcggtggcggcggatacggcggtggtggctatggaggaggcggcggcggcggccgcgagtgctacaagtgcggcgaggagggccacatctccagggactgcccccagggcggtggtggtggcggcggcggcggcggctacggaggcggtggtggccgtggcggcggcggcggcggtggcggctgcttctcctgcggcgagtccggccacttctctcgcgagtgccccaacaaggcccactaggcggcacagctcttcagatctgagtgccccgtttaccctcgctcctttacctacctcctgattctgcagcaagtcataccctatacctatcagtactagtattagtcgccgtagcgtttccccctgctgctcgatccgagcttggttccagaagaattgctggtggtgtgttcgtcgttaagatccaagttattttgttgtctctctgtgatgaggacacagatctatctatgtgttggatggactaagttatcgaagtcaagtttggtttcttgt

SEQ ID NO: 9317 - protein, 112 aa, Triticum aestivum
  misc_feature (1)..(112): Ceres Seq. ID no. 15226316
TDLGFPARVLVLRFRRRKMEEGHISRDCPQGGGGGGGYGGGGYGGGGGGGRECYKCGEEGHISRDCPQGGGGGGGGGGYGGGGGRGGGGGGGGCFSCGESGHFSRECPNKAH

SEQ ID NO: 9318 - protein, 94 aa, Triticum aestivum
  misc_feature (1)..(94): Ceres Seq. ID no. 15226317
MEEGHISRDCPQGGGGGGGYGGGGYGGGGGGGRECYKCGEEGHISRDCPQGGGGGGGGGGYGGGGGRGGGGGGGGCFSCGESGHFSRECPNKAH

SEQ ID NO: 9319 - protein, 90 aa, Triticum aestivum
  misc_feature (1)..(90): Ceres Seq. ID no. 15226318
MEEAAAAAASATSAARRATSPGTAPRAVVVAAAAAATEAVVAVAAAAAVAAASPAASPATSLASAPTRPTRRHSSSDLSAPFTLAPLPTS

SEQ ID NO: 9320 - protein, 94 aa, Triticum aestivum; identical to SEQ ID NO: 9318
  misc_feature (1)..(94): Ceres Seq. ID no. 16625653

SEQ ID NO: 9321 - DNA, 1330 bp, Triticum aestivum
  misc_feature (1)..(1330): Ceres Seq. ID no. 15226378
attaaaactcggacaggtctccggcggtacgtgacgccaacctcgcgggaagcgccggcgtctgcgcgcgtgcgatcatgatgatgaggcgccagttatcggtctgcgtcctcctcctgctcgtgctcgcggggcagcagcaggcggcggccaagaagtacgccgccatcttcaacttcggggactccctcgtggacgccggcaacctcgtcgtggacggcatccccgagtacctcgccacggcgaagctgccgtatggcatgacctacttcgggtaccccaccggccgctgctccgacggccgcctcgtcgtcgacttcatcgcgcaggagctggggctgccgctgctgccgccgtcgaaggcgcgcaacgccacgttccaccacggcgccaacttcgccatcaccggggccacggcgctggacaccagctacttcgtggcgaaggggctgggcaagacggtgtggaactccggctccctgcacacccagatcaagtggctgcaggagatgaagcccaaaatctgcagctcccccgaagagtgcaggggcctgttccggcggtcgctgttcatcgtgggcgagttcggcggcaacgactacaactcgccgctcttcgcgttccgcccgctggaggaggtgcacgagttcgtgggggacgtcgtcaactccatcggcgagggaatcgagaagctgattgcggagggggccgtggacctggtggtgcccggggtgctcccgatcggctgcttcccggtgtacctgtccatcttccggaagcagccggagatgtacggcggcaagagcgggtgcatcaaggacctcaacacgctgtcgtgggtgcacaacgtggcgctgcagcgcaagatcgtggagctccggaagaagcactccgacgtgcgcatcatgtacgccgactactacacgcccaccatccagttcgtcctccacgccgagaaatgggggatgctgaggcagaagccgagggcgtgctgcggggcgccgggcgtcggggtgtacaacttcaacctgacgtccaagtgcggcgagcccggcgcgtacgcgtgcgacgacccgtccaaccactggagctgggacggcatccacctcacggaggcctcctacggccacatcgccaggggctggctctacggccccttcgccgacccgcccatcgtcggcaaccggaacctcgagtagcactgtagcagcagtagtacagggcttgtttttgcgtacatgcacatgggttactgtatgtagagaaaggaaaagaaatcaaagaacagacatgtcttgtgcagattaattaattattaattaattggttc

SEQ ID NO: 9322 - protein, 373 aa, Triticum aestivum
  misc_feature (1)..(373): Ceres Seq. ID no. 15226379
MMMRRQLSVCVLLLLVLAGQQQAAAKKYAAIFNFGDSLVDAGNLVVDGIPEYLATAKLPYGMTYFGYPTGRCSDGRLVVDFIAQELGLPLLPPSKARNATFHHGANFAITGATALDTSYFVAKGLGKTVWNSGSLHTQIKWLQEMKPKICSSPEECRGLFRRSLFIVGEFGGNDYNSPLFAFRPLEEVHEFVGDVVNSIGEGIEKLIAEGAVDLVVPGVLPIGCFPVYLSIFRKQPEMYGGKSGCIKDLNTLSWVHNVALQRKIVELRKKHSDVRIMYADYYTPTIQFVLHAEKWGMLRQKPRACCGAPGVGVYNFNLTSKCGEPGAYACDDPSNHWSWDGIHLTEASYGHIARGWLYGPFADPPIVGNRNLE

SEQ ID NO: 9323 - protein, 372 aa, Triticum aestivum
  misc_feature (1)..(372): Ceres Seq. ID no. 15226380
MMRRQLSVCVLLLLVLAGQQQAAAKKYAAIFNFGDSLVDAGNLVVDGIPEYLATAKLPYGMTYFGYPTGRCSDGRLVVDFIAQELGLPLLPPSKARNATFHHGANFAITGATALDTSYFVAKGLGKTVWNSGSLHTQIKWLQEMKPKICSSPEECRGLFRRSLFIVGEFGGNDYNSPLFAFRPLEEVHEFVGDVVNSIGEGIEKLIAEGAVDLVVPGVLPIGCFPVYLSIFRKQPEMYGGKSGCIKDLNTLSWVHNVALQRKIVELRKKHSDVRIMYADYYTPTIQFVLHAEKWGMLRQKPRACCGAPGVGVYNFNLTSKCGEPGAYACDDPSNHWSWDGIHLTEASYGHIARGWLYGPFADPPIVGNRNLE

SEQ ID NO: 9324 - protein, 371 aa, Triticum aestivum
  misc_feature (1)..(371): Ceres Seq. ID no. 15226381
MRRQLSVCVLLLLVLAGQQQAAAKKYAAIFNFGDSLVDAGNLVVDGIPEYLATAKLPYGMTYFGYPTGRCSDGRLVVDFIAQELGLPLLPPSKARNATFHHGANFAITGATALDTSYFVAKGLGKTVWNSGSLHTQIKWLQEMKPKICSSPEECRGLFRRSLFIVGEFGGNDYNSPLFAFRPLEEVHEFVGDVVNSIGEGIEKLIAEGAVDLVVPGVLPIGCFPVYLSIFRKQPEMYGGKSGCIKDLNTLSWVHNVALQRKIVELRKKHSDVRIMYADYYTPTIQFVLHAEKWGMLRQKPRACCGAPGVGVYNFNLTSKCGEPGAYACDDPSNHWSWDGIHLTEASYGHIARGWLYGPFADPPIVGNRNLE

SEQ ID NO: 9325 - protein, 371 aa, Triticum aestivum; identical to SEQ ID NO: 9324
  misc_feature (1)..(371): Ceres Seq. ID no. 16625654

SEQ ID NO: 9326 - DNA, 1340 bp, Triticum aestivum
  misc_feature (1)..(1340): Ceres Seq. ID no. 15226608
aaacattccactgttgcacacacccttgcccccgtcctccccccgcccgatcccccgcccctccgttttcggcgcggccgcgaggagagttcgtcggcggccgcgatgaggtcggccctgagccgcctgatccgttcctcctgctccgtctcgtcctcccgtctcagctctccagttttgttgaagaacggcaaggccttctcgagcgatgccacgcccagggattccgggcgggtcgacgagcctttcaaagtcgaggaggcagaacccgtgaaggtgccgccgccaccgccttctcctgataagctgcttgtgctaggtggaagtggcttcgttggttcacatgtttgcaaggaggctttggagaggggatttgttgtctctagtctaaatagatctggaaagccatcgacaagtgaatcttgggctgacaaagttatatggaaccaaggcaatcttcttgaacctgcttcactggaggatagtatggatggtgtctctgctgttgtatcctgtgttggaggctttgggtcaaattctcaaatgttcaaactgaatgggactgcaaacatcaatgccatcagggttgcagctgagaaaggcataaaaagatttgtgtatgtgtcagctgcagactttggtttagtgaattacttattgcaaggttattatgagggcaagagagctgctgaagctgaactgctgtcgaagtttacctatggaggagtgatactgcggcctggttttattcatggaactcgtcgagtgggtagcgtgaacataccccttggacttgtgggttcacctatgcaaatggtgctccaaaatgcaaaaccattaaccagattgccacttgtcggcccgatgctaactcctccagtgagtgctacctcggtagcgaaggtcgctgtaagagcagcgacggatccggtgttccctcctggtatcgtcgatgtgtatggcatcatgcgttacagcgagcagaagtaagcgcatgcttgtacaggacgataaggcgtgtctccacccatcttttttacctggtttttcctatttgctctaaatgtgtaagcagacatcacaaggccatgaggcctcagctacggccgcagattctctgacagttctatcctggcgtggccctgtttgcctgatctacttactaggcaaggatgctcaataaagaagcagttaacctcgagtttcctgttggaaactgtttttacatgcttgttgcttgtaagtgttccttttagttactgtagagagcaggttaagatttgtaacttcgagtttatgataaggaaaactctattcctggtcgtgtaccgattgtgggc

SEQ ID NO: 9327 - protein, 329 aa, Triticum aestivum
  misc_feature (1)..(329): Ceres Seq. ID no. 15226609
KHSTVAHTLAPVLPPPDPPPLRFRRGREESSSAAAMRSALSRLIRSSCSVSSSRLSSPVLLKNGKAFSSDATPRDSGRVDEPFKVEEAEPVKVPPPPPSPDKLLVLGGSGFVGSHVCKEALERGFVVSSLNRSGKPSTSESWADKVIWNQGNLLEPASLEDSMDGVSAVVSCVGGFGSNSQMFKLNGTANINAIRVAAEKGIKRFVYVSAADFGLVNYLLQGYYEGKRAAEAELLSKFTYGGVILRPGFIHGTRRVGSVNIPLGLVGSPMQMVLQNAKPLTRLPLVGPMLTPPVSATSVAKVAVRAATDPVFPPGIVDVYGIMRYSEQK

SEQ ID NO: 9328 - protein, 294 aa, Triticum aestivum
  misc_feature (1)..(294): Ceres Seq. ID no. 15226610
MRSALSRLIRSSCSVSSSRLSSPVLLKNGKAFSSDATPRDSGRVDEPFKVEEAEPVKVPPPPPSPDKLLVLGGSGFVGSHVCKEALERGFVVSSLNRSGKPSTSESWADKVIWNQGNLLEPASLEDSMDGVSAVVSCVGGFGSNSQMFKLNGTANINAIRVAAEKGIKRFVYVSAADFGLVNYLLQGYYEGKRAAEAELLSKFTYGGVILRPGFIHGTRRVGSVNIPLGLVGSPMQMVLQNAKPLTRLPLVGPMLTPPVSATSVAKVAVRAATDPVFPPGIVDVYGIMRYSEQK

SEQ ID NO: 9329 - protein, 167 aa, Triticum aestivum
  misc_feature (1)..(167): Ceres Seq. ID no. 15226611
MDGVSAVVSCVGGFGSNSQMFKLNGTANINAIRVAAEKGIKRFVYVSAADFGLVNYLLQGYYEGKRAAEAELLSKFTYGGVILRPGFIHGTRRVGSVNIPLGLVGSPMQMVLQNAKPLTRLPLVGPMLTPPVSATSVAKVAVRAATDPVFPPGIVDVYGIMRYSEQK

SEQ ID NO: 9330 - protein, 294 aa, Triticum aestivum; identical to SEQ ID NO: 9328
  misc_feature (1)..(294): Ceres Seq. ID no. 16625657

SEQ ID NO: 9331 - DNA, 416 bp, Triticum aestivum
  misc_feature (1)..(416): Ceres Seq. ID no. 4286894
atgaccccaccgtcgccccatcatgccgacgctcctcctcgccgcgctcgcgctcgccctggccctctcccacgccgccgccgaaggaggcgccgggttctacgacccggcgcgggtcacccangatctcctggtgccccaggtcagctcagccccctgcttccttccctccggccttgcctttccctgtgtgcggcgcgctcgctacctgtttgtcgatttgcttcttgacagcgccaggtttgtttgcttgtgcgcgcagggcgttcctgtacagcggcttcctctcgcacgccgagtgcgaccacctcatcaagctggccaaggggaggctggagaagtcgatggtggcggacawcgagtccgggaagagtgtcatgagtcaggtgcgcacaagctccggcaccttcttgtcc

SEQ ID NO: 9332 - protein, 138 aa, Triticum aestivum
  misc_feature (1)..(138): Ceres Seq. ID no. 4286895
  misc_feature (41)..(41): Xaa is any aa, unknown or other
  misc_feature (119)..(119): Xaa is any aa, unknown or other
DPTVAPSCRRSSSPRSRSPWPSPTPPPKEAPGSTTRRGSPXISWCPRSAQPPASFPPALPFPVCGALATCLSICFLTAPGLFACARRAFLYSGFLSHAECDHLIKLAKGRLEKSMVADXESGKSVMSQVRTSSGTFLS

SEQ ID NO: 9333 - protein, 131 aa, Triticum aestivum
  misc_feature (1)..(131): Ceres Seq. ID no. 4286896
  misc_feature (34)..(34): Xaa is any aa, unknown or other
  misc_feature (112)..(112): Xaa is any aa, unknown or other
MPTLLLAALALALALSHAAAEGGAGFYDPARVTXDLLVPQVSSAPCFLPSGLAFPCVRRARYLFVDLLLDSARFVCLCAQGVPVQRLPLARRVRPPHQAGQGEAGEVDGGGXRVREECHESGAHKLRHLLV

SEQ ID NO: 9334 - protein, 76 aa, Triticum aestivum
  misc_feature (1)..(76): Ceres Seq. ID no. 4286897
  misc_feature (42)..(42): Xaa is any aa, unknown or other
MTPPSPHHADAPPRRARARPGPLPRRRRRRRRVLRPGAGHPXSPGAPGQLSPLLPSLRPCLSLCAARSLPVCRFAS

SEQ ID NO: 9335 - DNA, 907 bp, Triticum aestivum
  misc_feature (1)..(907): Ceres Seq. ID no. 12593115
cttctccccccttttgttcgtctcctaaaccgccgccagcatggacgccaagaagaggtcgccgcccgccccctcggccgccggagccgcgccccccgcggccaacggatacttcaactccgtcttctccgcgccggcgtcgcctgcggcaaatccaagagacgccaggcagatggacctgtacacgatactgaacaagcagaaccccaaagggcagagtggtgggggcattgcaggtaatgccaaatcccatggcagccctactataggtcgtgttgcttaccaagatggaaaacagttttatccaaacgagtcctcagagtcaccttattttggctcgtctgtgcattacggtggccgggacttctatgacagctctccacacaagcaagctgatgaatcacccagaaattataaggaggataatgcggatggctccctggctaccagaggtgattggtggcaaggttcgctttactactaaaaatactttgcaatggactctcctactgtgaacaaggaataaaaaggagtacgtcgagctggtaggctgtagagttgacatgagtcatcaggcataagaaaagtcatagtggaactacatctgttccgtcggtggtggcagtatttagatgcatcagtcacctaggcagacgtagacgtaccatgtgtctcttttctttgccttactagatttgagtgatgaaatgtaatgggactggtagggcagcagcaagtaggtcctacaaaaagttgctgctattttgcaactgacgagatcacttgctgtatgcgttatgtatcctagttcgtggttgtgttttggtaatatttggatttgcacatctgtttcggtctaccatttgtttgctgacagaaccatgatatgaacttgtgacaatggtct

SEQ ID NO: 9336 - protein, 147 aa, Triticum aestivum
  misc_feature (1)..(147): Ceres Seq. ID no. 12593116
MDAKKRSPPAPSAAGAAPPAANGYFNSVFSAPASPAANPRDARQMDLYTILNKQNPKGQSGGGIAGNAKSHGSPTIGRVAYQDGKQFYPNESSESPYFGSSVHYGGRDFYDSSPHKQADESPRNYKEDNADGSLATRGDWWQGSLYY

SEQ ID NO: 9337 - protein, 103 aa, Triticum aestivum
  misc_feature (1)..(103): Ceres Seq. ID no. 12593117
MDLYTILNKQNPKGQSGGGIAGNAKSHGSPTIGRVAYQDGKQFYPNESSESPYFGSSVHYGGRDFYDSSPHKQADESPRNYKEDNADGSLATRGDWWQGSLYY

SEQ ID NO: 9338 - protein, 79 aa, Triticum aestivum
  misc_feature (1)..(79): Ceres Seq. ID no. 12593118
LLPPFVRLLNRRQHGRQEEVAARPLGRRSRAPRGQRILQLRLLRAGVACGKSKRRQADGPVHDTEQAEPQRAEWWGHCR

SEQ ID NO: 9339 - protein, 147 aa, Triticum aestivum; identical to SEQ ID NO: 9336
  misc_feature (1)..(147): Ceres Seq. ID no. 16625351

SEQ ID NO: 9340 - DNA, 1317 bp, Triticum aestivum
  misc_feature (1)..(1317): Ceres Seq. ID no. 12617080
atccagtccagcgctttctcctcgctcccaccccacccttcccctccaatagccaagcaagaactgggacacaagcaaagctttgccaagaggactaccaccagaggaggagacaaggaatccgccgcgctcgcttcccctccagcccaaccccaaccccaaccaggccccgcggcgaccacaagctcctccgctccccgcaacctcgcctcgccacgctcaggctgttgagtggccagaaatctggatatggatgtgcctgcggctccagccatggcatttaaagcctacaagtacaaagaggttcttgtcagggactacttgctcgcagactcgtatgctccatacgctgctgtgctcggggggatcctgatgtgcaaattggcctatgatttcacgcgcattatcagttcatttaacttcaaaggttatgcttctcttaacaatatgcagaagatcgaatggaacaacagggggatgtccactgtccatgcaatattcattacagttatgtcagtatacctagtgttcttctcgggtatgttttctgaccagctggatggaccagtaacagtgagaagttcaagcctctccagttttacattaggggtctctattgggtatttcattacagacattgccatgatatattggctttaccctgcccttggtggaatggagtatgttatccaccacatgctgtcacttatgtctacaatgtacgctatgctttctggggaagcacatgtatacatatacatgggtctcatcactgagactacaacgccaggaatcaatctaagatggttccttgatgttgctggaatgaagaactccaaagcttaccttgttaacggagttgcaatggttgttacttggctggttgcaaggataatcctgttcatgtacttgttttaccacatgtttgtacattatgaccagattaagaagatgaacaccttcggctattttctggtacttattgcgccttgcataatcttcgtgatgaatgtgctttggttctccaagatcctaaaaggcctcaagaagacgatggccaagaggcatgctgagtagtggaatgtgtgttcatgattaacgtacggccaccatccgatcatctgtagatttggttacatctgcatatagcttatgagtagtcagtcactactgtagcccatacctgtgatttcagctcggctgtcatgtttcggtgtatgactacccagccagcctttcctagacgctcgatttgtatatatgtttggttacggctgcatttacctatttgcatgttaataaatcttttagttgtgt

SEQ ID NO: 9341 - protein, 275 aa, Triticum aestivum
  misc_feature (1)..(275): Ceres Seq. ID no. 12617081
MDVPAAPAMAFKAYKYKEVLVRDYLLADSYAPYAAVLGGILMCKLAYDFTRIISSFNFKGYASLNNMQKIEWNNRGMSTVHAIFITVMSVYLVFFSGMFSDQLDGPVTVRSSSLSSFTLGVSIGYFITDIAMIYWLYPALGGMEYVIHHMLSLMSTMYAMLSGEAHVYIYMGLITETTTPGINLRWFLDVAGMKNSKAYLVNGVAMVVTWLVARIILFMYLFYHMFVHYDQIKKMNTFGYFLVLIAPCIIFVMNVLWFSKILKGLKKTMAKRHAE

SEQ ID NO: 9342 - protein, 267 aa, Triticum aestivum
  misc_feature (1)..(267): Ceres Seq. ID no. 12617082
MAFKAYKYKEVLVRDYLLADSYAPYAAVLGGILMCKLAYDFTRIISSFNFKGYASLNNMQKIEWNNRGMSTVHAIFITVMSVYLVFFSGMFSDQLDGPVTVRSSSLSSFTLGVSIGYFITDIAMIYWLYPALGGMEYVIHHMLSLMSTMYAMLSGEAHVYIYMGLITETTTPGINLRWFLDVAGMKNSKAYLVNGVAMVVTWLVARIILFMYLFYHMFVHYDQIKKMNTFGYFLVLIAPCIIFVMNVLWFSKILKGLKKTMAKRHAE

SEQ ID NO: 9343 - protein, 234 aa, Triticum aestivum
  misc_feature (1)..(234): Ceres Seq. ID no. 12617083
MCKLAYDFTRIISSFNFKGYASLNNMQKIEWNNRGMSTVHAIFITVMSVYLVFFSGMFSDQLDGPVTVRSSSLSSFTLGVSIGYFITDIAMIYWLYPALGGMEYVIHHMLSLMSTMYAMLSGEAHVYIYMGLITETTTPGINLRWFLDVAGMKNSKAYLVNGVAMVVTWLVARIILFMYLFYHMFVHYDQIKKMNTFGYFLVLIAPCIIFVMNVLWFSKILKGLKKTMAKRHAE

SEQ ID NO: 9344 - protein, 275 aa, Triticum aestivum; identical to SEQ ID NO: 9341
  misc_feature (1)..(275): Ceres Seq. ID no. 16625372

SEQ ID NO: 9345 - DNA, 911 bp, Triticum aestivum
  misc_feature (1)..(911): Ceres Seq. ID no. 12621905
cttccccgtgagctcgtgcgcctcgcagtcgtcgtgtggtagtcgcttcccccggctggactccttcctccgtgtccgtcgccttcgcctccccagatccggtccctatggcgaggaatccgggctgcgccgtctacataggtaacttggatgaaaaggtctcggagagggttttgtatgagattcttattcagatctctgggcaagacaaggcctcttcaaatgtcaatgttcctgtaacacctaaaatgaacccactaccaaatccacctcaaccaatgagatttggtgatactcctgtgtcacaacatagagtggtaaatggtaggattgcaggctatggtgtttctccaaatcattcttatgatttccattcccaagcatcaagtggggtagcaagtagaggattaagtgatggtacatatgattatagtagacgtgtatttggttctgttctgaatgatgttagccgtcgagctgacagacaaccagttccatacccgtcctactagcatactgagctccaatgaatgaaacatcggccagtgcagccattgttgtctcagcccttccgtagggtcatctgggtacttgccattacatccatgtaaatatggcttatggtagtgaatgtgcgtgtctgtctggttgttctgttgttttctgcatggtatggaggcctgtcgctgatggttaggttccatgccttatcttcctgataggatattgcccccactaatgttgctgtagtactttccctagtcatagggatggggttaccgtattctcagttcaaaatatgtgaactagtatgttatttgttgtttgtcatgtgagttggatctgtattatgttgggacatgaatgggtaaaaaaccctacaaatctgccatctgtctttaaacttatcc

SEQ ID NO: 9346 - protein, 134 aa, Triticum aestivum
  misc_feature (1)..(134): Ceres Seq. ID no. 12621906
MARNPGCAVYIGNLDEKVSERVLYEILIQISGQDKASSNVNVPVTPKMNPLPNPPQPMRFGDTPVSQHRVVNGRIAGYGVSPNHSYDFHSQASSGVASRGLSDGTYDYSRRVFGSVLNDVSRRADRQPVPYPSY

SEQ ID NO: 9347 - protein, 87 aa, Triticum aestivum
  misc_feature (1)..(87): Ceres Seq. ID no. 12621907
MNPLPNPPQPMRFGDTPVSQHRVVNGRIAGYGVSPNHSYDFHSQASSGVASRGLSDGTYDYSRRVFGSVLNDVSRRADRQPVPYPSY

SEQ ID NO: 9348 - protein, 77 aa, Triticum aestivum
  misc_feature (1)..(77): Ceres Seq. ID no. 12621908
MRFGDTPVSQHRVVNGRIAGYGVSPNHSYDFHSQASSGVASRGLSDGTYDYSRRVFGSVLNDVSRRADRQPVPYPSY

SEQ ID NO: 9349 - protein, 134 aa, Triticum aestivum; identical to SEQ ID NO: 9346
  misc_feature (1)..(134): Ceres Seq. ID no. 16611874

SEQ ID NO: 9350 - DNA, 841 bp, Triticum aestivum
  misc_feature (1)..(841): Ceres Seq. ID no. 12624232
ttgggcaatcattgtgatattttgtccagaatacacacaatttcttgctcagtatcaaagattccacatcgaagtgttaaacttggtacagtgcactcagtcctatggtgagagagctggggattaattgatcaaggactcaaacccatcatgacacaacatgctgccagtgagctgagtcgtcatgatgattacttggactttggcatatgcatatgttatgttagtttgcaagaggaatccctggttattagatcccttgttgttaccgaaggatcaatatgtgtgtgcattgagaacctacatcagtttggttgctttcctgatgattcacatcctccatatttttctctcgatgaatgctgctctatcaacagtattaaggaagtggttgtggatcagcgtgacaaggaatgcttgacattaattttgcacaaacacataaacgaaggaaaatttcacagcagcactggaaattcgcagaacaagcaagcagatgaaaattacacagtacatacatggaaactgaagtggttttctgaagaaactcttttgaagttcatttctgtacttagggctctttactctggagcagtttcttcgccgttacctgtaaagtgtatatcctgatgtgttagttcttgtagtcatgtagtgatttcattcatttgtttgggggttgtatttagctgttaatctgtacagtttgtccattagctctctaggttgtgcttcctttattcttttgatttatcaaatagttactcatcttaaagctgtacagaacagaggtaaactgagtgaatgagtgtaaatgcaattttggcaataagctgtttcg

SEQ ID NO: 9351 - protein, 159 aa, Triticum aestivum
  misc_feature (1)..(159): Ceres Seq. ID no. 12624233
MTQHAASELSRHDDYLDFGICICYVSLQEESLVIRSLVVTEGSICVCIENLHQFGCFPDDSHPPYFSLDECCSINSIKEVVVDQRDKECLTLILHKHINEGKFHSSTGNSQNKQADENYTVHTWKLKWFSEETLLKFISVLRALYSGAVSSPLPVKCIS

SEQ ID NO: 9352 - protein, 159 aa, Triticum aestivum; identical to SEQ ID NO: 9351
  misc_feature (1)..(159): Ceres Seq. ID no. 16625379

SEQ ID NO: 9353 - DNA, 658 bp, Triticum aestivum
  misc_feature (1)..(658): Ceres Seq. ID no. 13583811
tacattggggaatggcaagctggaagaacctaacagtgctgaaaatgtacctgccgatggagagatggtctcaagagtgaccgccgagcataatgattccttaactacgctaaaacgagccgcagcgactgctgtttcagcagctgctgcgaaggctaagctccttgctgagcaggaagaagatcaaattcgacggctagctgcactggtggtcgagaaactgctgcagaagacagaggcgaagatgtcattatttgcagatgttgagcatgtggccctgcgcacaagagaatacactgaaaagaccagaaagaagcttctgatggagcggaacgcaataatcgcagctcgcatgggcgcactgccatctaggccgaaccagcagggtgcagctgggaacagattgccgcccggatatggcgcccctgcagtaagaccgccgaacgcaatgccccggccgagcagctgagtcgatgaggtaaaacctgtcgcctcggtgatcgacctgtatacccgattcttttagaagcacacctcagaccaatcaggcataagttatgttgttgttgtagcattcatgtaggagcgtaccttatcgtgatctgtataaggaaaaaacccggccattttggctttggatgtgatgctctctccgtgc

SEQ ID NO: 9354 - protein, 155 aa, Triticum aestivum
  misc_feature (1)..(155): Ceres Seq. ID no. 13583812
TLGNGKLEEPNSAENVPADGEMVSRVTAEHNDSLTTLKRAAATAVSAAAAKAKLLAEQEEDQIRRLAALVVEKLLQKTEAKMSLFADVEHVALRTREYTEKTRKKLLMERNAIIAARMGALPSRPNQQGAAGNRLPPGYGAPAVRPPNAMPRPSS

SEQ ID NO: 9355 - protein, 134 aa, Triticum aestivum
  misc_feature (1)..(134): Ceres Seq. ID no. 13583813
MVSRVTAEHNDSLTTLKRAAATAVSAAAAKAKLLAEQEEDQIRRLAALVVEKLLQKTEAKMSLFADVEHVALRTREYTEKTRKKLLMERNAIIAARMGALPSRPNQQGAAGNRLPPGYGAPAVRPPNAMPRPSS

SEQ ID NO: 9356 - protein, 134 aa, Triticum aestivum; identical to SEQ ID NO: 9355
  misc_feature (1)..(134): Ceres Seq. ID no. 16625393

SEQ ID NO: 9357 - DNA, 1444 bp, Triticum aestivum
  misc_feature (1)..(1444): Ceres Seq. ID no. 13597581
acgcaacggtccaatcgacgagtttgaaacctaccctctccccaacggtcggcttcggagcggcacacatggcggtggcggcggcggcgggagacctggcggtgcttgacgcggagactctggcgctgctggggggagggcccgatatggcgccggtggccgtgtgcggcgagtgggagaccttcaaggagaacgtgcggccgctgaaacgcgggcggaacgtcggcctcctcaaccaagccctcaaggcgcacaccgaccccgcccagcgtgccgccctcctcgccgaacgcaggaggatgatcgaagcaatagaagagtaccaaggggaagatccgctccagccatgggtagactgcatcaaatgggttcaggagtcgttcccggccggcggggagttctcagggctggtcgtgatctacgagcagtgtgtgcgtgcattttggcacgatgagcggtacaaggatgatctccggtacctcaaagtctggttagaatatgctgggaactgttcggacgctgaggtgatattcaggttcctggagtccaaccggattggtgagggccatgctgttttctacattcgctatgcattgctaatggagtcgaagaacaaggttaagaaagttgacgagatctttaatcttggaatagctaggamagcaaagcctgtggagaagttggaaactacatacagggcatttcttgggagatcaaccagaaagaaggaacacgaggatgataccgcaagtgatgatccgcccgtacgcaaattcggtagtgacttgaaccgtggtgaaactagaggtcagcatgcagagaattcccacatgttggcaaaacctagggtaaagctgcaaagaatcgatgttaatacaccgatttcaatttacaaagagaacccattgccaagtcagggccttgagagagctaggagcaaagacagggcgtggaacacccttggaacacaagcagatagaaacaaagaaaataacatgatgcctgccagatggacctcgcacaagattccaccaaaggtagcagcacgacaagcagttccgccagctcgtgtcagctccattgaggtctttgtagatgaagaatgtgccgaggaaccagccccgcctcgagtgccaaagagtccaaaaccatctgttctgaagcttaggcaagcaacaagcaaaaaccttaagaaggaatcagaattgcttaaggagaatccgctgcgcaacttcccgctgagcagccttagataattaacagtaatattgttgacgacttgtttgaatctgttcctttatgccaaataagctttagactctaaagcttatagatgcaccaagcattgtaggctcgaatcgattgttgtggtccgtgtacactagtttgattgattaatcctcatcgaggtgaggattgaataaaatcttcagttttgtcacgc

SEQ ID NO: 9358 - protein, 417 aa, Triticum aestivum
  misc_feature (1)..(417): Ceres Seq. ID no. 15222140
  misc_feature (220)..(220): Xaa is any aa, unknown or other
ATVQSTSLKPTLSPTVGFGAAHMAVAAAAGDLAVLDAETLALLGGGPDMAPVAVCGEWETFKENVRPLKRGRNVGLLNQALKAHTDPAQRAALLAERRRMIEAIEEYQGEDPLQPWVDCIKWVQESFPAGGEFSGLVVIYEQCVRAFWHDERYKDDLRYLKVWLEYAGNCSDAEVIFRFLESNRIGEGHAVFYIRYALLMESKNKVKKVDEIFNLGIARXAKPVEKLETTYRAFLGRSTRKKEHEDDTASDDPPVRKFGSDLNRGETRGQHAENSHMLAKPRVKLQRIDVNTPISIYKENPLPSQGLERARSKDRAWNTLGTQADRNKENNMMPARWTSHKIPPKVAARQAVPPARVSSIEVFVDEECAEEPAPPRVPKSPKPSVLKLRQATSKNLKKESELLKENPLRNFPLSSLR

SEQ ID NO: 9359 - protein, 395 aa, Triticum aestivum
  misc_feature (1)..(395): Ceres Seq. ID no. 15222141
  misc_feature (198)..(198): Xaa is any aa, unknown or other
MAVAAAAGDLAVLDAETLALLGGGPDMAPVAVCGEWETFKENVRPLKRGRNVGLLNQALKAHTDPAQRAALLAERRRMIEAIEEYQGEDPLQPWVDCIKWVQESFPAGGEFSGLVVIYEQCVRAFWHDERYKDDLRYLKVWLEYAGNCSDAEVIFRFLESNRIGEGHAVFYIRYALLMESKNKVKKVDEIFNLGIARXAKPVEKLETTYRAFLGRSTRKKEHEDDTASDDPPVRKFGSDLNRGETRGQHAENSHMLAKPRVKLQRIDVNTPISIYKENPLPSQGLERARSKDRAWNTLGTQADRNKENNMMPARWTSHKIPPKVAARQAVPPARVSSIEVFVDEECAEEPAPPRVPKSPKPSVLKLRQATSKNLKKESELLKENPLRNFPLSSLR

SEQ ID NO: 9360 - protein, 369 aa, Triticum aestivum
  misc_feature (1)..(369): Ceres Seq. ID no. 15222142
  misc_feature (172)..(172): Xaa is any aa, unknown or other
MAPVAVCGEWETFKENVRPLKRGRNVGLLNQALKAHTDPAQRAALLAERRRMIEAIEEYQGEDPLQPWVDCIKWVQESFPAGGEFSGLVVIYEQCVRAFWHDERYKDDLRYLKVWLEYAGNCSDAEVIFRFLESNRIGEGHAVFYIRYALLMESKNKVKKVDEIFNLGIARXAKPVEKLETTYRAFLGRSTRKKEHEDDTASDDPPVRKFGSDLNRGETRGQHAENSHMLAKPRVKLQRIDVNTPISIYKENPLPSQGLERARSKDRAWNTLGTQADRNKENNMMPARWTSHKIPPKVAARQAVPPARVSSIEVFVDEECAEEPAPPRVPKSPKPSVLKLRQATSKNLKKESELLKENPLRNFPLSSLR

SEQ ID NO: 9361 - protein, 395 aa, Triticum aestivum
  misc_feature (1)..(395): Ceres Seq. ID no. 16611606
MAVAAAAGDLAVLDAETLALLGGGPDMAPVAVCGEWETFKENVRPLKRGRNVGLLNQALKAHTDPAQRAALLAERRRMIEAIEEYQGEDPLQPWVDCIKWVQESFPAGGEFSGLVVIYEQCVRAFWHDERYKDDLRYLKVWLEYAGNCSDAEVIFRFLESNRIGEGHAVFYIRYALLMESKNKVKKVDEIFNLGIARKAKPVEKLETTYRAFLGRSTRKKEHEDDTASDDPPVRKFGSDLNRGETRGQHAENSHMLAKPRVKLQRIDVNTPISIYKENPLPSQGLERARSKDRAWNTLGTQADRNKENNMMPARWTSHKIPPKVAARQAVPPARVSSIEVFVDEECAEEPAPPRVPKSPKPSVLKLRQATSKNLKKESELLKENPLRNFPLSSLR

SEQ ID NO: 9362 - DNA, 892 bp, Triticum aestivum
  misc_feature (1)..(892): Ceres Seq. ID no. 13661594
agattcaggtgatggcaatgctaatggcagtacaggcagtggtagatcagtaggaaatcatatggttaacccatcacaaattgggaaggcagagtcagttaatctccagtttggttcttttgggattagcgcgtggctgagtgacacaggcggtggcaccagccatgctggaagtgtagatgacctgagggctgatgggatcgagacaagcggtagatacttctcctcatgctgcagctcaccaaaaacgtcagactgcgcctccaaagagcatatggaggattattcagtctatggtagtgaagaggatgctgacgacccacctgatgctgaaactgatgaggatctaactgatgaagaaagggatgctcatgagattgaagcgggctccgtcgacgagcactccaccaagtctgacgaggagtacgacgacctagccatgcaggacgtgatggggaacggcaactgctccgacgacgacgacgagcaagctgcagggtacggcaccaggggctcacagcccatggaggagagcatccttggagcagatggcgccgtggtggagggcaggtaccaccacaacctggacctcttcacgatgtccaaggacgtcgccgccacaaagatgccgtgcgcgtgacacagcctaacccgaccaacccctgggggaagaaagacaccactgccacggttcactgtcagccgcggtgctcttgggcacattctccggtggtgcttaggagtctgcaccggttactgtacccatatgagcttatgttggtggttgtgactgttagaggatctcatgcttggctatatataggaatcctggggctttgcccttttgtcgaaactcgaataatgaaaagttgaaattgcattctgaatttgc

SEQ ID NO: 9363 - protein, 212 aa, Triticum aestivum
  misc_feature (1)..(212): Ceres Seq. ID no. 13661595
DSGDGNANGSTGSGRSVGNHMVNPSQIGKAESVNLQFGSFGISAWLSDTGGGTSHAGSVDDLRADGIETSGRYFSSCCSSPKTSDCASKEHMEDYSVYGSEEDADDPPDAETDEDLTDEERDAHEIEAGSVDEHSTKSDEEYDDLAMQDVMGNGNCSDDDDEQAAGYGTRGSQPMEESILGADGAVVEGRYHHNLDLFTMSKDVAATKMPCA

SEQ ID NO: 9364 - protein, 192 aa, Triticum aestivum
  misc_feature (1)..(192): Ceres Seq. ID no. 13661596
MVNPSQIGKAESVNLQFGSFGISAWLSDTGGGTSHAGSVDDLRADGIETSGRYFSSCCSSPKTSDCASKEHMEDYSVYGSEEDADDPPDAETDEDLTDEERDAHEIEAGSVDEHSTKSDEEYDDLAMQDVMGNGNCSDDDDEQAAGYGTRGSQPMEESILGADGAVVEGRYHHNLDLFTMSKDVAATKMPCA

SEQ ID NO: 9365 - protein, 121 aa, Triticum aestivum
  misc_feature (1)..(121): Ceres Seq. ID no. 13661597
MEDYSVYGSEEDADDPPDAETDEDLTDEERDAHEIEAGSVDEHSTKSDEEYDDLAMQDVMGNGNCSDDDDEQAAGYGTRGSQPMEESILGADGAVVEGRYHHNLDLFTMSKDVAATKMPCA

SEQ ID NO: 9366 - protein, 192 aa, Triticum aestivum; identical to SEQ ID NO: 9364
  misc_feature (1)..(192): Ceres Seq. ID no. 16625423

SEQ ID NO: 9367 - DNA, 639 bp, Triticum aestivum
  misc_feature (1)..(639): Ceres Seq. ID no. 14302329
atattatcaacaccgaatctcaaacacaaacacacacatctttcttcaaaaaaaaacttttgcttctcccaagaatctgaatctgcttcacttttgttcaaccatgatgaacatagacgatacgacatctccaatggcccacccgatcgttccatctcaacctccttccgaccaaacccaacaagatccaagttcgcccaatgaagcttcttctgttaccgacaagaaagatgatcaagcttttcccgaagagaaaccgaagcagaatcaagaagaagagagagtggacacagggagagagaagctaaagaagcaccggagagacgtcgccggaagagtttggatacctgacatatggggacaagaagagcttcttaaggactggatcgactgttcaacgtttgatacgtgtctagtccctgccggaatctcgtcggcacgtgcagctctcgtagacgaagctaggcgagctgcttcggcttctggtgggttacatagtcgttgcttgatctcccgctgaatttttatataatatcatatataaatgtggttcttgttcctcaataatatatgtaagccattattgatatattgttgatatagagtctttttcattttcccaataattatattggccct

SEQ ID NO: 9368 - protein, 172 aa, Triticum aestivum
  misc_feature (1)..(172): Ceres Seq. ID no. 14302330
YYQHRISNTNTHIFLQKKTFASPKNLNLLHFCSTMMNIDDTTSPMAHPIVPSQPPSDQTQQDPSSPNEASSVTDKKDDQAFPEEKPKQNQEEERVDTGREKLKKHRRDVAGRVWIPDIWGQEELLKDWIDCSTFDTCLVPAGISSARAALVDEARRAASASGGLHSRCLISR

SEQ ID NO: 9369 - protein, 138 aa, Triticum aestivum
  misc_feature (1)..(138): Ceres Seq. ID no. 14302331
MMNIDDTTSPMAHPIVPSQPPSDQTQQDPSSPNEASSVTDKKDDQAFPEEKPKQNQEEERVDTGREKLKKHRRDVAGRVWIPDIWGQEELLKDWIDCSTFDTCLVPAGISSARAALVDEARRAASASGGLHSRCLISR

SEQ ID NO: 9370 - protein, 137 aa, Triticum aestivum
  misc_feature (1)..(137): Ceres Seq. ID no. 14302332
MNIDDTTSPMAHPIVPSQPPSDQTQQDPSSPNEASSVTDKKDDQAFPEEKPKQNQEEERVDTGREKLKKHRRDVAGRVWIPDIWGQEELLKDWIDCSTFDTCLVPAGISSARAALVDEARRAASASGGLHSRCLISR

SEQ ID NO: 9371 - protein, 138 aa, Triticum aestivum; identical to SEQ ID NO: 9369
  misc_feature (1)..(138): Ceres Seq. ID no. 16625434

SEQ ID NO: 9372 - DNA, 1862 bp, Triticum aestivum
  misc_feature (1)..(1862): Ceres Seq. ID no. 14302451
cccatcccctctcttctctatagcttactagcagcagcgctctcttcttgctcttcgctatctagctccactttgctcgttgtcctctccctcttggatcgatccggccttcggcggccatgaattgcgccggggtcgccgatgggttgcctgcaggcgagccggataccggcgtcgtcgaccagccacggaggaggagctgcctgtagcgtagctgagctatagtgctcggtcgatctgctgcttcttgggggcgaggaagaagaataaccgaggcttactctcgacgacaggtgcttcgcacagtcgcgatgtttaggaaggacacgtcggacagaagcatccgtttcaagagaaggggcacaaggcggagccagataatttccggtgacgcacaccatggatccccagacatttgtgaggctctcagtcgggcagcttggcctgaggctccccggcgcaagtgccagaaaggctttccactgcgagatccggctccgaggcttcccggttcagttagctccggtgcctctggaaaattcttcagagtttcatcttgatccgcacgcgaatgcggcggtgttctccctggacgagcccggcctcaaggcgctgccgacgtcgaggtggttccgaaccccggagccgccgtacctcgagatcgctgtgtacgtgagcaggcgcgacggcggcgggcattgcgtcgggttgaagcggcggctggtcggggctgtcagggtggatgtcgggccggagtggcgcgacggcaagcctgtgctgcttcgccatagctggacgggcatcggcagggcggcggagctgcacgtgagagtgagggtggaggctgaccctcggtacgtgttccggttcgaggacgaggtcgcgctgaacccgcaggtggtccagctccatggcggcgccagccagcccatctttagctgcaagttcatccgcgacgtgaggcgggcgtcgcagccggatcatttgggcgggaagtattggtcgagctccggaagcggcgaagagaaggagacggagatggcggggaggaggagggagaggaagggctggaaggtggcgatccacgacctgtccggctccgccgtggccgcggcgttcatggccacgccgttcgtgccggcgacgggctccgacacggtggcgcggtccaacccaggcgcgtggctcatcgtccgcgccgacacaacgggatcgtcggagagctggcagccgtggggccggctggaggcgtggcgggagtgcgctgcgccggcgggcggcaaggacgccgtgtgccttcggctgcatctcctcccggagcggcgggacgcgtgcgtactcgtgtccgagacgcctctgagctgtgataagggcggggagttctccatcgacatggacagacagtcgatcctcccggaggacgcagtggcgtcggagacgacgtcgtcgtcgtactgcgcagcgagcatgggacagtcgtgcgcgggcggcggcttcgtgatgagctgcagcgtgcagggcgaggcggcgacgagcagcaggccgccgctggtgcacctcgccgcgcggcacgtcatgtgcatggaagacgcagccatgttcctcgcgcttgcggctgccgtcgacctcagtgtcaaggcgtgccggccgttccggagcaagacggcggcggctaagaagaagacggctgctggctcctcttcccccgattccctggagctcgacacatagattagctagagctagcagtcctcactcctcagtcaagcatcagatcatccatggtcactctgtaaatccacttgtttcgaccaaacttgttgaaaactctaccagttttttctaggcctaacctgtagacg

SEQ ID NO: 9373 - protein, 443 aa, Triticum aestivum
  misc_feature (1)..(443): Ceres Seq. ID no. 14302452
MDPQTFVRLSVGQLGLRLPGASARKAFHCEIRLRGFPVQLAPVPLENSSEFHLDPHANAAVFSLDEPGLKALPTSRWFRTPEPPYLEIAVYVSRRDGGGHCVGLKRRLVGAVRVDVGPEWRDGKPVLLRHSWTGIGRAAELHVRVRVEADPRYVFRFEDEVALNPQVVQLHGGASQPIFSCKFIRDVRRASQPDHLGGKYWSSSGSGEEKETEMAGRRRERKGWKVAIHDLSGSAVAAAFMATPFVPATGSDTVARSNPGAWLIVRADTTGSSESWQPWGRLEAWRECAAPAGGKDAVCLRLHLLPERRDACVLVSETPLSCDKGGEFSIDMDRQSILPEDAVASETTSSSYCAASMGQSCAGGGFVMSCSVQGEAATSSRPPLVHLAARHVMCMEDAAMFLALAAAVDLSVKACRPFRSKTAAAKKKTAAGSSSPDSLELDT

SEQ ID NO: 9374 - protein, 230 aa, Triticum aestivum
  misc_feature (1)..(230): Ceres Seq. ID no. 14302453
MAGRRRERKGWKVAIHDLSGSAVAAAFMATPFVPATGSDTVARSNPGAWLIVRADTTGSSESWQPWGRLEAWRECAAPAGGKDAVCLRLHLLPERRDACVLVSETPLSCDKGGEFSIDMDRQSILPEDAVASETTSSSYCAASMGQSCAGGGFVMSCSVQGEAATSSRPPLVHLAARHVMCMEDAAMFLALAAAVDLSVKACRPFRSKTAAAKKKTAAGSSSPDSLELDT

SEQ ID NO: 9375 - protein, 443 aa, Triticum aestivum; identical to SEQ ID NO: 9373
  misc_feature (1)..(443): Ceres Seq. ID no. 16611697

SEQ ID NO: 9376 - DNA, 1849 bp, Triticum aestivum
  misc_feature (1)..(1849): Ceres Seq. ID no. 14313280
ctcgcttgataaatctatatcccgcatgatgggcacaccatccgcaacacttccaccagtgccacagggctctgttggtgataaggaaacctattcagcacctgcagcagcaaaatttgtaaatagtcaatcgttaatgacgatgtcatcattaactgcatccccttcagtgcattctattactgaaatgtcagagaatagtggtggcgctggcaggaagattgcacacaacagaagtgtttctgaaccagactttggcaaaacaccaaaaccgggtgcgcaatcggataatacacagagcagtgcatcaggttcaagatttggttggattagctccacactgcagaagacaatgggatttgtttcaaaatcccgccaggcaaaattagggcaacagaacaagttttactatgatgagaagctgaagcgatgggtagaggaaggtgctgagattcctgccgaggagcctcctctcgctccacctccaacaaaatcctcctcataccagaatggcatgccagactataacttaaatggccctactagtggaatgcatactcctaatggagtggcagaacgaagatctccaaaacatgcagatcatggtttggggatgccgccaattccgcccagccagaaccagttttccgcgcgtggacgaacgggtgtccggtccagatatgtggacacattcaacaaggctggtgcaactggagcggcccagtcttataacagaccggctgctacatctgtgacaccacctaccggtgccaggttctttgtgcccacggcggctgctgtcgctgcagagcagatgcctagccaatcagtgcagacacgtggcgaaaccttccaacgggatgaccgctcatcctcaccgccagcggaaacatcattttcatcaccccctccagcagcacaattttcatcaccaatgtcatctgccattcagcggtacccgagcatggacaacattgctacaccgaaccaggcaccctggatgtccccgggaagtaacagcagctcattcgcatcaagatcacgggcagcatcatggagtgggacatactctgaccaattcagttccacggcagaggctaggtcacctgacggaccgactgtgccctcgccacaaatgcctggcagacccccctcgcacagtcattccaacagcaactcgtccgtgcagtttaccggcttgacggaggatcttcacgaggttgagctctgacaggtgaggtgacggctcagcatgactgccgtgtcagccatgattcagcccagacaaccttggttaaccgcggctcttccagcaaaccccaactaatttaaaaaggtgaaaggagctgttcagcgaatcaagtggtgattgccaggaaaggggtgaacagacctcccctccgattttgaatgaaaccttgggggaaaccgcactgaaaccgaggtgcgccaggcgcgtacgacataagtacagtcttggtttttttgagtatttagtagctatatgtttgttgttattatgttcactagagcgcaggagaaaagagccgggcatcctttttttcgttgcgtgcgaggaaaagcaacatctggatgccattgtacagataatccgcctctaccccctgattcattgttcgaaggcgcgaaccagttcaccccctcattcttttttggttttggtgagaatagaagatagagataatctgtctgttattctagtagtgtaagaaaggaaagcccgaccacgccgtagaaagtgatgttgctgttgttgctgttgttgttatacttgtatgtacttgttaccacacaccatggtgtattgtactactgtattattctttgg

SEQ ID NO: 9377 - protein, 409 aa, Triticum aestivum
  misc_feature (1)..(409): Ceres Seq. ID no. 14313281
SLDKSISRMMGTPSATLPPVPQGSVGDKETYSAPAAAKFVNSQSLMTMSSLTASPSVHSITEMSENSGGAGRKIAHNRSVSEPDFGKTPKPGAQSDNTQSSASGSRFGWISSTLQKTMGFVSKSRQAKLGQQNKFYYDEKLKRWVEEGAEIPAEEPPLAPPPTKSSSYQNGMPDYNLNGPTSGMHTPNGVAERRSPKHADHGLGMPPIPPSQNQFSARGRTGVRSRYVDTFNKAGATGAAQSYNRPAATSVTPPTGARFFVPTAAAVAAEQMPSQSVQTRGETFQRDDRSSSPPAETSFSSPPPAAQFSSPMSSAIQRYPSMDNIATPNQAPWMSPGSNSSSFASRSRAASWSGTYSDQFSSTAEARSPDGPTVPSPQMPGRPPSHSHSNSNSSVQFTGLTEDLHEVEL

SEQ ID NO: 9378 - protein, 401 aa, Triticum aestivum
  misc_feature (1)..(401): Ceres Seq. ID no. 14313282
MMGTPSATLPPVPQGSVGDKETYSAPAAAKFVNSQSLMTMSSLTASPSVHSITEMSENSGGAGRKIAHNRSVSEPDFGKTPKPGAQSDNTQSSASGSRFGWISSTLQKTMGFVSKSRQAKLGQQNKFYYDEKLKRWVEEGAEIPAEEPPLAPPPTKSSSYQNGMPDYNLNGPTSGMHTPNGVAERRSPKHADHGLGMPPIPPSQNQFSARGRTGVRSRYVDTFNKAGATGAAQSYNRPAATSVTPPTGARFFVPTAAAVAAEQMPSQSVQTRGETFQRDDRSSSPPAETSFSSPPPAAQFSSPMSSAIQRYPSMDNIATPNQAPWMSPGSNSSSFASRSRAASWSGTYSDQFSSTAEARSPDGPTVPSPQMPGRPPSHSHSNSNSSVQFTGLTEDLHEVEL

SEQ ID NO: 9379 - protein, 400 aa, Triticum aestivum
  misc_feature (1)..(400): Ceres Seq. ID no. 14313283
MGTPSATLPPVPQGSVGDKETYSAPAAAKFVNSQSLMTMSSLTASPSVHSITEMSENSGGAGRKIAHNRSVSEPDFGKTPKPGAQSDNTQSSASGSRFGWISSTLQKTMGFVSKSRQAKLGQQNKFYYDEKLKRWVEEGAEIPAEEPPLAPPPTKSSSYQNGMPDYNLNGPTSGMHTPNGVAERRSPKHADHGLGMPPIPPSQNQFSARGRTGVRSRYVDTFNKAGATGAAQSYNRPAATSVTPPTGARFFVPTAAAVAAEQMPSQSVQTRGETFQRDDRSSSPPAETSFSSPPPAAQFSSPMSSAIQRYPSMDNIATPNQAPWMSPGSNSSSFASRSRAASWSGTYSDQFSSTAEARSPDGPTVPSPQMPGRPPSHSHSNSNSSVQFTGLTEDLHEVEL

SEQ ID NO: 9380 - protein, 409 aa, Triticum aestivum; identical to SEQ ID NO: 9377
  misc_feature (1)..(409): Ceres Seq. ID no. 16625516

SEQ ID NO: 9381 - DNA, 2103 bp, Triticum aestivum
  misc_feature (1)..(2103): Ceres Seq. ID no. 15169569
ctattgaacctattctcggaccaaggccatctcctttgcagagaatgtcatcatatcctcaccaagagccgcaatacaataatattgaactgattcgtgggaatggtagcagatttacaccagctttgatgcagcatccaaatggatttataccacctcaaatgccgccaccccatcaacaaaacggaatgctcccaattcaacactctccaccccagttctcacaactacatgcccagatgcttggtgcccaacattctccgccacaaaatctgcagatgtttggtcctcggcatccttcaccacaaatgatgggtagatttgatccaaattttgttatgcctgacttgagtgatcccagagccagatcgatgttacaccatggaaggcatggcccgcgctatcctccccaaggttttgagcctggtaatatgagaatggataataggtggcagcggttcagatccaagtacatgtccactgaagaaattgagaacatcgcaaggatgcagaaagctgccactcagatcaccgatccatatattgatgattactatcatcaagcttgtttggccagaaaatcagcaggagcacaactgaagcactacttctgtccaaccttgatcagagatacatcttctcgtacacgcagtaaggatgagccacatgcgtatcttcaggttgatgctcttgggaggcttccattttcctccatccgcaggccccgtccgctccttgatgttgaagaagcctctgaaccaagtgatagcactactgaaaaatctgcttcaaaatctcttgaccaagagccgatgctggctgctagaatcacaattgaagatggcctttgcctactactggatgtggatgatatagatcgtttgcttcactttagtaaacagccagatggtggtttgcaacttagaaacagaagacaggctcttctcgagcagctggcagaatcactgcaattagttgatccacttacatctaataaggatgcacctctgtcgcaaaatgatgatctagtgtttctccgcatagtatctctaccgaagggccggaaactactttctcgttatattgatcttgttacttcaggtagtgagcttgcaagggttgtttgcatggcagttttccggaatctaagatctatattcggcaatttgccctctgatagcagcatagctgggaccacaactaaacttgtatgtgccgtatccacctgtgttgttcggatggacttgagtggactcagtgcttgtcttgcagctgttgcgtgttcgtcacagcaaccacctcttcgacctctgggatatgctgctggtgatggcgcttctgtcatcataaagtctctactggacagagctacagatcttcttactgatcaacatgtggcctctgcttacagcatgcagaaccgaactctatggcaggcatcatttgatgccttcttcgggctacttatggggtattgcatgagtaaatttgatactgtggttcatacagtgcaaatgcaacctgctgctgcagctgtgataagcagggaaacaccagtggagctgttgcgtgccagccttcctcacacaaatgagtatcagcgcaagcagttgctcagtttcgctcagcgcactgtgcctgtcaacagctctagttcccatgggtctggtaatgtgccgatggcatcagaatatgtccagagctgaaatagaagaacagagctgcttttcataatctatatacttgatatggttcttgcgagtggtgggaagaacatagatattgtggtgacgacaaagaatgacgacaaagaatgatggtctcggtcaaatattcaaaggatgatctttggccactttaggaagctcaaattgatgaattatgttgctgagacagaggtagagaaggctcctagaatggatgttgcccgaggggaacatgatcgctgaatgtcctaagcctttgttctgtcagccaaaacttttagggtgctttctgttgcattccattgcacgacctaaacttgttttagcgctttagttttgttattcgtatatgaattttgttgttttgctgatgacctgtaagctgtttttctgttct

SEQ ID NO: 9382 - protein, 567 aa, Triticum aestivum
  misc_feature (1)..(567): Ceres Seq. ID no. 15169570
IEPILGPRPSPLQRMSSYPHQEPQYNNIELIRGNGSRFTPALMQHPNGFIPPQMPPPHQQNGMLPIQHSPPQFSQLHAQMLGAQHSPPQNLQMFGPRHPSPQMMGRFDPNFVMPDLSDPRARSMLHHGRHGPRYPPQGFEPGNMRMDNRWQRFRSKYMSTEEIENIARMQKAATQITDPYIDDYYHQACLARKSAGAQLKHYFCPTLIRDTSSRTRSKDEPHAYLQVDALGRLPFSSIRRPRPLLDVEEASEPSDSTTEKSASKSLDQEPMLAARITIEDGLCLLLDVDDIDRLLHFSKQPDGGLQLRNRRQALLEQLAESLQLVDPLTSNKDAPLSQNDDLVFLRIVSLPKGRKLLSRYIDLVTSGSELARVVCMAVFRNLRSIFGNLPSDSSIAGTTTKLVCAVSTCVVRMDLSGLSACLAAVACSSQQPPLRPLGYAAGDGASVIIKSLLDRATDLLTDQHVASAYSMQNRTLWQASFDAFFGLLMGYCMSKFDTVVHTVQMQPAAAAVISRETPVELLRASLPHTNEYQRKQLLSFAQRTVPVNSSSSHGSGNVPMASEYVQS

SEQ ID NO: 9383 - protein, 553 aa, Triticum aestivum
  misc_feature (1)..(553): Ceres Seq. ID no. 15169571
MSSYPHQEPQYNNIELIRGNGSRFTPALMQHPNGFIPPQMPPPHQQNGMLPIQHSPPQFSQLHAQMLGAQHSPPQNLQMFGPRHPSPQMMGRFDPNFVMPDLSDPRARSMLHHGRHGPRYPPQGFEPGNMRMDNRWQRFRSKYMSTEEIENIARMQKAATQITDPYIDDYYHQACLARKSAGAQLKHYFCPTLIRDTSSRTRSKDEPHAYLQVDALGRLPFSSIRRPRPLLDVEEASEPSDSTTEKSASKSLDQEPMLAARITIEDGLCLLLDVDDIDRLLHFSKQPDGGLQLRNRRQALLEQLAESLQLVDPLTSNKDAPLSQNDDLVFLRIVSLPKGRKLLSRYIDLVTSGSELARVVCMAVFRNLRSIFGNLPSDSSIAGTTTKLVCAVSTCVVRMDLSGLSACLAAVACSSQQPPLRPLGYAAGDGASVIIKSLLDRATDLLTDQHVASAYSMQNRTLWQASFDAFFGLLMGYCMSKFDTVVHTVQMQPAAAAVISRETPVELLRASLPHTNEYQRKQLLSFAQRTVPVNSSSSHGSGNVPMASEYVQS

SEQ ID NO: 9384 - protein, 525 aa, Triticum aestivum
  misc_feature (1)..(525): Ceres Seq. ID no. 15169572
MQHPNGFIPPQMPPPHQQNGMLPIQHSPPQFSQLHAQMLGAQHSPPQNLQMFGPRHPSPQMMGRFDPNFVMPDLSDPRARSMLHHGRHGPRYPPQGFEPGNMRMDNRWQRFRSKYMSTEEIENIARMQKAATQITDPYIDDYYHQACLARKSAGAQLKHYFCPTLIRDTSSRTRSKDEPHAYLQVDALGRLPFSSIRRPRPLLDVEEASEPSDSTTEKSASKSLDQEPMLAARITIEDGLCLLLDVDDIDRLLHFSKQPDGGLQLRNRRQALLEQLAESLQLVDPLTSNKDAPLSQNDDLVFLRIVSLPKGRKLLSRYIDLVTSGSELARVVCMAVFRNLRSIFGNLPSDSSIAGTTTKLVCAVSTCVVRMDLSGLSACLAAVACSSQQPPLRPLGYAAGDGASVIIKSLLDRATDLLTDQHVASAYSMQNRTLWQASFDAFFGLLMGYCMSKFDTVVHTVQMQPAAAAVISRETPVELLRASLPHTNEYQRKQLLSFAQRTVPVNSSSSHGSGNVPMASEYVQS

SEQ ID NO: 9385 - protein, 553 aa, Triticum aestivum; identical to SEQ ID NO: 9383
  misc_feature (1)..(553): Ceres Seq. ID no. 16612028

SEQ ID NO: 9386 - DNA, 636 bp, Triticum aestivum
  misc_feature (1)..(636): Ceres Seq. ID no. 15173826
gcagcgaagcgcccgaaccgattcgagtgacactcctcttttttacctccctccctccctcccaaagtccaaaccctagccggctagacctcgcgatccaatccacatctaacccacccgtagagatttcggcggccgatgtctccgctgtcgccgccgcggtctccacgccccctcttgtactagcagtcagccagcgacctccctcacagcctaaaaatccacgccgtagcgacgactcgagggtcggacggcaggcggccatgagcagcgcgttcagcgaggagatactcgccgacaagctcgccaagctcaacaacacgcagcagtgcatcgaaacgctgtcgcattggtgcatttaccatcggaaggatgcagagctaattgtccaaacatgggccaagcagttccataattctggaaatgaacagaaggtccctttcctttatctggctaatgacatcctacagaacagtaagcgcatctacaaagttgaatcctcgatgttgattttgtatttgaactaagttcatgcccatgattcggtggatttgccatgaatttggttaagcttgcagtgatgtggcctcctgtttggaaaaattgaatattctgcctatcagtggtttcaaactc

SEQ ID NO: 9387 - protein, 174 aa, Triticum aestivum
  misc_feature (1)..(174): Ceres Seq. ID no. 15173827
SEAPEPIRVTLLFFTSLPPSQSPNPSRLDLAIQSTSNPPVEISAADVSAVAAAVSTPPLVLAVSQRPPSQPKNPRRSDDSRVGRQAAMSSAFSEEILADKLAKLNNTQQCIETLSHWCIYHRKDAELIVQTWAKQFHNSGNEQKVPFLYLANDILQNSKRIYKVESSMLILYLN

SEQ ID NO: 9388 - protein, 87 aa, Triticum aestivum
  misc_feature (1)..(87): Ceres Seq. ID no. 15173828
MSSAFSEEILADKLAKLNNTQQCIETLSHWCIYHRKDAELIVQTWAKQFHNSGNEQKVPFLYLANDILQNSKRIYKVESSMLILYLN

SEQ ID NO: 9389 - protein, 87 aa, Triticum aestivum; identical to SEQ ID NO: 9388
  misc_feature (1)..(87): Ceres Seq. ID no. 16625562

SEQ ID NO: 9390 - DNA, 870 bp, Triticum aestivum
  misc_feature (1)..(870): Ceres Seq. ID no. 15173847
caattcagattccccaagatcgtctcgtctcgtctcgaatcgcatccatgggttggcgttggcacgacgacggcgagggcgacggtggccgcggcgggctcggcgacatccccgacctcgccggccgaggcggcggcgaggcggcgcacgtcggcacgcgccgggtggtgcagtcccgctgccacacggaggaggtggagcccggccgcttcgtccgcaagtgcgagaagaccgagcagctcctccgcaactgcgtcggcaggccttctgaactggtggagtcgaaaactgagaacaccgaagaagatgtcacagatgaaatgaccggtggtgcctcgcattctcttggcttcccaacaaaagagccctttgcatttccaggacttcgcagtgacattgaagctattgagaaaggcttcggtagctttctggatgaagctgagcggatgaccaacgaattcttcaaatcttttggatttccaaccattcacgacggggactcgagaccgtttcctaggcaacctgcagagaggcatgttggagaaggtaccgtgaagaagcccaatgagaatgagtactcagaattcggtagccagataactgatgtgtaacaagctacagtcgtataacatgccttgttggagctgaagcctgagaagtgtgtttcgctgggtatctagggtactaaagtggtttctcttttggactcttcattatggttgtaatagtcgatgaagaatcatattttactaattttatctgcaactatcataagtgtatgacttttggttgtatgggcattatgtatagtactgttttcagacgcttcagctgtaacatggataaatctgaagatctcagggctgcaag

SEQ ID NO: 9391 - protein, 202 aa, Triticum aestivum
  misc_feature (1)..(202): Ceres Seq. ID no. 15173848
IQIPQDRLVSSRIASMGWRWHDDGEGDGGRGGLGDIPDLAGRGGGEAAHVGTRRVVQSRCHTEEVEPGRFVRKCEKTEQLLRNCVGRPSELVESKTENTEEDVTDEMTGGASHSLGFPTKEPFAFPGLRSDIEAIEKGFGSFLDEAERMTNEFFKSFGFPTIHDGDSRPFPRQPAERHVGEGTVKKPNENEYSEFGSQITDV

SEQ ID NO: 9392 - protein, 187 aa, Triticum aestivum
  misc_feature (1)..(187): Ceres Seq. ID no. 15173849
MGWRWHDDGEGDGGRGGLGDIPDLAGRGGGEAAHVGTRRVVQSRCHTEEVEPGRFVRKCEKTEQLLRNCVGRPSELVESKTENTEEDVTDEMTGGASHSLGFPTKEPFAFPGLRSDIEAIEKGFGSFLDEAERMTNEFFKSFGFPTIHDGDSRPFPRQPAERHVGEGTVKKPNENEYSEFGSQITDV

SEQ ID NO: 9393 - protein, 107 aa, Triticum aestivum
  misc_feature (1)..(107): Ceres Seq. ID no. 15173850
QFRFPKIVSSRLESHPWVGVGTTTARATVAAAGSATSPTSPAEAAARRRTSARAGWCSPAATRRRWSPAASSASARRPSSSSATASAGLLNWWSRKLRTPKKMSQMK

SEQ ID NO: 9394 - protein, 187 aa, Triticum aestivum; identical to SEQ ID NO: 9392
  misc_feature (1)..(187): Ceres Seq. ID no. 16625563

SEQ ID NO: 9395 - DNA, 1020 bp, Triticum aestivum
  misc_feature (1)..(1020): Ceres Seq. ID no. 15174048
cccggttttgcccctgccaagtcaattgaccaggagagggacgcgttcgtgttccctgctcttcgtcgacgccgacggggggtctccacggcgacataccggcggacggcggcggatccctcccggtgaaggcgacgttgttacatttgcaaatgtcaaattctgtcatgaataccactcagaaagttgatccaacggaaccagctgctaagattgctcagcaagcctcacagttcaaacgatggggacgcaagcatccatttgttcgatatggccttccgctcatttctttgacagtgtttggtgcggttggtctagctcatctcatacagggaagcaaagaagtaacaaaggaaaaggaggacatggaatgggaggtcgtagagaaaacaaaagctctgagccgaacaggaccagtggaaggggcttataagcctaagaagctctcgctagaggacgaactgaaggctttgcagcaaaaggtggacataaacagctacgactacaagagaattcccaaacaaaatgaaaacaagtgaagtaaagcactgtttatcatgctaaggggtgggggattttcttaaaatccttgaagtagtttcttggtcctgtttcttcatgagttccttgggatgttgtccaagtgtcaaaatgagattgcggagacattatcatcagaactctgtgcttcgtcagccattagcagtagagagttagtcgaggatccttgtgaaggcttgaaccgtaggaataatctttgtagccatggccgatgggagataggcattttcacggtccaccaagtgagtctttttttagttgatcgaatactgccttctttaccatggggccaataaattgtaggtaacacagtactctgacgtgcgagcaatcaaattttgtatgccatttcttggaagctaattagctgtgtcacgatcactaaacaaaggggaggaaacaggaaagttcatatttcatatgtatattttgagactccgaagctcgtattcggctgac

SEQ ID NO: 9396 - protein, 128 aa, Triticum aestivum
  misc_feature (1)..(128): Ceres Seq. ID no. 15174049
MSNSVMNTTQKVDPTEPAAKIAQQASQFKRWGRKHPFVRYGLPLISLTVFGAVGLAHLIQGSKEVTKEKEDMEWEVVEKTKALSRTGPVEGAYKPKKLSLEDELKALQQKVDINSYDYKRIPKQNENK

SEQ ID NO: 9397 - protein, 123 aa, Triticum aestivum
  misc_feature (1)..(123): Ceres Seq. ID no. 15174050
MNTTQKVDPTEPAAKIAQQASQFKRWGRKHPFVRYGLPLISLTVFGAVGLAHLIQGSKEVTKEKEDMEWEVVEKTKALSRTGPVEGAYKPKKLSLEDELKALQQKVDINSYDYKRIPKQNENK

SEQ ID NO: 9398 - protein, 74 aa, Triticum aestivum
  misc_feature (1)..(74): Ceres Seq. ID no. 15174051
MLSKCQNEIAETLSSELCASSAISSRELVEDPCEGLNRRNNLCSHGRWEIGIFTVHQVSLFLVDRILPSLPWGQ

SEQ ID NO: 9399 - protein, 128 aa, Triticum aestivum; identical to SEQ ID NO: 9396
  misc_feature (1)..(128): Ceres Seq. ID no. 16625566

SEQ ID NO: 9400 - DNA, 1127 bp, Triticum aestivum
  misc_feature (1)..(1127): Ceres Seq. ID no. 15179896
caaaccacacatgacacgccatctcccacatctctctccacaaaagacaggcagcctgcagttgcacagcctttccctccctctctcgcgtatcatctccgtcgacctctctccacaaagctagctagctcttgagtcttgagttcgtgtgaatttgccaagcataaagcacgagctagctctaggctgtcttgctgcctacttggtatacttgatatatacatacatacacaccagagagggagagagagaaaggggtagtcatgtgcgactacttcttgaagagggctgagggccaccagcaggccggagacctcaccgacatcgtccgagccggcggggccatgccggctggctctgcggatcccccgtcgacggccaccgagtggctgcagctgccggctgacccgatcctcttcccgctgccccagacgtcgtcctcggacggtgctgggccgagcagcgcagacgctctcggtgacccgttctccggcctcccggatgccttcagcaccgactacccctcctcctccggcagcgccgccgccgatttcttcgacgccgtccaggacgcgatgggtgtcggcatggccaagcaggtcggcttcgtcgacacgaccggctgcggcggcggtggaacaactgccggtgctggtggcgggttcctggacatgaggaatcaccatatgtttccaggggagatgccgatgcgcgggctgtcgccgtacgcgctgatgggcggtggcgcggcgaagctcggcgtgccgatggccgggcacgggctggcggctggcccgtgcgcgttcgacgccgtcgcagggctgcagatgtcgtcctcaccgcgtggcggggggatcaagcgcaggttcggcaccggccatcgttagctagctgtctgttcagtcagatctacacaagtgcgccttaatttcttcgattcctcccgacaagtgtaattaagcacggagttccttgtcgtcggggcactgttcagggtttcgtaatttagggaaagtttgcagctccatttcctcctaccgtgcttagtttttcctcattctgcaactcccaacaatgtaaggatcgagatgaaagaagaaacttaaatgcatcgccagctttgggac

SEQ ID NO: 9401 - protein, 207 aa, Triticum aestivum
  misc_feature (1)..(207): Ceres Seq. ID no. 15179897
MCDYFLKRAEGHQQAGDLTDIVRAGGAMPAGSADPPSTATEWLQLPADPILFPLPQTSSSDGAGPSSADALGDPFSGLPDAFSTDYPSSSGSAAADFFDAVQDAMGVGMAKQVGFVDTTGCGGGGTTAGAGGGFLDMRNHHMFPGEMPMRGLSPYALMGGGAAKLGVPMAGHGLAAGPCAFDAVAGLQMSSSPRGGGIKRRFGTGHR

SEQ ID NO: 9402 - protein, 180 aa, Triticum aestivum
  misc_feature (1)..(180): Ceres Seq. ID no. 15179898
MPAGSADPPSTATEWLQLPADPILFPLPQTSSSDGAGPSSADALGDPFSGLPDAFSTDYPSSSGSAAADFFDAVQDAMGVGMAKQVGFVDTTGCGGGGTTAGAGGGFLDMRNHHMFPGEMPMRGLSPYALMGGGAAKLGVPMAGHGLAAGPCAFDAVAGLQMSSSPRGGGIKRRFGTGHR

SEQ ID NO: 9403 - protein, 103 aa, Triticum aestivum
  misc_feature (1)..(103): Ceres Seq. ID no. 15179899
MGVGMAKQVGFVDTTGCGGGGTTAGAGGGFLDMRNHHMFPGEMPMRGLSPYALMGGGAAKLGVPMAGHGLAAGPCAFDAVAGLQMSSSPRGGGIKRRFGTGHR

SEQ ID NO: 9404 - protein, 207 aa, Triticum aestivum; identical to SEQ ID NO: 9401
  misc_feature (1)..(207): Ceres Seq. ID no. 16625626

SEQ ID NO: 9405 - DNA, 400 bp, Triticum aestivum
  misc_feature (1)..(400): Ceres Seq. ID no. 3654888
cgaaaaatctaagttcgtccacacaccgccgccgccgccgccgccgcgaacaggagagcgagaccgactccgccgccgcgatgagggccaagtggaagaagaagaggatgaggaggctcaagaggaagcgccgaaagatgaggcagcgatccaagtaggcgccttggagggaggggaagcatcatctgacatccaggcagcgaaactctgagggatgatggcattgtcccagtgattcctgatttgttatgcggttgtggctgtggaagttgccttacctgtgtttggtcaaatttagctgtttaatactagtctggctatgttccaggactgagttttatgtaatgtgaggattatatgtgtttgtgactgaattttatgcacctattatccttgaggt

SEQ ID NO: 9406 - protein, 69 aa, Triticum aestivum
  misc_feature (1)..(69): Ceres Seq. ID no. 3654889
EKSKFVHTPPPPPPPRTGERDRLRRRDEGQVEEEEDEEAQEEAPKDEAAIQVGALEGGEASSDIQAAKL

SEQ ID NO: 9407 - protein, 51 aa, Triticum aestivum
  misc_feature (1)..(51): Ceres Seq. ID no. 3654890
KNLSSSTHRRRRRRREQESETDSAAAMRAKWKKKRMRRLKRKRRKMRQRSK

SEQ ID NO: 9408 - DNA, 1168 bp, Triticum aestivum
  misc_feature (1)..(1168): Ceres Seq. ID no. 12388947
attcaggaaactgccattgaccagacaaaacgaaaacgtgacggcaaacagttccgtaccacctccctccactggtcgatccccatcccctgttccgttcatacatctacctccgccgccgctgccatgccgccggccggcagcctcaccgccgagcagctcagcttcttcgagaagaacggctacctggtgctggagtcgttatccagcgtggaggaggttcaggcgatgcgcgaccgcatggccgagctcgtcgacggcttcgacggcgctgactccagtgtcttctccaccaaggatcatcggcagttgaaggacgactacttctttaagagtgcggagaatatatctttcttcttcgaggaaaaggcatttggagatgatggatgcttgagacagccaaaggaactttcaatcaataaagttggacatgcactacatgaacatgaccctgtgttcaaaaagtttgctttctcggagagtatttctagcctgttctcttctttagggtacaagagacctgcagttattcaatctatgtacatctttaagcaaccgggcattggtggcgaggtggtgccacaccaggataatacattcctttatacagagcccctatcatgcacaggattgtggcttgcacttgaagatgcaacagttaccaatggttgcctatgggcaattcccggatcacataaaaatggtctaaaaaggcgaatgatcagagatgaaaatggtactcattttgatcgcccctctccactttatgaccagaaagagtttgtaccactggaaatgaaatcaggtgactttgttgttattcacgacgatcttgtacatcagagctttgagaacctttctccagtgtcaagacatgcactgagcttacatgtagttgacatggaaggatgtaaatggtccaaggacaactggatacagaggaaaactgcgcctgaaccgctctatgtgtcttagttcagccagttactaataaacaagcagtttcagttgcttatcatcggtgcagtgaaatttgggaacgccgcggagcaatgctggtttctttgtcgtctttcacatgtgtacactgtaaatactgaatacttgctgctgtgttgtcatgatatcagttactatctgcaatcctgaaataaatccaatttcctcc

SEQ ID NO: 9409 - protein, 324 aa, Triticum aestivum
  misc_feature (1)..(324): Ceres Seq. ID no. 12388948
IQETAIDQTKRKRDGKQFRTTSLHWSIPIPCSVHTSTSAAAAMPPAGSLTAEQLSFFEKNGYLVLESLSSVEEVQAMRDRMAELVDGFDGADSSVFSTKDHRQLKDDYFFKSAENISFFFEEKAFGDDGCLRQPKELSINKVGHALHEHDPVFKKFAFSESISSLFSSLGYKRPAVIQSMYIFKQPGIGGEVVPHQDNTFLYTEPLSCTGLWLALEDATVTNGCLWAIPGSHKNGLKRRMIRDENGTHFDRPSPLYDQKEFVPLEMKSGDFVVIHDDLVHQSFENLSPVSRHALSLHVVDMEGCKWSKDNWIQRKTAPEPLYVS

SEQ ID NO: 9410 - protein, 282 aa, Triticum aestivum
  misc_feature (1)..(282): Ceres Seq. ID no. 12388949
MPPAGSLTAEQLSFFEKNGYLVLESLSSVEEVQAMRDRMAELVDGFDGADSSVFSTKDHRQLKDDYFFKSAENISFFFEEKAFGDDGCLRQPKELSINKVGHALHEHDPVFKKFAFSESISSLFSSLGYKRPAVIQSMYIFKQPGIGGEVVPHQDNTFLYTEPLSCTGLWLALEDATVTNGCLWAIPGSHKNGLKRRMIRDENGTHFDRPSPLYDQKEFVPLEMKSGDFVVIHDDLVHQSFENLSPVSRHALSLHVVDMEGCKWSKDNWIQRKTAPEPLYVS

SEQ ID NO: 9411 - protein, 248 aa, Triticum aestivum
  misc_feature (1)..(248): Ceres Seq. ID no. 12388950
MRDRMAELVDGFDGADSSVFSTKDHRQLKDDYFFKSAENISFFFEEKAFGDDGCLRQPKELSINKVGHALHEHDPVFKKFAFSESISSLFSSLGYKRPAVIQSMYIFKQPGIGGEVVPHQDNTFLYTEPLSCTGLWLALEDATVTNGCLWAIPGSHKNGLKRRMIRDENGTHFDRPSPLYDQKEFVPLEMKSGDFVVIHDDLVHQSFENLSPVSRHALSLHVVDMEGCKWSKDNWIQRKTAPEPLYVS

SEQ ID NO: 9412 - DNA, 1548 bp, Triticum aestivum
  misc_feature (1)..(1548): Ceres Seq. ID no. 12460981
aacatcctaatcgaaaagtcgtcgcgttccatttcaaaaacgccacctttcgccccctgcatttccaccaaggcctacatgtctccgaccaccgccgcgtcccccgcgccggcgccggcaaccgacgcgcccccgaagccttcgccaggcgcgaagcgcagcctgatgggatccctcatcgacgccaccgcgctgctccgggcggcctccttcaaggaggactcgtacgtggccgcggcgctcccggcctcggacctccgcgcgctcgccgacctcagggcgctcctcgccacccacccggaccaaatctccatctggggcgtgccgctcaacccgcccagcgacgcccccgccgacgagcgcacggacgtggtgctcctcaagttcctccgcgccagggacttccgcgtccgcgacgcgcacgccatgctgctccgctgcgccgcctggcgggccgagttccgcgccgacgccgtgctggacgaggacctcgggttcaaggacctggagggcatcgtcgcctacatgcacggctgggaccgcgatggccacccggtctgctacaacgcctacggcgtgttcaaggaccgggacatgtacgaccgggtgttcggcgacggtgaccgcctcagccggttcctccggtggcgcgtccagatcatggagcgcggcgtgcgcgcgctccagctccgccccggcggcgtcaacgccatcatacaggtgaccgacctcaaggacatgccgaagcgagagctccgcgccgcgtccaaccagatactctccctcttccaggacaactaccccgagatggtcgcccgcaaggtgttcgtgaacgtaccgtggtacttctccgtgctgttctcgatgatctcgcccttcctcacggagcgcaccaagagcaagttcgtcatcgcgcgcgagggcaacgtcgcggagacgctcttcaagttcatccggccggagctggtgccggtgcagtacggcgggctgagccgcgccagcgagctggagaacgggccgcccaagccggcgtccgagttcaccatcaagggcggcgagaaggtcttcctagagatcgacggcatcgaggccggtgcaacaataacgtgggacctggtcgtcggcggctgggagctcgagtacggcgcggagtacgtgccggcgtcggagggcggctacacgctgtgcgtggagaggaccaagaaggtcccggccgccgccgacgagcccgtgcacaacgccttcacggccaaggagcccggcaagatggtgctctccatcgacaactccggctcacggaagcggaaggtcgccgcctaccgctacttcgtgcgcaagccgtcggcgtaggctgctcggctgctgtggccggcggcttgccggccggcttgtgctttgctttgctcgtctcggagaggaggttaatttaggtctatttaattagtgctataatgtgatatgcatgtattatgccatatgtagaatatattgtatgagccgtgagatcctacttgtcatcatcgttatataacgagttaagttttttcg

SEQ ID NO: 9413 - protein, 449 aa, Triticum aestivum
  misc_feature (1)..(449): Ceres Seq. ID no. 12460982
NILIEKSSRSISKTPPFAPCISTKAYMSPTTAASPAPAPATDAPPKPSPGAKRSLMGSLIDATALLRAASFKEDSYVAAALPASDLRALADLRALLATHPDQISIWGVPLNPPSDAPADERTDVVLLKFLRARDFRVRDAHAMLLRCAAWRAEFRADAVLDEDLGFKDLEGIVAYMHGWDRDGHPVCYNAYGVFKDRDMYDRVFGDGDRLSRFLRWRVQIMERGVRALQLRPGGVNAIIQVTDLKDMPKRELRAASNQILSLFQDNYPEMVARKVFVNVPWYFSVLFSMISPFLTERTKSKFVIAREGNVAETLFKFIRPELVPVQYGGLSRASELENGPPKPASEFTIKGGEKVFLEIDGIEAGATITWDLVVGGWELEYGAEYVPASEGGYTLCVERTKKVPAAADEPVHNAFTAKEPGKMVLSIDNSGSRKRKVAAYRYFVRKPSA

SEQ ID NO: 9414 - protein, 423 aa, Triticum aestivum
  misc_feature (1)..(423): Ceres Seq. ID no. 12460983
MSPTTAASPAPAPATDAPPKPSPGAKRSLMGSLIDATALLRAASFKEDSYVAAALPASDLRALADLRALLATHPDQISIWGVPLNPPSDAPADERTDVVLLKFLRARDFRVRDAHAMLLRCAAWRAEFRADAVLDEDLGFKDLEGIVAYMHGWDRDGHPVCYNAYGVFKDRDMYDRVFGDGDRLSRFLRWRVQIMERGVRALQLRPGGVNAIIQVTDLKDMPKRELRAASNQILSLFQDNYPEMVARKVFVNVPWYFSVLFSMISPFLTERTKSKFVIAREGNVAETLFKFIRPELVPVQYGGLSRASELENGPPKPASEFTIKGGEKVFLEIDGIEAGATITWDLVVGGWELEYGAEYVPASEGGYTLCVERTKKVPAAADEPVHNAFTAKEPGKMVLSIDNSGSRKRKVAAYRYFVRKPSA

SEQ ID NO: 9415 - protein, 394 aa, Triticum aestivum
  misc_feature (1)..(394): Ceres Seq. ID no. 12460984
MGSLIDATALLRAASFKEDSYVAAALPASDLRALADLRALLATHPDQISIWGVPLNPPSDAPADERTDVVLLKFLRARDFRVRDAHAMLLRCAAWRAEFRADAVLDEDLGFKDLEGIVAYMHGWDRDGHPVCYNAYGVFKDRDMYDRVFGDGDRLSRFLRWRVQIMERGVRALQLRPGGVNAIIQVTDLKDMPKRELRAASNQILSLFQDNYPEMVARKVFVNVPWYFSVLFSMISPFLTERTKSKFVIAREGNVAETLFKFIRPELVPVQYGGLSRASELENGPPKPASEFTIKGGEKVFLEIDGIEAGATITWDLVVGGWELEYGAEYVPASEGGYTLCVERTKKVPAAADEPVHNAFTAKEPGKMVLSIDNSGSRKRKVAAYRYFVRKPSA

SEQ ID NO: 9416 - DNA, 2304 bp, Triticum aestivum
  misc_feature (1)..(2304): Ceres Seq. ID no. 12465083
ggatctcacctctgccccttttctccatcctccgactcgccgccgccgccgggagccgacccaacaagcccgagcgccagccatggccatcggatctctcctcgcctcgcggctggccaggtccggccacgccctcgccacgcgcgccatcgctcaggctccccggacccacaatcatcatcacgcgacgtctcccctgctctccaggctcggagccgtggcccgcgctttcagctcaaggcccgccgccgccgatgtcatcgggatcgatttgggcacgacgaactcatgtgtctccgtcatggaaggaaagacaccacgggtgattgagaatgctgaaggtgcgaggacaacgccctccattgttgccacaaacagcaaaggcgagatcttgattggcatcactgccagtcgacaggcagtgacaaatgccgagaacacagttcgtgggtccaagcgcctgattggtagagcttttgatgacccccaaacacagaaggaaatgaagatggtgccttacaagattgtcaggggaacaaatggtgatgcctgggtggagatggctgggaagtcatactccccgagtcagattggtgcgtttgttcttaccaagatgaaggaaactgcagaggcttaccttggcaagtcggtctccaaggctgttattacagtcccagcttatttcaatgatgcccagcgtcaggccaccaaggatgctggtaggattgctgggttggaggtgatgaggattatcaatgagcccactgctgcagctctgtcgtatggaatgaacaacaaggagggcctgattgctgtatttgacttgggcggtggaacatttgatgtatcaatccttgagatttctaatggcgtttttgaggtcaaggcgaccaatggagatactttccttggtggtgaggactttgatgctacattgctcaactacctggttagtgaatataagaactctgacaacattgatctgagcaaggacaagttggccctgcaaaggctcagggaagctgctgagaaggcgaaggttgagctttcctcaactccacagactgaaatcaatctccccttcatcacagcagatgcctctggtgcgaagcatttcaacattaccttgaccagatcaaagtttgagtctcttgtgggcaacctcattgagagaactcgcatcccatgtacaaactgcctcaaggatgctggtgtttctgcaaaggagattgatgaggttctactggttggtggtatgacaagggtgccaaaggtccaggatattgtttctcagatattcggcaagtcgccaagcaagggtgtcaatcctgatgaggctgttgccatgggagctgccattcagggtggcattttgaggggtgatgtgaaggagctcttgctgctggatgtcacgcccctttcccttggtattgagactcttggaggcatcttcacaaggctaatcaacaggaacactacaattccaaccaagaagagccagaccttctccactgctgcagataaccagacgcaggttggaatcaaggtgcttcagggtgagagggagatggccacagataacaagcttcttggtgaattccagcttgaaggcattccaccggccccgaggggtatgccacagattgaggtcacttttgacattgatgccaatggtattgtcaaggtgtcagcaaaggacaagtccactggcaaagagcaggatatcaccatcaaatcttcaggtggtttgtctgacagtgacatcgagaagatggtgaaggaggcggagctaaattctcagagggatcaggaaaggaagtcgttgattgacctcaggaactctgcagataccaccatctacagcattgagaagagcgtcagcgagtacaaagacaaggtccctgctgaagttgtcacggagatccagtctgctgtctctgatctgagagcagcaatggctggcgacgattcggacgccatcaagcagaagctggaggcggcgaacaaggcagtctcaaagattggacagcacatgcagggtggtggcggcgctgccgccggcgacagcggcagcagtggtggtggcgaccagactccggaagctgaataccaggaccccaaggaggccaagatgtagatttgttctgcatcaggtttcttctacttttttgtgtacccagtttaggaagttaatatctttatcctacctccgtctgcttaggtttctaagagggctacgacgatacctgtaacattttggcaattgttcgaattgcggataaattgtgagaggagcaaactcat

SEQ ID NO: 9417 - protein, 711 aa, Triticum aestivum
  misc_feature (1)..(711): Ceres Seq. ID no. 12465084
DLTSAPFLHPPTRRRRREPTQQARAPAMAIGSLLASRLARSGHALATRAIAQAPRTHNHHHATSPLLSRLGAVARAFSSRPAAADVIGIDLGTTNSCVSVMEGKTPRVIENAEGARTTPSIVATNSKGEILIGITASRQAVTNAENTVRGSKRLIGRAFDDPQTQKEMKMVPYKIVRGTNGDAWVEMAGKSYSPSQIGAFVLTKMKETAEAYLGKSVSKAVITVPAYFNDAQRQATKDAGRIAGLEVMRIINEPTAAALSYGMNNKEGLIAVFDLGGGTFDVSILEISNGVFEVKATNGDTFLGGEDFDATLLNYLVSEYKNSDNIDLSKDKLALQRLREAAEKAKVELSSTPQTEINLPFITADASGAKHFNITLTRSKFESLVGNLIERTRIPCTNCLKDAGVSAKEIDEVLLVGGMTRVPKVQDIVSQIFGKSPSKGVNPDEAVAMGAAIQGGILRGDVKELLLLDVTPLSLGIETLGGIFTRLINRNTTIPTKKSQTFSTAADNQTQVGIKVLQGEREMATDNKLLGEFQLEGIPPAPRGMPQIEVTFDIDANGIVKVSAKDKSTGKEQDITIKSSGGLSDSDIEKMVKEAELNSQRDQERKSLIDLRNSADTTIYSIEKSVSEYKDKVPAEVVTEIQSAVSDLRAAMAGDDSDAIKQKLEAANKAVSKIGQHMQGGGGAAAGDSGSSGGGDQTPEAEYQDPKEAKM

SEQ ID NO: 9418 - protein, 684 aa, Triticum aestivum
  misc_feature (1)..(684): Ceres Seq. ID no. 12465085
MAIGSLLASRLARSGHALATRAIAQAPRTHNHHHATSPLLSRLGAVARAFSSRPAAADVIGIDLGTTNSCVSVMEGKTPRVIENAEGARTTPSIVATNSKGEILIGITASRQAVTNAENTVRGSKRLIGRAFDDPQTQKEMKMVPYKIVRGTNGDAWVEMAGKSYSPSQIGAFVLTKMKETAEAYLGKSVSKAVITVPAYFNDAQRQATKDAGRIAGLEVMRIINEPTAAALSYGMNNKEGLIAVFDLGGGTFDVSILEISNGVFEVKATNGDTFLGGEDFDATLLNYLVSEYKNSDNIDLSKDKLALQRLREAAEKAKVELSSTPQTEINLPFITADASGAKHFNITLTRSKFESLVGNLIERTRIPCTNCLKDAGVSAKEIDEVLLVGGMTRVPKVQDIVSQIFGKSPSKGVNPDEAVAMGAAIQGGILRGDVKELLLLDVTPLSLGIETLGGIFTRLINRNTTIPTKKSQTFSTAADNQTQVGIKVLQGEREMATDNKLLGEFQLEGIPPAPRGMPQIEVTFDIDANGIVKVSAKDKSTGKEQDITIKSSGGLSDSDIEKMVKEAELNSQRDQERKSLIDLRNSADTTIYSIEKSVSEYKDKVPAEVVTEIQSAVSDLRAAMAGDDSDAIKQKLEAANKAVSKIGQHMQGGGGAAAGDSGSSGGGDQTPEAEYQDPKEAKM

SEQ ID NO: 9419 - protein, 611 aa, Triticum aestivum
  misc_feature (1)..(611): Ceres Seq. ID no. 12465086
MEGKTPRVIENAEGARTTPSIVATNSKGEILIGITASRQAVTNAENTVRGSKRLIGRAFDDPQTQKEMKMVPYKIVRGTNGDAWVEMAGKSYSPSQIGAFVLTKMKETAEAYLGKSVSKAVITVPAYFNDAQRQATKDAGRIAGLEVMRIINEPTAAALSYGMNNKEGLIAVFDLGGGTFDVSILEISNGVFEVKATNGDTFLGGEDFDATLLNYLVSEYKNSDNIDLSKDKLALQRLREAAEKAKVELSSTPQTEINLPFITADASGAKHFNITLTRSKFESLVGNLIERTRIPCTNCLKDAGVSAKEIDEVLLVGGMTRVPKVQDIVSQIFGKSPSKGVNPDEAVAMGAAIQGGILRGDVKELLLLDVTPLSLGIETLGGIFTRLINRNTTIPTKKSQTFSTAADNQTQVGIKVLQGEREMATDNKLLGEFQLEGIPPAPRGMPQIEVTFDIDANGIVKVSAKDKSTGKEQDITIKSSGGLSDSDIEKMVKEAELNSQRDQERKSLIDLRNSADTTIYSIEKSVSEYKDKVPAEVVTEIQSAVSDLRAAMAGDDSDAIKQKLEAANKAVSKIGQHMQGGGGAAAGDSGSSGGGDQTPEAEYQDPKEAKM

SEQ ID NO: 9420 - DNA, 720 bp, Triticum aestivum
  misc_feature (1)..(720): Ceres Seq. ID no. 12584327
cgaaaagcaacaagggcagctcgcatttcgccgctcaccgagccctcgaggcgcgctatccatggccacgtactacccttccggcgcctccgcgctcctgctccccgtcccgcgaacccgcgccgcctttccgcagatgtttcccggtccggcttccgggaggagctctccctgtgcagctgttcggccgcagcggaggggaagggaagcggtgggcgtcgtgcgagcatgcttcaatcctttcggggacgaacgcatcctccgggaggccttgaaggagccagttgcattcatgggtggcgtgtttgctggtctcttgaggcttgacctgaatgaggatcctctcaaggagtgggtaactcgaacggtagaggcttctggaatagctgaagagaatagtgctgaggaatcaaatgagggagctcaaaatgatggaccccaacaaattgagattgagtgagtgtcatggaatattgttaccaggagaaagctatggatactgccattttgctaggtcaatgagcaatgaagtcttgccaccaatattttcaaactgggagaaacataggcttgcgtgtcttgacatgacagtgcagacaatggtgttattttacaagccttgacaattcatgcttgttcagcactgtacctttatcaagattgtcttcagcactgtacttttttcactgttcgattccagtttcctcagttggttcgggt

SEQ ID NO: 9421 - protein, 152 aa, Triticum aestivum
  misc_feature (1)..(152): Ceres Seq. ID no. 12584328
EKQQGQLAFRRSPSPRGALSMATYYPSGASALLLPVPRTRAAFPQMFPGPASGRSSPCAAVRPQRRGREAVGVVRACFNPFGDERILREALKEPVAFMGGVFAGLLRLDLNEDPLKEWVTRTVEASGIAEENSAEESNEGAQNDGPQQIEIE

SEQ ID NO: 9422 - protein, 132 aa, Triticum aestivum
  misc_feature (1)..(132): Ceres Seq. ID no. 12584329
MATYYPSGASALLLPVPRTRAAFPQMFPGPASGRSSPCAAVRPQRRGREAVGVVRACFNPFGDERILREALKEPVAFMGGVFAGLLRLDLNEDPLKEWVTRTVEASGIAEENSAEESNEGAQNDGPQQIEIE

SEQ ID NO: 9423 - protein, 108 aa, Triticum aestivum
  misc_feature (1)..(108): Ceres Seq. ID no. 12584330
RKATRAARISPLTEPSRRAIHGHVLPFRRLRAPAPRPANPRRLSADVSRSGFREELSLCSCSAAAEGKGSGGRRASMLQSFRGRTHPPGGLEGASCIHGWRVCWSLEA

SEQ ID NO: 9424 - DNA, 627 bp, Triticum aestivum
  misc_feature (1)..(627): Ceres Seq. ID no. 12584335
gccagttcattactcttctcctcgctcccagttttgaatcgagagagagagagagagagaggtgttgggtgcagctagtagctaggagcaagcaagcagatccaggaggagcagagcggagcggagatggcggactgggggccggtcgtggtcgcgacggtgctcttcgtgctgctgacgccggggctgctgttccagctgccggcgcagggccggatcgtggccttcggcagcatgcacaccggcggcctcgccatcctcatccacgccgtcatctacttcgccctcatcaccatcttcctcatcgccatcggggtccacatctacgccggctagaccccacacccactcctcttcgccgcacatctccgccgtgcgtgcctatgaagctttgctgtcccggaggcggcttctcttactattaccgcttgtattgtacttactgtgtagtgggtaccttctattattgtcttcttcatttaggtggccagagaaacaaatatggtttgttgtttgcctggctgggatttcgtttgagatggctgccagtggcatggcgctctccgtctctgggatgaaaatttatccagaaaggctggctggtgttgctgctgccgttgcccttgg

SEQ ID NO: 9425 - protein, 191 aa, Triticum aestivum
  misc_feature (1)..(191): Ceres Seq. ID no. 12584336
QFITLLLAPSFESRERERERCWVQLVARSKQADPGGAERSGDGGLGAGRGRDGALRAADAGAAVPAAGAGPDRGLRQHAHRRPRHPHPRRHLLRPHHHLPHRHRGPHLRRLDPTPTPLRRTSPPCVPMKLCCPGGGFSYYYRLYCTYCVVGTFYYCLLHLGGQRNKYGLLFAWLGFRLRWLPVAWRSPSLG

SEQ ID NO: 9426 - protein, 69 aa, Triticum aestivum
  misc_feature (1)..(69): Ceres Seq. ID no. 16625700
MADWGPVVVATVLFVLLTPGLLFQLPAQGRIVAFGSMHTGGLAILIHAVIYFALITIFLIAIGVHIYAG

SEQ ID NO: 9427 - DNA, 797 bp, Triticum aestivum
  misc_feature (1)..(797): Ceres Seq. ID no. 12584421
aacagggaagcgaaggcggcggcgcgggcgacgagcggagacgacgactgccggctgccgccttctctccggccaaagaaaccataggtggcaggaggatggaggtgaagctcaaggacctcgtcccggcagcgactaacacagtgaacacgacgttcatcgtggttgacaaggcgccacgcccgacccacgcaaacgcgcacggcagggaggagacatgcccgtcactagtggctgacgagacggcagcggtgcatttccttctgtggggcaccgagtgcgatgccttcgagtctggggacatcgtgcggctcacgagtggcatcttctcgtaccatagaggcaacaacctgttcttgcgcgccgggaagcgaggacgaatggagaaggtgggcgagttcaccatgatgttcgtcgagacgcccaacatgagcgaggtgaggtgggggcccgatccaggcgacccaaggaagatggtgcaggaggctgtcgtgtcgccctactcccaagtcttcaagccgctgcattgatgcctatcatttcaggcttccagctcattgttgctaagtctcattaaatcatatgcaatagtgcaatactaaccgtggtagtaaattatgcaacactaaccacttgctgagttttgtatgctttctccttaaaatgtcactgggccatcgttctaatgtcttgagatgtttctcatgtaaacggagctcatagaagatttagctagccaaaagtatatcccaagctgtgttgatgtgaacaacagtgtactttttccctgaaatgtc

SEQ ID NO: 9428 - protein, 175 aa, Triticum aestivum
  misc_feature (1)..(175): Ceres Seq. ID no. 12584422
QGSEGGGAGDERRRRLPAAAFSPAKETIGGRRMEVKLKDLVPAATNTVNTTFIVVDKAPRPTHANAHGREETCPSLVADETAAVHFLLWGTECDAFESGDIVRLTSGIFSYHRGNNLFLRAGKRGRMEKVGEFTMMFVETPNMSEVRWGPDPGDPRKMVQEAVVSPYSQVFKPLH

SEQ ID NO: 9429 - protein, 143 aa, Triticum aestivum
  misc_feature (1)..(143): Ceres Seq. ID no. 12584423
MEVKLKDLVPAATNTVNTTFIVVDKAPRPTHANAHGREETCPSLVADETAAVHFLLWGTECDAFESGDIVRLTSGIFSYHRGNNLFLRAGKRGRMEKVGEFTMMFVETPNMSEVRWGPDPGDPRKMVQEAVVSPYSQVFKPLH

SEQ ID NO: 9430 - DNA, 502 bp, Triticum aestivum
  misc_feature (1)..(502): Ceres Seq. ID no. 12584677
aatcacaaactcgagagcagagagcacctgcacagcaatcgccactgcactagttctactgttgcgtttctctgtgcgatttcgaccatgagctacccgccaccgggcaccgcttacccgcagccaggccaggaggcctacccgccgccggcgtacggcgctccgccgcctgtcgccgcctactaccagcagcagcaggccccgccgccggaaccggaggacagcggcgacggcttctggaaaggatgttgtgctgcgatttgctgctgctgtctgctcgacacgtgctgctgatcacaagagttcgtaccgccaacaccatgcaatcctacgatgatctacatctactaagagctgctcatatatagtttgtttctatcgtacgtagtaaatttttttttttttttgcggtttatcgtacgtactatttgtgctgttcggatcgagatttgtatgacggtgtactactacctccgttcggaaataaatgacgttttagttt

SEQ ID NO: 9431 - protein, 97 aa, Triticum aestivum
  misc_feature (1)..(97): Ceres Seq. ID no. 12584678
NHKLESREHLHSNRHCTSSTVAFLCAISTMSYPPPGTAYPQPGQEAYPPPAYGAPPPVAAYYQQQQAPPPEPEDSGDGFWKGCCAAICCCCLLDTCC

SEQ ID NO: 9432 - protein, 68 aa, Triticum aestivum
  misc_feature (1)..(68): Ceres Seq. ID no. 12584679
MSYPPPGTAYPQPGQEAYPPPAYGAPPPVAAYYQQQQAPPPEPEDSGDGFWKGCCAAICCCCLLDTCC

SEQ ID NO: 9433 - DNA, 574 bp, Triticum aestivum
  misc_feature (1)..(574): Ceres Seq. ID no. 12584760
cggaaaagctttttttttaaaaaaaaaaatttttttttttttttttttttttttttttttttttttttttttttttttttttttttttttttttttttttttttttttttttttttttttttttctaaagtacatgtttcttgtcatattatatataatttgtgatcaaagacaaacaaataatcagtatcaaataatcccgcactacaacctcgtaaaaggggaaaaaatgccttttggttactgccagttcgttacagaatgatttacatatcggttctttggctgttgtcatctctacttccctaaaacaaccttctaaggaaacttcttcttggtcttcttgattttacatcttttattctcccagcctttaacaaagcttcctcggcaattggtttccattgctgagcacaagaaaaacggaggcccatccctacagtcagcccacgcaacagttgtatcgtccgaagcaccgaaaataattcctctgggaagctctctactccaactttattcagtgaagaatcatcagcaaagggcgagagcacggttactccaggcggtaatcttg

SEQ ID NO: 9434 - protein, 87 aa, Triticum aestivum
  misc_feature (1)..(87): Ceres Seq. ID no. 12584761
GKAFFLKKKIFFFFFFFFFFFFFFFFFFFFFFFFFFFFFFFLKYMFLVILYIICDQRQTNNQYQIIPHYNLVKGEKMPFGYCQFVTE

SEQ ID NO: 9435 - protein, 54 aa, Triticum aestivum
  misc_feature (1)..(54): Ceres Seq. ID no. 12584762
RKSFFFKKKNFFFFFFFFFFFFFFFFFFFFFFFFFFFFFFFSKVHVSCHIIYNL

SEQ ID NO: 9436 - protein, 43 aa, Triticum aestivum
  misc_feature (1)..(43): Ceres Seq. ID no. 12584763
MFLVILYIICDQRQTNNQYQIIPHYNLVKGEKMPFGYCQFVTE

SEQ ID NO: 9437 - DNA, 735 bp, Triticum aestivum
  misc_feature (1)..(735): Ceres Seq. ID no. 12585079
gatacacagagcgagaggccgaggaagcgatagctctagcgataaggcactgacagatcaatggctgccacggcgtactccgtggccctcctcggcggagcgcgcctccccgccgccaccggcaacgccgccccccgctcctccgccttcctcccgcggcgcaacctccacccgctccgcctccaagatgcgcccaggccgtccctgctccgcgtgaaggccgcctccgacgacacgtcggcgagcggcgacgagatcatcgaggacctcaaggggaagtgggaggcgattgaggacaagccgaccttcctcctctacagcggcggcgccgtcgtcgcgctctggctcaccaccgtcgtcgtcggcgccatcaactccgtgccgttgctccccaagctcctggagctggttgggctcggctacaccgggtggttcgtgtaccgctacctcctcttcaaggaaagcaggaaagagttggccaccgacatcgaaagcttgaagaagaagattgccggaacagaataaactcaagttctctggaacgttttcgatggctcttttgtctgtccatgtaatggaagaacacctacttgcttagagtaccatccactgcatttgtgcgttacatacatatctgtatgaaaaaagaaatgcgctttggttggtgtgcggtgacaatagtgaaattgtatcagtttctggaagtcttctattgttttatatatcaatgtgttc

SEQ ID NO: 9438 - protein, 154 aa, Triticum aestivum
  misc_feature (1)..(154): Ceres Seq. ID no. 12585080
MAATAYSVALLGGARLPAATGNAAPRSSAFLPRRNLHPLRLQDAPRPSLLRVKAASDDTSASGDEIIEDLKGKWEAIEDKPTFLLYSGGAVVALWLTTVVVGAINSVPLLPKLLELVGLGYTGWFVYRYLLFKESRKELATDIESLKKKIAGTE

SEQ ID NO: 9439 - DNA, 652 bp, Triticum aestivum
  misc_feature (1)..(652): Ceres Seq. ID no. 12585117
caggctagctctcgcaagcatcgcaccagatccaccggtgggagcaaggaagcgagcgagatccacctaacccaccaatggcggccgctgcttcctccagcgcgtggaaggccaggtggctccgccccgaggtacgcgcgcaccgctccctcccatgttccttcatttcatctgatctagcttagtttagcgatctcgctcgctgggtttcggtagttgtgatggccatggtctcacgacggtggcatgttcttggcaggcgtacccgatcttcgcggcgacgggcgtggccgtggggatctgcgtgatgcagctggtgcgcaacatcaccaccaaccccgaggtgcgggtgaccaaggagaaccgggcggccggggtgctggacaaccacgacgagggccgccgctacgcgcgccaccccttcaggaggttcatcgacggcaagtccgccgagatcatgcccggcatcaacagcttcttcaccgacccaccaagaactagacgacgtcgtcgtcgtcggagagctcttgtccaaggaaggaaggaattcctccgcgagattttttttcccttctgaaggaatacagaaatactgttgttatttttcctcgaattcaagtatattattcgccatgactaattgtctggctgt

SEQ ID NO: 9440 - protein, 89 aa, Triticum aestivum
  misc_feature (1)..(89): Ceres Seq. ID no. 12585118
MQLVRNITTNPEVRVTKENRAAGVLDNHDEGRRYARHPFRRFIDGKSAEIMPGINSFFTDPPRTRRRRRRRRALVQGRKEFLREIFFPF

SEQ ID NO: 9441 - protein, 84 aa, Triticum aestivum
  misc_feature (1)..(84): Ceres Seq. ID no. 12585119
MFLAGVPDLRGDGRGRGDLRDAAGAQHHHQPRGAGDQGEPGGRGAGQPRRGPPLRAPPLQEVHRRQVRRDHARHQQLLHRPTKN

SEQ ID NO: 9442 - protein, 59 aa, Triticum aestivum
  misc_feature (1)..(59): Ceres Seq. ID no. 12585120
QASSRKHRTRSTGGSKEASEIHLTHQWRPLLPPARGRPGGSAPRYARTAPSHVPSFHLI

SEQ ID NO: 9443 - DNA, 942 bp, Triticum aestivum
  misc_feature (1)..(942): Ceres Seq. ID no. 12585712
acacgctccactttttgtactactagttctgttcccggctcgctcaccgctggtcaccactcaccgccggtcagccaccatgcggcactcctcgtccccacccttcctcttcctcctcctcctcgccgcctcgcctctggccgccaccgcggcgacgttcaactgcgtcggcggggtatacaaggccaacagcacctacgaggccaacctccgccgcctggccgccgtgctcccggccgagaccgcctcctcccaagacctccaggcgacccgcggcgtgggccactggcccaaccggccgcgggcctcctcgcggtgctactggggcgtcagcccttcctcctgcgccgcctgcgtcgccggcgccttccgggaggcgcagagggagtgcccgtacggcaagaaggcggtcgtcttcgcccgcaactgcacgctcagcctcgccgattttcctcgagctttcggcttccgtaccgtcagttggcttgacctcttgggcgcgggactcatatttcaagcaattggatttgcatggcttttcttcctgcttctgcaagaatggcgtgataaaagaagagcctctatgatgcgttgtagctctcttccatctggagatcagtagttgatcaacttggtcagactattggacatcagcctattcccaacaagaggaaacatgaaaaccgggctctacaacaacgctcacatgattacctgaatcgtgatttgatgttttttggtgaagaatggtttaatattgtcctccaatttgaatgttcgcattggttacgaataatttccaagggccagttcgtgcgttctgttgttttcatcttattcttggacccactcctttgatgctccaaatatgtaggagtgttcaatttgaatgggagtatgtatgtatttccaacctgccagaaacagagttccggcttgggg

SEQ ID NO: 9444 - protein, 206 aa, Triticum aestivum
  misc_feature (1)..(206): Ceres Seq. ID no. 12585713
HAPLFVLLVLFPARSPLVTTHRRSATMRHSSSPPFLFLLLLAASPLAATAATFNCVGGVYKANSTYEANLRRLAAVLPAETASSQDLQATRGVGHWPNRPRASSRCYWGVSPSSCAACVAGAFREAQRECPYGKKAVVFARNCTLSLADFPRAFGFRTVSWLDLLGAGLIFQAIGFAWLFFLLLQEWRDKRRASMMRCSSLPSGDQ

SEQ ID NO: 9445 - protein, 180 aa, Triticum aestivum
  misc_feature (1)..(180): Ceres Seq. ID no. 12585714
MRHSSSPPFLFLLLLAASPLAATAATFNCVGGVYKANSTYEANLRRLAAVLPAETASSQDLQATRGVGHWPNRPRASSRCYWGVSPSSCAACVAGAFREAQRECPYGKKAVVFARNCTLSLADFPRAFGFRTVSWLDLLGAGLIFQAIGFAWLFFLLLQEWRDKRRASMMRCSSLPSGDQ

SEQ ID NO: 9446 - protein, 162 aa, Triticum aestivum
  misc_feature (1)..(162): Ceres Seq. ID no. 12585715
TRSTFCTTSSVPGSLTAGHHSPPVSHHAALLVPTLPLPPPPRRLASGRHRGDVQLRRRGIQGQQHLRGQPPPPGRRAPGRDRLLPRPPGDPRRGPLAQPAAGLLAVLLGRQPFLLRRLRRRRLPGGAEGVPVRQEGGRLRPQLHAQPRRFSSSFRLPYRQLA

SEQ ID NO: 9447 - DNA, 680 bp, Triticum aestivum
  misc_feature (1)..(680): Ceres Seq. ID no. 12585856
aaaatcaggaaacaaagtggcagacatagacaagcagagcagctcgcggatcgatccatggagttcgacaagcgcacggggacgccttctccccttctcccccggagcgcctccaccgtcacctactgctgcgggcggtgcgggtacgacctgaagctgagctcgtcggcgcgggacacggcgggcatcgtgggggccggcgcgggcggggcgaggcggcggggctggcggagcgcggcggtggtggtgttcgacgccatcgacgacgcgcgcttcggccacctcgacgagttccgctgcctcgacctgcgcgcgcgccgcctcttcgcgcgccgcacgcgcctgctctgccgcaagtgcggcgcccacgtcggcttcggctacgacgacaacaccaccgccaccaggccgccgcggtaccacatcaagatccgcgccctccaccccgcctcctccgacgacgccttctccggcgccgccacgccgccgccgccgtcccacgcgccggcggatccgcgatcttgatctccattgcctgacatgcccgtgcgcacattccgtccctttttttgtgtttccattttctttcttcctttctctgtcgacgcaaacgggaattgccgttcgcgctcgctagtgtacaaactgatttgattgattggaaattggaatcaaatcgc

SEQ ID NO: 9448 - protein, 174 aa, Triticum aestivum
  misc_feature (1)..(174): Ceres Seq. ID no. 12585857
KIRKQSGRHRQAEQLADRSMEFDKRTGTPSPLLPRSASTVTYCCGRCGYDLKLSSSARDTAGIVGAGAGGARRRGWRSAAVVVFDAIDDARFGHLDEFRCLDLRARRLFARRTRLLCRKCGAHVGFGYDDNTTATRPPRYHIKIRALHPASSDDAFSGAATPPPPSHAPADPRS

SEQ ID NO: 9449 - protein, 155 aa, Triticum aestivum
  misc_feature (1)..(155): Ceres Seq. ID no. 12585858
MEFDKRTGTPSPLLPRSASTVTYCCGRCGYDLKLSSSARDTAGIVGAGAGGARRRGWRSAAVVVFDAIDDARFGHLDEFRCLDLRARRLFARRTRLLCRKCGAHVGFGYDDNTTATRPPRYHIKIRALHPASSDDAFSGAATPPPPSHAPADPRS

SEQ ID NO: 9450 - DNA, 675 bp, Triticum aestivum
  misc_feature (1)..(675): Ceres Seq. ID no. 12585873
aaaaaatttcacttttcccgtctccatctcactcagcggcggctgtgggcaacagaaccctagcgagtgaggcgggggcgcggtgcagcgccgcctcctccctccctcccaatctcctccctcgtctccctccctcccagtctcttttccgtccatggacagtggccgtgccgactaggtgagtggtggcagcgccatggagcgcggccgcacaacttcgatgtcggggaggagatgaggaggttcgtgatccctacggagtacctcgggcactgggcgttcgaggagctgctcagggaggccgaggaggagttcgggttccggcacgagggcgccctgcggattccctgtgacgtggaggtgttcgaaggcatcctgaggcttgtgggcgggaagaaggaggccgtgtcctactgctcttcttcggagcatgggatcttgtgcacatgatggtggtggccacttgttttctgtcgtccatttgttcccattcttggttcttggttcttctgagggggaataggaggaagggttcatcttctatgagctttacttgttccattattggttctcgattctttgaaggagaagaggaggaagagtccgtcgtctacaagagagcttcgatgagcttcacagttttacaagaggatgaaacgaaggagtcacatcttt

SEQ ID NO: 9451 - protein, 76 aa, Triticum aestivum
  misc_feature (1)..(76): Ceres Seq. ID no. 12585874
MMVVATCFLSSICSHSWFLVLLRGNRRKGSSSMSFTCSIIGSRFFEGEEEEESVVYKRASMSFTVLQEDETKESHL

SEQ ID NO: 9452 - protein, 75 aa, Triticum aestivum
  misc_feature (1)..(75): Ceres Seq. ID no. 12585875
MVVATCFLSSICSHSWFLVLLRGNRRKGSSSMSFTCSIIGSRFFEGEEEEESVVYKRASMSFTVLQEDETKESHL

SEQ ID NO: 9453 - protein, 71 aa, Triticum aestivum
  misc_feature (1)..(71): Ceres Seq. ID no. 12585876
MRRFVIPTEYLGHWAFEELLREAEEEFGFRHEGALRIPCDVEVFEGILRLVGGKKEAVSYCSSSEHGILCT

SEQ ID NO: 9454 - DNA, 876 bp, Triticum aestivum
  misc_feature (1)..(876): Ceres Seq. ID no. 12586195
aaagccatttcatcagatcccagccaagtacatcacgcacccacgagcacgaccaggcacgcacggcagaagcgatgggcgtcgtctcggcggtggcggacgcggtggtcgtcctcttctccctcaccatcgcggtgggggtcccgctcatcgacgcgcaggccgtcctctcgcacgacgcctacccggcgcagctgcgggacctcaagcgctggtacgccgccgagttcgacgactacctcatggcccacccgccgcccttcttccgcggcctcttgtgcctcgagctcgccttcctctggccgctctccgtcgccaccgtctacggcgtcctcgcccgccgccgatgggccgccaccacctccctcatggtcggcgtcaccaccctcacctccctgtcggcaatatttggcgagatgctgggctcagggaaggcaacgacgaagctgcttcagatgtatgttccatacgccgtgtttgctgtcattgccatcctgcgcggtctctgctcatgctcggcgccggcgtcgccggcatcttctgctcggaagaagagggtctagatttgatttgcatttctgacatttttcatcgataaaacattcaagtttcactaggtgtaagatgctttcttctgaggctgtaccgtccaacctactccctccgttcgggattacttgtctcgaaaatagatgtaactagaactaaaatacgtctagatacatccatctctacgacaagtaatttcgaacggagggagtatcattcaacacccagtggaaatggaatgtccatactgccattgttaaattttgttcacaatttgaaaaagattgtactgcatctgttctacttctatgatagatcatgttcaag

SEQ ID NO: 9455 - protein, 198 aa, Triticum aestivum
  misc_feature (1)..(198): Ceres Seq. ID no. 12586196
KPFHQIPAKYITHPRARPGTHGRSDGRRLGGGGRGGRPLLPHHRGGGPAHRRAGRPLARRLPGAAAGPQALVRRRVRRLPHGPPAALLPRPLVPRARLPLAALRRHRLRRPRPPPMGRHHLPHGRRHHPHLPVGNIWRDAGLREGNDEAASDVCSIRRVCCHCHPARSLLMLGAGVAGIFCSEEEGLDLICISDIFHR

SEQ ID NO: 9456 - protein, 193 aa, Triticum aestivum
  misc_feature (1)..(193): Ceres Seq. ID no. 12586197
KAISSDPSQVHHAPTSTTRHARQKRWASSRRWRTRWSSSSPSPSRWGSRSSTRRPSSRTTPTRRSCGTSSAGTPPSSTTTSWPTRRPSSAASCASSSPSSGRSPSPPSTASSPAADGPPPPPSWSASPPSPPCRQYLARCWAQGRQRRSCFRCMFHTPCLLSLPSCAVSAHARRRRRRHLLLGRRGSRFDLHF

SEQ ID NO: 9457 - protein, 186 aa, Triticum aestivum
  misc_feature (1)..(186): Ceres Seq. ID no. 12586198
SHFIRSQPSTSRTHEHDQARTAEAMGVVSAVADAVVVLFSLTIAVGVPLIDAQAVLSHDAYPAQLRDLKRWYAAEFDDYLMAHPPPFFRGLLCLELAFLWPLSVATVYGVLARRRWAATTSLMVGVTTLTSLSAIFGEMLGSGKATTKLLQMYVPYAVFAVIAILRGLCSCSAPASPASSARKKRV

SEQ ID NO: 9458 - protein, 162 aa, Triticum aestivum
  misc_feature (1)..(162): Ceres Seq. ID no. 12586199
MGVVSAVADAVVVLFSLTIAVGVPLIDAQAVLSHDAYPAQLRDLKRWYAAEFDDYLMAHPPPFFRGLLCLELAFLWPLSVATVYGVLARRRWAATTSLMVGVTTLTSLSAIFGEMLGSGKATTKLLQMYVPYAVFAVIAILRGLCSCSAPASPASSARKKRV

SEQ ID NO: 9459 - DNA, 735 bp, Triticum aestivum
  misc_feature (1)..(735): Ceres Seq. ID no. 12586244
atctcatccatcacacttcacacaagctactagaaagtactctgctcaatcggtcgatgagggtgtcaagcatggcgtccaagggtctcgttgtgtttgctgtcctgcttgctgcggctttcctcgtggccacagctgaacaaactcaggccaagaaggaagagactaaggccggtgttcagggttaccacggcggcggcagcggaggcggtggctaccatggcggcggcggcggcggcggggggtaccctggccacgggggcggcggcggcgggtatcctggccacggtggcggcggaggtggcggcggctaccctggccacggtggtggcggaggtggcggcggctaccctggccatgggggtggcggcggcggcggcggcagcggctgccggtaccagtgctgcgggcacgggcatagtggctgccgctgctgcgcaagccccaacgagatcccggagcccatgtatcgggcggaggtccgcaactaagtatcagatgctacatacggacgttgctacttgcctgcacgtagtaactactcgtatatgtggtcaataagaaggtaggtgcatgtatgtatgtatgtacgcatacgtatagattgcacagttatgttgatccaataatgccaggactctgtcctgatcgtgtattcaccctgtaagacttctctttcttgcataatacatgcaactgtcatgcatgtataacaaaatctcatgactcttgttc

SEQ ID NO: 9460 - protein, 162 aa, Triticum aestivum
  misc_feature (1)..(162): Ceres Seq. ID no. 12586245
LIHHTSHKLLESTLLNRSMRVSSMASKGLVVFAVLLAAAFLVATAEQTQAKKEETKAGVQGYHGGGSGGGGYHGGGGGGGGYPGHGGGGGGYPGHGGGGGGGGYPGHGGGGGGGGYPGHGGGGGGGGSGCRYQCCGHGHSGCRCCASPNEIPEPMYRAEVRN

SEQ ID NO: 9461 - protein, 144 aa, Triticum aestivum
  misc_feature (1)..(144): Ceres Seq. ID no. 12586246
MRVSSMASKGLVVFAVLLAAAFLVATAEQTQAKKEETKAGVQGYHGGGSGGGGYHGGGGGGGGYPGHGGGGGGYPGHGGGGGGGGYPGHGGGGGGGGYPGHGGGGGGGGSGCRYQCCGHGHSGCRCCASPNEIPEPMYRAEVRN

SEQ ID NO: 9462 - protein, 139 aa, Triticum aestivum
  misc_feature (1)..(139): Ceres Seq. ID no. 12586247
MASKGLVVFAVLLAAAFLVATAEQTQAKKEETKAGVQGYHGGGSGGGGYHGGGGGGGGYPGHGGGGGGYPGHGGGGGGGGYPGHGGGGGGGGYPGHGGGGGGGGSGCRYQCCGHGHSGCRCCASPNEIPEPMYRAEVRN

SEQ ID NO: 9463 - DNA, 462 bp, Triticum aestivum
  misc_feature (1)..(462): Ceres Seq. ID no. 12586264
atctctctcacgctcacacacctctgtttcttccgtctaccaagcaagcacacgtcctccatccatggactccaagatgttgcgctccgccgtcatcgcggccgccgtcgccgtgtccacgctcgcgggggtcgcctacgccgtcgacccgccggccgccgcgccgggccccggcggccacgccacctccggcgccgccgccctgtcgtcgtcgtccatggtcgccgccgtcctctgcccggccgtcgcgctcctcttcgccaacctgcgccactgatgatgattaaacaaagggaaccatgcatgctgttgttcaccgtcggcgtgcgtcgcgcggatatcggtctcgttgtatgcttgtacgtctttgctcgtttgatttctgactgatgatgattggtcggtccgcgcgttgtacaaccaatttaatgtaaaattctattgattcggttattaagtgtt

SEQ ID NO: 9464 - protein, 129 aa, Triticum aestivum
  misc_feature (1)..(129): Ceres Seq. ID no. 12586265
ISLTLTHLCFFRLPSKHTSSIHGLQDVALRRHRGRRRRVHARGGRLRRRPAGRRAGPRRPRHLRRRRPVVVVHGRRRPLPGRRAPLRQPAPLMMIKQREPCMLLFTVGVRRADIGLVVCLYVFARLISD

SEQ ID NO: 9465 - protein, 94 aa, Triticum aestivum
  misc_feature (1)..(94): Ceres Seq. ID no. 12586266
LSHAHTPLFLPSTKQAHVLHPWTPRCCAPPSSRPPSPCPRSRGSPTPSTRRPPRRAPAATPPPAPPPCRRRPWSPPSSARPSRSSSPTCATDDD

SEQ ID NO: 9466 - protein, 91 aa, Triticum aestivum
  misc_feature (1)..(91): Ceres Seq. ID no. 12586267
SLSRSHTSVSSVYQASTRPPSMDSKMLRSAVIAAAVAVSTLAGVAYAVDPPAAAPGPGGHATSGAAALSSSSMVAAVLCPAVALLFANLRH

SEQ ID NO: 9467 - protein, 70 aa, Triticum aestivum
  misc_feature (1)..(70): Ceres Seq. ID no. 12586268
MDSKMLRSAVIAAAVAVSTLAGVAYAVDPPAAAPGPGGHATSGAAALSSSSMVAAVLCPAVALLFANLRH

SEQ ID NO: 9468 - DNA, 1460 bp, Triticum aestivum
  misc_feature (1)..(1460): Ceres Seq. ID no. 12586366
aaagcgaaagaaaaagtgagacctcatctctttcagctaagctcgcaatggagctcccatggggtgccctgctgctggcgctgctcaccgtctccgcctcctccgccgtcgccacgctcgccgtcaccgctccccctccggcccctgcccgtgctcctgcccccgtcaccgcccctgccccggcccatgcatctcctcaagctcaggacgctgaaggtctgctgatgaacggcaacttcgagacggcgccgaggaaggtgaacaagaccctcatcgtgggccgccactcgctgccggggtggacgctgcggggccacgtcgagtacgtgtcggcggggccgcagccgggcggcatgttcttcgcggtgccgcacggcgtgcacgcgctccgcctcggcagccacgcgtcggcgtcgcagaacgtgtccgtgcgccccggctcgctctacgcgctcaccttcgccgccacccgcacctgcgcgcaggacgaggccctgcgcatcgccgtctccccgtcgctctccgcccccgccgacgtcgccgtccgcaccctctacagcgccgacaccgccgacacctgggcctggggcttccgcgcctcctcccctgtcgcggaggtcaccttcagcaaccccggcgtgcaggaggacgccgcgtgcggcccgctcatcgacgccgtcgccatcaaggagctccccacgccctaccccaccaaagataacctgatcaagaacgacggcttcgagatcgggccgcaggtgttcaagaactcgagcgttggcgtgctgctgccgccgaagcagaaggacgtgacgtcgccgctgccgggctggatcatcgagtcgctcaaggcggtgcggtacatcgacgccgcccacttctcggtgccggcgggccagtacgcggtggagctggtggcggggcgggagagcgccatcgcgcaggtcatccgcaccgtgcccaaccgcgcctacaacctctcctacgtcgtcggcgacgccaagaacggctgccacggctccatgctcgtggaggccttcgccgccaacgtcacgcagaaggtgccgttccagtccacgggcaagggcgggttcaaggcggcgagcctcaggttcgtggccgccggagtccgcaccagggtcaccttctacagctcctactaccacaccaaggtcaccgacggcgtctcgctctgcggccccgtgctcgaccaggtcaagatcatgccgctcaagctctagtcgtctatcggagtagaccagaagctcagatcaatcctgtcgcgttgattcggcatcgtcctctcgtctactatgtagtagtagtgggtatgtaatttgtgacattgatggacctctctctaatcgtgtgccagcgtggtggaatgaattgcctgtgctgtgcgtgaacctgcgagctccgtcaatttgtttgggatttgcgtaggctttctactagtt

SEQ ID NO: 9469 - protein, 412 aa, Triticum aestivum
  misc_feature (1)..(412): Ceres Seq. ID no. 12586367
SERKSETSSLSAKLAMELPWGALLLALLTVSASSAVATLAVTAPPPAPARAPAPVTAPAPAHASPQAQDAEGLLMNGNFETAPRKVNKTLIVGRHSLPGWTLRGHVEYVSAGPQPGGMFFAVPHGVHALRLGSHASASQNVSVRPGSLYALTFAATRTCAQDEALRIAVSPSLSAPADVAVRTLYSADTADTWAWGFRASSPVAEVTFSNPGVQEDAACGPLIDAVAIKELPTPYPTKDNLIKNDGFEIGPQVFKNSSVGVLLPPKQKDVTSPLPGWIIESLKAVRYIDAAHFSVPAGQYAVELVAGRESAIAQVIRTVPNRAYNLSYVVGDAKNGCHGSMLVEAFAANVTQKVPFQSTGKGGFKAASLRFVAAGVRTRVTFYSSYYHTKVTDGVSLCGPVLDQVKIMPLKL

SEQ ID NO: 9470 - protein, 397 aa, Triticum aestivum
  misc_feature (1)..(397): Ceres Seq. ID no. 12586368
MELPWGALLLALLTVSASSAVATLAVTAPPPAPARAPAPVTAPAPAHASPQAQDAEGLLMNGNFETAPRKVNKTLIVGRHSLPGWTLRGHVEYVSAGPQPGGMFFAVPHGVHALRLGSHASASQNVSVRPGSLYALTFAATRTCAQDEALRIAVSPSLSAPADVAVRTLYSADTADTWAWGFRASSPVAEVTFSNPGVQEDAACGPLIDAVAIKELPTPYPTKDNLIKNDGFEIGPQVFKNSSVGVLLPPKQKDVTSPLPGWIIESLKAVRYIDAAHFSVPAGQYAVELVAGRESAIAQVIRTVPNRAYNLSYVVGDAKNGCHGSMLVEAFAANVTQKVPFQSTGKGGFKAASLRFVAAGVRTRVTFYSSYYHTKVTDGVSLCGPVLDQVKIMPLKL

SEQ ID NO: 9471 - protein, 338 aa, Triticum aestivum
  misc_feature (1)..(338): Ceres Seq. ID no. 12586369
MNGNFETAPRKVNKTLIVGRHSLPGWTLRGHVEYVSAGPQPGGMFFAVPHGVHALRLGSHASASQNVSVRPGSLYALTFAATRTCAQDEALRIAVSPSLSAPADVAVRTLYSADTADTWAWGFRASSPVAEVTFSNPGVQEDAACGPLIDAVAIKELPTPYPTKDNLIKNDGFEIGPQVFKNSSVGVLLPPKQKDVTSPLPGWIIESLKAVRYIDAAHFSVPAGQYAVELVAGRESAIAQVIRTVPNRAYNLSYVVGDAKNGCHGSMLVEAFAANVTQKVPFQSTGKGGFKAASLRFVAAGVRTRVTFYSSYYHTKVTDGVSLCGPVLDQVKIMPLKL

SEQ ID NO: 9472 - DNA, 733 bp, Triticum aestivum
  misc_feature (1)..(733): Ceres Seq. ID no. 12586420
aaatccaattccaaccacaagctccaatcaaacacagcaaaccaatccagattaccatcggctatcaatcagcaggaggaggaaatcgctgctcgattggggaagaatcaagaggctcggcgaagatgcaggcggcgaaggagaaggtgaaggacggcgtgagcgcggtgaaggccaagaccaagatcacgcaggccaaggcgtcggagaaggcggaggcggccacggcgaggtcgcacgcggagcgggagctggcgcacgagcgcggcaaggccaaggtcgccgctgccaagatggagctgcaccaggacaaggcgctccaccgcgaggaggccatggagcaccgcatccacaagcacggcggccacggccggcaccaccacaagcacggcgtcggcatcgtggccgcgcccccgccggcgaccggggccggggcgggggcgtaccaccctcctcctgccgccggtggccactactactaattacagctaagcagctccatcgctagctagatgggcacatgcgtcgcgtgtgtgttatgcgatctcgcaagctaagtttgtattttgtactgttttgtgcttgacttacccacgcgtgctttttaagtttgcacttggtttgcacttaaagatgagagctgtatgtatgtatggatgcatgcaaccttgttgcttgctttcttttataatactctaaagagcggtaaatcaattacgtttgtttggcagcg

SEQ ID NO: 9473 - protein, 168 aa, Triticum aestivum
  misc_feature (1)..(168): Ceres Seq. ID no. 12586421
NPIPTTSSNQTQQTNPDYHRLSISRRRKSLLDWGRIKRLGEDAGGEGEGEGRRERGEGQDQDHAGQGVGEGGGGHGEVARGAGAGARARQGQGRRCQDGAAPGQGAPPRGGHGAPHPQARRPRPAPPQARRRHRGRAPAGDRGRGGGVPPSSCRRWPLLLITAKQLHR

SEQ ID NO: 9474 - protein, 159 aa, Triticum aestivum
  misc_feature (1)..(159): Ceres Seq. ID no. 12586422
IQFQPQAPIKHSKPIQITIGYQSAGGGNRCSIGEESRGSAKMQAAKEKVKDGVSAVKAKTKITQAKASEKAEAATARSHAERELAHERGKAKVAAAKMELHQDKALHREEAMEHRIHKHGGHGRHHHKHGVGIVAAPPPATGAGAGAYHPPPAAGGHYY

SEQ ID NO: 9475 - protein, 118 aa, Triticum aestivum
  misc_feature (1)..(118): Ceres Seq. ID no. 12586423
MQAAKEKVKDGVSAVKAKTKITQAKASEKAEAATARSHAERELAHERGKAKVAAAKMELHQDKALHREEAMEHRIHKHGGHGRHHHKHGVGIVAAPPPATGAGAGAYHPPPAAGGHYY

SEQ ID NO: 9476 - DNA, 2032 bp, Triticum aestivum
  misc_feature (1)..(2032): Ceres Seq. ID no. 12586556
catggccccgccgtcgtcttctcctccccttccggcatgggcggcggcgaacgccctcttccgacgccaccgccgccttctcccgctcctccttcccccggtgtccctctgcgccctcctacccgtcctctcccactgcctcgtttccggcctcgccggcaaccccttcgtcgcctcccgcctcatcctcgcctcctcgcgcctctccctcacattctccctcctcctcctctcccaccttccagcctcttccctctcgcccttctccttcaactcgctcatacgcgcgtcgcctccaggcctcaccctccgcctgttcgaacaaatgcgccgccggggcgttcccacggataactacaccctccccttcttgatccatgcctgttccggcagtgacatggcactgggacagtccctgcacgggaagagcgtccgtcttggttacagctcccacatcttcacgcagacggcgctgatgaacatgtactttgggtgtggcttggctgtttccgccggcagggtgttcgatgaaatgcaggcgagggatgtggttgcatggaccggcatggtctctggttatgtggactctggaatgcaccttcgagctgctgaggtctttaaggagatgagaggcggtgaggaggttacaaggcctaatgtagcaacgttggtgtcggttgcttctgcgtatgccagtcttggctccctggagtatgctaaggggctgcacggctatgtggagaaggtggggttgcgaggcgatttgattctgacgaatgcactgatggatatgtatggaaagtgtggtagcatagagtcagctcgtgctctgtttgatttcatgcatgagaaggacctactttcatggacaacgatgatttcagggttggcttctcatggacatggcaaagaagcggttgctttgtttttaagcatgcgcgaggtgggagtactgccggactcaaccaccttcatcgtggttctgtctgcttgtagccatgctggactggtggatgaggggatatcaatcttcaattccatggcgagtgagtacaaggtcaccccagatattaagcactatggttgcatggtggatcttttcagcagggcaggacttctttcacgtgcttatgagcttattgatagcatgccttttgagccaaacttggcaattcttggagcattgctgagtgcatgcagtgtcaataatgaactggagattggggaactagttctccagaagattgattctgtttgctcctataaaggaggtgctggtgtgcttctgtccaacatctacgctaaccagaacttatggcatgaagttgattccattagaaggaagataagaaatggtaccatacccagaaagccacctggtcagagttcggtggcatcagaagttcctttcatgagtttgtgatttggagcttttagagagaaatccactttgctgtcactgttaaccttgactggcaaaatggctgattttcatgcgaactggtaaggaagtctcatcaattacttttacgacaaggcagcttatgaagtactcccccgttcctaaatatttgtctttttagagattttaaatggactaccacatacggatgtatatagacatattttagagtgtggattcactcattttgcttcgtatgtagtcacttgttgaaatctctagaaagacaaatatttaggaacggagggagtagatatcagcgtattatgtcaaaaaaagtactccctccgagattccagcgtgtcacccattttgttactgtgttgaaattgttgtggcttttactattgagtattaagtagcgagcatattatacctgtggaatcataagcacattgaccgactgaacttctgtttgctttatctaacaggagatgaggtctctcggcagcatatttcgcagattagctttccatagcgcgcacagaaacactaaacttcatacgcaaacttcttcccctcaccaactcccccttatcatttaggagataagacaaagtataccatctc

SEQ ID NO: 9477 - protein, 473 aa, Triticum aestivum
  misc_feature (1)..(473): Ceres Seq. ID no. 12586557
MAPPSSSPPLPAWAAANALFRRHRRLLPLLLPPVSLCALLPVLSHCLVSGLAGNPFVASRLILASSRLSLTFSLLLLSHLPASSLSPFSFNSLIRASPPGLTLRLFEQMRRRGVPTDNYTLPFLIHACSGSDMALGQSLHGKSVRLGYSSHIFTQTALMNMYFGCGLAVSAGRVFDEMQARDVVAWTGMVSGYVDSGMHLRAAEVFKEMRGGEEVTRPNVATLVSVASAYASLGSLEYAKGLHGYVEKVGLRGDLILTNALMDMYGKCGSIESARALFDFMHEKDLLSWTTMISGLASHGHGKEAVALFLSMREVGVLPDSTTFIVVLSACSHAGLVDEGISIFNSMASEYKVTPDIKHYGCMVDLFSRAGLLSRAYELIDSMPFEPNLAILGALLSACSVNNELEIGELVLQKIDSVCSYKGGAGVLLSNIYANQNLWHEVDSIRRKIRNGTIPRKPPGQSSVASEVPFMSL

SEQ ID NO: 9478 - protein, 365 aa, Triticum aestivum
  misc_feature (1)..(365): Ceres Seq. ID no. 12586558
MRRRGVPTDNYTLPFLIHACSGSDMALGQSLHGKSVRLGYSSHIFTQTALMNMYFGCGLAVSAGRVFDEMQARDVVAWTGMVSGYVDSGMHLRAAEVFKEMRGGEEVTRPNVATLVSVASAYASLGSLEYAKGLHGYVEKVGLRGDLILTNALMDMYGKCGSIESARALFDFMHEKDLLSWTTMISGLASHGHGKEAVALFLSMREVGVLPDSTTFIVVLSACSHAGLVDEGISIFNSMASEYKVTPDIKHYGCMVDLFSRAGLLSRAYELIDSMPFEPNLAILGALLSACSVNNELEIGELVLQKIDSVCSYKGGAGVLLSNIYANQNLWHEVDSIRRKIRNGTIPRKPPGQSSVASEVPFMSL

SEQ ID NO: 9479 - protein, 341 aa, Triticum aestivum
  misc_feature (1)..(341): Ceres Seq. ID no. 12586559
MALGQSLHGKSVRLGYSSHIFTQTALMNMYFGCGLAVSAGRVFDEMQARDVVAWTGMVSGYVDSGMHLRAAEVFKEMRGGEEVTRPNVATLVSVASAYASLGSLEYAKGLHGYVEKVGLRGDLILTNALMDMYGKCGSIESARALFDFMHEKDLLSWTTMISGLASHGHGKEAVALFLSMREVGVLPDSTTFIVVLSACSHAGLVDEGISIFNSMASEYKVTPDIKHYGCMVDLFSRAGLLSRAYELIDSMPFEPNLAILGALLSACSVNNELEIGELVLQKIDSVCSYKGGAGVLLSNIYANQNLWHEVDSIRRKIRNGTIPRKPPGQSSVASEVPFMSL

SEQ ID NO: 9480 - DNA, 1188 bp, Triticum aestivum
  misc_feature (1)..(1188): Ceres Seq. ID no. 12586854
gtcgcagaacagtccgccacgcgaacaccacagcccaaacctcgcgaaccaaaccctgcacagcagatggcgcccgtggcgggcagcagcttctttcaggaagcgcggctcccggagcagcgggccgtcgagggcgtcgccttccccgcggtgctcgtcccgaccgccgggcccccggggccgggagaggggagcctcgacgagttcctggccgccgtgcggtcggagcgggcgtcccgggtggagccgctgctgcgggaggcaggggcggtgctgctgcgggggttccccgcgcggacggcggcggacttcgacgccgccgtggaggcgttcgggtacgaggagctgccgtacgtcggcggcgcggcgccccggaccaacgtggtggggcgggtgttcaccgccaacgagtcgccgcccgaccagaagatccccttccaccatgagatggcgcaggttccgacttttccggcaaaactgttcttcttctgtgaggtagaaccaaaaagtggtggagagacaccaatagtgctgagccactatgtgtataagaggatgaaggaaaacttccctgaatttgtggagaaattggagaagcatggcctgatatacacaagggtattgggagagggtgacgacccatcttctccaatcggccgtggatggcaatctacatttctcactaaagataaatccgttgccgaggaaagggctgcgaagcttgggatgaagctggaatggacccacgacggggttaaaacagtgatgggtccaataccagcagtcaagtgggacgagagccgagggaggaagatatggttcaacagcatggtcgccgcctacacagggtggaaggacgcccgcaatgatccagttaaggccgtcaccttcggcgacggctcgcccttgcccgccgatgtcatagaggaatgtggcaagatcctagaagaagaatgcgtcgcggttccatggcagcaaggtgacatccttctcatcgacaactgggcggtgctgcactcacggcggtcctttgagcccccacggcgcgtacttgcttctctctgtaaatagcatgtaaatgttcgacattagagatgaggctttgctcgggattgatccgcacttctgcgggttgtatgtaccatgtacgtgatcggatttgcacatacaaaactggaataattttgt

SEQ ID NO: 9481 - protein, 356 aa, Triticum aestivum
  misc_feature (1)..(356): Ceres Seq. ID no. 12586855
VAEQSATRTPQPKPREPNPAQQMAPVAGSSFFQEARLPEQRAVEGVAFPAVLVPTAGPPGPGEGSLDEFLAAVRSERASRVEPLLREAGAVLLRGFPARTAADFDAAVEAFGYEELPYVGGAAPRTNVVGRVFTANESPPDQKIPFHHEMAQVPTFPAKLFFFCEVEPKSGGETPIVLSHYVYKRMKENFPEFVEKLEKHGLIYTRVLGEGDDPSSPIGRGWQSTFLTKDKSVAEERAAKLGMKLEWTHDGVKTVMGPIPAVKWDESRGRKIWFNSMVAAYTGWKDARNDPVKAVTFGDGSPLPADVIEECGKILEEECVAVPWQQGDILLIDNWAVLHSRRSFEPPRRVLASLCK

SEQ ID NO: 9482 - protein, 334 aa, Triticum aestivum
  misc_feature (1)..(334): Ceres Seq. ID no. 12586856
MAPVAGSSFFQEARLPEQRAVEGVAFPAVLVPTAGPPGPGEGSLDEFLAAVRSERASRVEPLLREAGAVLLRGFPARTAADFDAAVEAFGYEELPYVGGAAPRTNVVGRVFTANESPPDQKIPFHHEMAQVPTFPAKLFFFCEVEPKSGGETPIVLSHYVYKRMKENFPEFVEKLEKHGLIYTRVLGEGDDPSSPIGRGWQSTFLTKDKSVAEERAAKLGMKLEWTHDGVKTVMGPIPAVKWDESRGRKIWFNSMVAAYTGWKDARNDPVKAVTFGDGSPLPADVIEECGKILEEECVAVPWQQGDILLIDNWAVLHSRRSFEPPRRVLASLCK

SEQ ID NO: 9483 - protein, 207 aa, Triticum aestivum
  misc_feature (1)..(207): Ceres Seq. ID no. 12586857
MAQVPTFPAKLFFFCEVEPKSGGETPIVLSHYVYKRMKENFPEFVEKLEKHGLIYTRVLGEGDDPSSPIGRGWQSTFLTKDKSVAEERAAKLGMKLEWTHDGVKTVMGPIPAVKWDESRGRKIWFNSMVAAYTGWKDARNDPVKAVTFGDGSPLPADVIEECGKILEEECVAVPWQQGDILLIDNWAVLHSRRSFEPPRRVLASLCK

SEQ ID NO: 9484 - DNA, 889 bp, Triticum aestivum
  misc_feature (1)..(889): Ceres Seq. ID no. 12587358
actttcccttaaaaaaaaggtgaggagggtgtggatcaatcgaatccaatcgaatcctaagctgaggatggcggcggtgctcaaggtgtatgcggaccggctgtcgcagccgtcgcgcgccatcatcatcttgtgcaaggtcaaccggatcgacttccaggagctcaccgtggatctcgccaagggacaacaccgcgcaccagaattcaccaaaatcaaccccatggcacaggtcccaacaatcgtcgatggaagattcaaactctttgaaagccatgccattctgaggtatcttgccaccgtcttccccggggttccagatcactggtatccggccgacttatttaccagagcaaaactcgagtctgtcttggattggcatcactctaatctgcgccgtggtgcagcaacctatgtactgcacaccgcgttgggtcctgctctcggcctcacaccgaatcctgaaaccgcaaaagaggccgagaagttgctgtcgcgatcactgggaacgatcgaaaccgtgtggctcaaaggcgatgcaaaattcttgaatggcaacccccagccatcaatcgcagacctcagcctcgtgtgcgagataatgcagctggaggttgttggtgatgagcgacgtgacagaattctgggacctcacgacaaggtgcgcgcttggatggagaatgtgaagaaggccaccagccctcattttgatgaggtccatgagctcatcttcaaactcaaggcacgcttgaacccagcagcatccaagctctgaagagatggatcctacacacatttacccaattcttctttcttcttgtcttgggattaaaacaagtactagcatccatgtactgtacgatgaaagaaagaaatactagtatgtttc

SEQ ID NO: 9485 - protein, 257 aa, Triticum aestivum
  misc_feature (1)..(257): Ceres Seq. ID no. 12587359
LSLKKKVRRVWINRIQSNPKLRMAAVLKVYADRLSQPSRAIIILCKVNRIDFQELTVDLAKGQHRAPEFTKINPMAQVPTIVDGRFKLFESHAILRYLATVFPGVPDHWYPADLFTRAKLESVLDWHHSNLRRGAATYVLHTALGPALGLTPNPETAKEAEKLLSRSLGTIETVWLKGDAKFLNGNPQPSIADLSLVCEIMQLEVVGDERRDRILGPHDKVRAWMENVKKATSPHFDEVHELIFKLKARLNPAASKL

SEQ ID NO: 9486 - protein, 235 aa, Triticum aestivum
  misc_feature (1)..(235): Ceres Seq. ID no. 12587360
MAAVLKVYADRLSQPSRAIIILCKVNRIDFQELTVDLAKGQHRAPEFTKINPMAQVPTIVDGRFKLFESHAILRYLATVFPGVPDHWYPADLFTRAKLESVLDWHHSNLRRGAATYVLHTALGPALGLTPNPETAKEAEKLLSRSLGTIETVWLKGDAKFLNGNPQPSIADLSLVCEIMQLEVVGDERRDRILGPHDKVRAWMENVKKATSPHFDEVHELIFKLKARLNPAASKL

SEQ ID NO: 9487 - protein, 183 aa, Triticum aestivum
  misc_feature (1)..(183): Ceres Seq. ID no. 12587361
MAQVPTIVDGRFKLFESHAILRYLATVFPGVPDHWYPADLFTRAKLESVLDWHHSNLRRGAATYVLHTALGPALGLTPNPETAKEAEKLLSRSLGTIETVWLKGDAKFLNGNPQPSIADLSLVCEIMQLEVVGDERRDRILGPHDKVRAWMENVKKATSPHFDEVHELIFKLKARLNPAASKL

SEQ ID NO: 9488 - DNA, 702 bp, Triticum aestivum
  misc_feature (1)..(702): Ceres Seq. ID no. 12587376
tcaatctaggataacctctctgacagataagctaaagcaagactttggtaaggagaaggagttctattacttttatgaccagtgctttgagggcaaggagggcaagtatgtttacaaggtctgtccatacaagaaagcttcacaggttgaaggacacagttccactaacctggggcgctgggacaaatttgaagaatcctacaggatgatgcgcttttcaaatggagacaaatgctggaatggccctgaccgaagcctaaaggtcaggcttagatgtgggctgagcaacaagcttaacggtgttgatgagcccagcagatgcgagtatgtcgctgtgctgtcaactcctgcaatgtgtgttgaagagaagctgaaggagctgcaacagaaactcgacgctgcgtcttcaaacctgtccagccacgacgagctctaaactgtcacgaggaaacaatgactccactattacaaccataaccacaagaaagaaaggctaccgaggtacatgttggatagatagaaaagcctggagctgtgcgccaaagtagcgttagtctggttagggaaaattttgagcaaaatggtcggatggttgaaattttcacatcatcctgattttagtagctgcaagtggatatctttttcttttagttcctttgacggacgtttcctcaaattgtttatctaggtcatctgaaagag

SEQ ID NO: 9489 - protein, 144 aa, Triticum aestivum
  misc_feature (1)..(144): Ceres Seq. ID no. 12587377
QSRITSLTDKLKQDFGKEKEFYYFYDQCFEGKEGKYVYKVCPYKKASQVEGHSSTNLGRWDKFEESYRMMRFSNGDKCWNGPDRSLKVRLRCGLSNKLNGVDEPSRCEYVAVLSTPAMCVEEKLKELQQKLDAASSNLSSHDEL

SEQ ID NO: 9490 - protein, 76 aa, Triticum aestivum
  misc_feature (1)..(76): Ceres Seq. ID no. 12587378
MMRFSNGDKCWNGPDRSLKVRLRCGLSNKLNGVDEPSRCEYVAVLSTPAMCVEEKLKELQQKLDAASSNLSSHDEL

SEQ ID NO: 9491 - protein, 75 aa, Triticum aestivum
  misc_feature (1)..(75): Ceres Seq. ID no. 12587379
MRFSNGDKCWNGPDRSLKVRLRCGLSNKLNGVDEPSRCEYVAVLSTPAMCVEEKLKELQQKLDAASSNLSSHDEL

SEQ ID NO: 9492 - DNA, 1384 bp, Triticum aestivum
  misc_feature (1)..(1384): Ceres Seq. ID no. 12587535
acactaaacttagatcacagcctgctctagttctcaaagcaccactgcttcactcgctgtgccgtaagacatcgtagatgatggtgagggcaagagagatggtgcaaggtccccgttgcgtcgcgctgttgctgctcgtctgcatggctgctctcgtagcttcggacaccaccgatggcctcctgccgaacggcaacttcgaggaggcgccggaccggtcgcagatggacgggacgagggtgacgggccgctacgcgataccgcggtgggaggcctgcgggtgcgtggagtacatctgctcgggccagaagcagggggacatggtgctgccggtccccgagggcgcccacgccgtgcggctcggcaacgacgcctccgtccagcagcagctcagcgtgacgccggggacgcactacgcgatcaccttcagcgcggcgcgcacctgcgcccaggccgagaagctgaacgtgacggtcggggcgcagtccggcgagctccccatccagacggtgtacaccagcagcggctgggactcctactcctgggcgttcgaggccaaggagagcgtcgtaacgctcaccgtccacaaccccggatatgatgaagacgccgcctgcggccccgtcgtcgactccttcgccatcaggaccctcctgccaccacaaagcaacgaatataacatgctgaagaacggggacttcgaggagggcccgtacatctgccccagcacgtcgtgcggggtgatggtgccgcccatggacgaggacagctactccccgctgttcccgtgggtgatcctgtcgtcgaccaagtccgtccggtacgtggacgcggcgcactacgcggtgccgcagggcgcccgggccgtgcagctggtgttcggcgcggagagcgcgctggtgcaggaggtgtgcaccgtgccgggggtgtcttacaggatggagttctcgatcggggacgcggccgacgggtgcacgggctccctcgccgtggaggcgtacgcggcgggcgggagggtgacggtcccgtacgagtcccagggcacgggcgggttcacgcgcggcgtgctcgagttcacggcgacggaggaccggacgcgggtggtgttcgtcagcgcgagctacaacatgaagtccgacggcacggtctgcgggcccgtcgtcgacgacgcctcgctcgtctgcgcgcagagccacgctcgccggctgcttctgtgattgtgcggcgccgcaatgtacggtccgttggtttgtgacacgaacaatttgacctcttccgttatggagtaggatctaaaattccggacggtcggcagttgtaaaccagggttctgtaatgtatcgtggataatttgcattagggaacatcattttaacatttcttt

SEQ ID NO: 9493 - protein, 379 aa, Triticum aestivum
  misc_feature (1)..(379): Ceres Seq. ID no. 12587536
MMVRAREMVQGPRCVALLLLVCMAALVASDTTDGLLPNGNFEEAPDRSQMDGTRVTGRYAIPRWEACGCVEYICSGQKQGDMVLPVPEGAHAVRLGNDASVQQQLSVTPGTHYAITFSAARTCAQAEKLNVTVGAQSGELPIQTVYTSSGWDSYSWAFEAKESVVTLTVHNPGYDEDAACGPVVDSFAIRTLLPPQSNEYNMLKNGDFEEGPYICPSTSCGVMVPPMDEDSYSPLFPWVILSSTKSVRYVDAAHYAVPQGARAVQLVFGAESALVQEVCTVPGVSYRMEFSIGDAADGCTGSLAVEAYAAGGRVTVPYESQGTGGFTRGVLEFTATEDRTRVVFVSASYNMKSDGTVCGPVVDDASLVCAQSHARRLLL

SEQ ID NO: 9494 - protein, 378 aa, Triticum aestivum
  misc_feature (1)..(378): Ceres Seq. ID no. 12587537
MVRAREMVQGPRCVALLLLVCMAALVASDTTDGLLPNGNFEEAPDRSQMDGTRVTGRYAIPRWEACGCVEYICSGQKQGDMVLPVPEGAHAVRLGNDASVQQQLSVTPGTHYAITFSAARTCAQAEKLNVTVGAQSGELPIQTVYTSSGWDSYSWAFEAKESVVTLTVHNPGYDEDAACGPVVDSFAIRTLLPPQSNEYNMLKNGDFEEGPYICPSTSCGVMVPPMDEDSYSPLFPWVILSSTKSVRYVDAAHYAVPQGARAVQLVFGAESALVQEVCTVPGVSYRMEFSIGDAADGCTGSLAVEAYAAGGRVTVPYESQGTGGFTRGVLEFTATEDRTRVVFVSASYNMKSDGTVCGPVVDDASLVCAQSHARRLLL

SEQ ID NO: 9495 - protein, 372 aa, Triticum aestivum
  misc_feature (1)..(372): Ceres Seq. ID no. 12587538
MVQGPRCVALLLLVCMAALVASDTTDGLLPNGNFEEAPDRSQMDGTRVTGRYAIPRWEACGCVEYICSGQKQGDMVLPVPEGAHAVRLGNDASVQQQLSVTPGTHYAITFSAARTCAQAEKLNVTVGAQSGELPIQTVYTSSGWDSYSWAFEAKESVVTLTVHNPGYDEDAACGPVVDSFAIRTLLPPQSNEYNMLKNGDFEEGPYICPSTSCGVMVPPMDEDSYSPLFPWVILSSTKSVRYVDAAHYAVPQGARAVQLVFGAESALVQEVCTVPGVSYRMEFSIGDAADGCTGSLAVEAYAAGGRVTVPYESQGTGGFTRGVLEFTATEDRTRVVFVSASYNMKSDGTVCGPVVDDASLVCAQSHARRLLL

SEQ ID NO: 9496 - DNA, 1079 bp, Triticum aestivum
  misc_feature (1)..(1079): Ceres Seq. ID no. 12587737
aaggacgattctgctcgcgccgccggttccccgatggcggaggactcaggcgccatcctccgccacatctcctccctcaaggacatgcttgacaaggtcaatgaagaaattgaacagaatatacaaaggaccagggaaagagagtcagaaatagtgaagcattctgaaactgaaaaggactatctcgtgaaggaatctgagctaatgaaaggagtatcggttgctgagtttgaacttgatgggcttatgcaagtggaagctgctggaacagattcacttaaagcgatggagggcaatttggaattccggaaagctactctgaatgcaattacgaaactattctacgataaaatggaaaggttcatcgctgaatctaaagacttccaagttaacatgcttggaggttcaattgaggatttacctctcctactaaaggaaagagattcactagagaatgagagtgagaacttgaggatgaagatcaacgccatacaaagttcatcaaaggaatacattgctgagattcttgaggaggtaaatgtggaaaattcagttctggagtctgatgtacagtataggatttcggaatacatggaaattctcaaggatataaacaacctgaagattctatttagttcgagcaattcttaagaagggtcttcattgttgcaggctcatgacccatcaaagttgccacatgtttcttgtgtcttcagtatgccattttggtttggctgtcaagaatcttcagcaagctcaatggaagtaccttgtacatgtttcttctgtcgagaaggttacaccagatctagcacgaatttactgcactaccaaacatgtattggtcctggattgtatatacagttcagttaacctctgtactttagatttcaagctgagggatagtaggaaaaggcaaagtgcctaggaatgcagattggaaaaacagcagtgtcttttgtgggcaattgttgtttttcaaatctgatcgaggagatgtgagaacgtcagatattgcgagaaattgttagtaatggaatagttggttcatcttaagggaatgtaccagtgaagaaagg

SEQ ID NO: 9497 - protein, 216 aa, Triticum aestivum
  misc_feature (1)..(216): Ceres Seq. ID no. 12587738
KDDSARAAGSPMAEDSGAILRHISSLKDMLDKVNEEIEQNIQRTRERESEIVKHSETEKDYLVKESELMKGVSVAEFELDGLMQVEAAGTDSLKAMEGNLEFRKATLNAITKLFYDKMERFIAESKDFQVNMLGGSIEDLPLLLKERDSLENESENLRMKINAIQSSSKEYIAEILEEVNVENSVLESDVQYRISEYMEILKDINNLKILFSSSNS

SEQ ID NO: 9498 - protein, 205 aa, Triticum aestivum
  misc_feature (1)..(205): Ceres Seq. ID no. 12587739
MAEDSGAILRHISSLKDMLDKVNEEIEQNIQRTRERESEIVKHSETEKDYLVKESELMKGVSVAEFELDGLMQVEAAGTDSLKAMEGNLEFRKATLNAITKLFYDKMERFIAESKDFQVNMLGGSIEDLPLLLKERDSLENESENLRMKINAIQSSSKEYIAEILEEVNVENSVLESDVQYRISEYMEILKDINNLKILFSSSNS

SEQ ID NO: 9499 - protein, 188 aa, Triticum aestivum
  misc_feature (1)..(188): Ceres Seq. ID no. 12587740
MLDKVNEEIEQNIQRTRERESEIVKHSETEKDYLVKESELMKGVSVAEFELDGLMQVEAAGTDSLKAMEGNLEFRKATLNAITKLFYDKMERFIAESKDFQVNMLGGSIEDLPLLLKERDSLENESENLRMKINAIQSSSKEYIAEILEEVNVENSVLESDVQYRISEYMEILKDINNLKILFSSSNS

SEQ ID NO: 9500 - DNA, 776 bp, Triticum aestivum
  misc_feature (1)..(776): Ceres Seq. ID no. 12587829
gaaaaatcacaagctagcaagcccacctagctcagccacaagcctagccagtacactctagttggccacttgcttcatcaacatagcaatggcgccctccaagctcgctctcttcctcgccctgaaccaggtcctcttggcagccgtgcatggctgcgggtcgtactgcggcaatacaccggccgtcccagtgccaacatcaccgatcgccgtgtctccgcccgccatcccagtccctgcccccgccgacaaccggaggaggcagcggcacctgctcgatcaacacgctgaagctgaaggtgtgcgccaacgtactgaacctgctgaagctcaacttagccgtgctggcgagcgacgactgctgcccgctgttgggcgggctcgccgacctcgacgtcgccgtgtgcctctacaccgccatcaaggccaatgtcctcggcatcaagctcaacgtccccgtcgacctcgttctcctcctcaaccagtgcggcaagacctgccccgccgacttcacctgccccagctgatccacccatcatccctcgaaccatgcatcacaaaccatgtgtcgtcgtcatcatactcgtctttggtttgcatgccatcacacccgtcactcgtgcatgcatgcacgcttacgtgttcatttcttccagggactgcttataagatagtcgttgatcattgtattccgataggatatctaaatgcatggttcgcatatttgtaaaatgatatacatacgtggaataaaatgattcaagttgtgttaactc

SEQ ID NO: 9501 - protein, 213 aa, Triticum aestivum
  misc_feature (1)..(213): Ceres Seq. ID no. 12587830
MAPSKLALFLALNQVLLAAVHGCGSYCGNTPAVPVPTSPIAVSPPAIPVPAPADNRRRQRHLLDQHAEAEGVRQRTEPAEAQLSRAGERRLLPAVGRARRPRRRRVPLHRHQGQCPRHQAQRPRRPRSPPQPVRQDLPRRLHLPQLIHPSSLEPCITNHVSSSSYSSLVCMPSHPSLVHACTLTCSFLPGTAYKIVVDHCIPIGYLNAWFAYL

SEQ ID NO: 9502 - protein, 125 aa, Triticum aestivum
  misc_feature (1)..(125): Ceres Seq. ID no. 12587831
MAAGRTAAIHRPSQCQHHRSPCLRPPSQSLPPPTTGGGSGTCSINTLKLKVCANVLNLLKLNLAVLASDDCCPLLGGLADLDVAVCLYTAIKANVLGIKLNVPVDLVLLLNQCGKTCPADFTCPS

SEQ ID NO: 9503 - DNA, 1210 bp, Triticum aestivum
  misc_feature (1)..(1210): Ceres Seq. ID no. 12587870
cctcgcacacagtctgctacagggatcttccacacagacacactggaagtgataaccggtgaaatgcctcccccgaagcctgccggtggtgctatcatggatggaaatcaccacctactaggccatgaagatgttcacagagctgcaacgactaccttcgagaatggctttacaacccattcagttcacacatcaggagcgaaggtcgatggcccgaatgtgacgaatatcgcgaggggcgacatatcaactacgccgattcctgaagcaacaggtccacatcatgtagcggtatcagtccctgaagaagtgaatctggttgctcctagaccacaacagagggatgactgggatatactgaaagctatagtgtatggaggcttagtggagtcagtcaccagcctctctgttgtttcggcggcagcatcaagcggcgccaaaacattggacatattcatcttgggcatggccaaccttatcggagggctccctctcgtttaccacaatatcgccgatctgagagatgtccgagacgtgagcgacgacaacgagcgggtcggacactactggctgcagctcgggaggcggtcgaaagcccggctccacatggtcctggccctgctctcatacatggtgttcgggctacttcaaccggttgtctacgggctgtcgttccgcgagagcaacaacagggagaacaagatgatggccgtcgccggcgcttccctcgcgtgcatcgctctgctggcgctcggaaaggcgcatgtccagacagcacccagggcatacttcaagaccctcgtgtactacctgacgatcgccgtgagctcgtcggggctgtcgtacgtcgccggcgtgctcatcacgaggctcctggagcactttggtgtcatcgagcaaggcgggtcggctgctcctgctcctccagggctgtcgttcgctcattcagtgggtgcacaaacatctgcctgggcctcattctaaagtctgaactctgaagttcatgggaacactggtgcaaaaaaagaagacatgtaggaggtgcacactaggagatgtagcactagctagattaccttgtgccacatcttgggcttcagttattagtactaaaacatgaaggcacacattaagacggtagaaacatacaatataattagaacagatgtctggttgagcttcatatttgttttcaataaattaatattcc

SEQ ID NO: 9504 - protein, 327 aa, Triticum aestivum
  misc_feature (1)..(327): Ceres Seq. ID no. 12587871
PRTQSATGIFHTDTLEVITGEMPPPKPAGGAIMDGNHHLLGHEDVHRAATTTFENGFTTHSVHTSGAKVDGPNVTNIARGDISTTPIPEATGPHHVAVSVPEEVNLVAPRPQQRDDWDILKAIVYGGLVESVTSLSVVSAAASSGAKTLDIFILGMANLIGGLPLVYHNIADLRDVRDVSDDNERVGHYWLQLGRRSKARLHMVLALLSYMVFGLLQPVVYGLSFRESNNRENKMMAVAGASLACIALLALGKAHVQTAPRAYFKTLVYYLTIAVSSSGLSYVAGVLITRLLEHFGVIEQGGSAAPAPPGLSFAHSVGAQTSAWASF

SEQ ID NO: 9505 - protein, 306 aa, Triticum aestivum
  misc_feature (1)..(306): Ceres Seq. ID no. 12587872
MPPPKPAGGAIMDGNHHLLGHEDVHRAATTTFENGFTTHSVHTSGAKVDGPNVTNIARGDISTTPIPEATGPHHVAVSVPEEVNLVAPRPQQRDDWDILKAIVYGGLVESVTSLSVVSAAASSGAKTLDIFILGMANLIGGLPLVYHNIADLRDVRDVSDDNERVGHYWLQLGRRSKARLHMVLALLSYMVFGLLQPVVYGLSFRESNNRENKMMAVAGASLACIALLALGKAHVQTAPRAYFKTLVYYLTIAVSSSGLSYVAGVLITRLLEHFGVIEQGGSAAPAPPGLSFAHSVGAQTSAWASF

SEQ ID NO: 9506 - protein, 295 aa, Triticum aestivum
  misc_feature (1)..(295): Ceres Seq. ID no. 12587873
MDGNHHLLGHEDVHRAATTTFENGFTTHSVHTSGAKVDGPNVTNIARGDISTTPIPEATGPHHVAVSVPEEVNLVAPRPQQRDDWDILKAIVYGGLVESVTSLSVVSAAASSGAKTLDIFILGMANLIGGLPLVYHNIADLRDVRDVSDDNERVGHYWLQLGRRSKARLHMVLALLSYMVFGLLQPVVYGLSFRESNNRENKMMAVAGASLACIALLALGKAHVQTAPRAYFKTLVYYLTIAVSSSGLSYVAGVLITRLLEHFGVIEQGGSAAPAPPGLSFAHSVGAQTSAWASF

SEQ ID NO: 9507 - DNA, 1082 bp, Triticum aestivum
  misc_feature (1)..(1082): Ceres Seq. ID no. 12592832
actctccaccgatcccctcacccccaccggcggcgcacagctcgacgacccgcgcgatcctgcggaggcggcagtcatggtgcacgtcaacttctaccgcaactatgggaagaccttcaagaagccaaggcgtccgtatgagaaggagcgtcttgacgctgagctgaagctggttggggagtacggtctgcgggccaagcgtgagctctatcgtgtgcagtacgccctcagccgcatccgaaatgctgccagggagctgctcaccctggatgagaagaacccccgccgtatctttgagggtgcagcgctcctgcgccgcatgaaccgctacggtcttctcactgaggaacagaacaagcttgattacgtgcttgccctcactgttgacaacttcctccagcgccgtctccagaccatcgtcttcaagaatggcatggccaagtcaatccatcatgctcgtgtcctcatcagacagcgccacatcagggttggaaagcagctcgtcaacattccttctttcatggtgagggtggacactgagaaacacgtcgacttctcgctcaccagccccctgggtggtggccaacctggaagagtgaagcggaagaaccagaagaaggcctcaggtggtggtggtgacgacggcgaggaggaggaagactaagcgctcagcctcgacccgcataacttccgttgcagaaatgttgagattgccttgtggaacttgcaacgtgaaatgattcaaactttggttcgttcttagaaacttagtggtgtagagctttcgttgcttcagctatcgattctaaaattaaacttatggttgtcagttttgcttggttagtgaccaccgagcataagaagtgaactcagtgaggctgcttcgttttttgtgaaccaaacgtatcttgttatcggtttgacagccctggttctgagttattttactctgcatgaagtgttactgttgtccttgctatccttctcttttgtctggttggctaggttggtgtgtcgaccgaatgatcacaataagtgctatatagtactctttccaaggctataattccaattgtagtatt

SEQ ID NO: 9508 - protein, 220 aa, Triticum aestivum
  misc_feature (1)..(220): Ceres Seq. ID no. 12592833
LSTDPLTPTGGAQLDDPRDPAEAAVMVHVNFYRNYGKTFKKPRRPYEKERLDAELKLVGEYGLRAKRELYRVQYALSRIRNAARELLTLDEKNPRRIFEGAALLRRMNRYGLLTEEQNKLDYVLALTVDNFLQRRLQTIVFKNGMAKSIHHARVLIRQRHIRVGKQLVNIPSFMVRVDTEKHVDFSLTSPLGGGQPGRVKRKNQKKASGGGGDDGEEEED

SEQ ID NO: 9509 - protein, 195 aa, Triticum aestivum
  misc_feature (1)..(195): Ceres Seq. ID no. 12592834
MVHVNFYRNYGKTFKKPRRPYEKERLDAELKLVGEYGLRAKRELYRVQYALSRIRNAARELLTLDEKNPRRIFEGAALLRRMNRYGLLTEEQNKLDYVLALTVDNFLQRRLQTIVFKNGMAKSIHHARVLIRQRHIRVGKQLVNIPSFMVRVDTEKHVDFSLTSPLGGGQPGRVKRKNQKKASGGGGDDGEEEED

SEQ ID NO: 9510 - protein, 114 aa, Triticum aestivum
  misc_feature (1)..(114): Ceres Seq. ID no. 12592835
MNRYGLLTEEQNKLDYVLALTVDNFLQRRLQTIVFKNGMAKSIHHARVLIRQRHIRVGKQLVNIPSFMVRVDTEKHVDFSLTSPLGGGQPGRVKRKNQKKASGGGGDDGEEEED

SEQ ID NO: 9511 - DNA, 1268 bp, Triticum aestivum
  misc_feature (1)..(1268): Ceres Seq. ID no. 12593499
aatcgaaaagatcgggacggtaccggtacgggagtccgccaatttccggcgcgcgggaaaatttcccgcactcgcgctcgagcctcgcccgctataagaaagaatcgcaccaccacggtttcctgctccacttcccccacttccgccgcctcccaccgaatgggccgcaagaggagggctagggtttccagcgacagcgacggcgacgacgtcgagatgaacggcgatgagcccgcccccgccgccgcggagagcaagagcctctacgagatattaggggttgcgagcacagcttcacaacaggagataaaaaaggcatatcacaagttggccttgcgtcttcacccagataagaatcctggagatgaggaagccaacgaaaaatttcagcagctgcaaaaggtgatatctattcttggagatcaggagaaaagggcattgtatgatgagactggaattactgatgatgatgcactggttggagaagctgcagacaatctccaagcgtacttcagaacagtgtacagaaaggtcacagaggctgacattgaagaatttgaagctaagtatagagggtcagactctgagaaaaaggatttaaaggaactgtacacaaaatttaagggcaacatgaacagactcttctgctcaatgatttgctcagatgccaagcttgattctcaccgcttcaaagatataattgatcaggcaattgctgaaggcgaggtgaagtccaccaaagtgtatgcgaaatgggctaaaaagatctctgagatagaaccacccacaaacccattggagaggagagtgaagaaaaagaagagccaggagagcgacctcatcctggcgatctcgcagcgcagggaacagaggaaggagcggtttgactctgttctgtcatctataatgtccaagtgtgatgacaacaaggcgggcagctcagagcccacggaggaggagtttgagcgcgctcggcagaggcttgagaagaagcgcaccaaggggcgcaaatggtatgaatcttgacatgcatgcgcaaatgatatgaatcttgacatgcatgcaggcccttcgagaaaagatgggtgttgagtggagtggagtggaggggttgtgtcgcaactgtagtgtcgctttgttttatgagtgggcgtgtgtataagtaactgaatgcaagtgtggtgtggttttagatgtgaacaactgtggaagtgtcctgtcccatgaatgaaatgaaatccccggcatggccaggtgatagtctgtcc

SEQ ID NO: 9512 - protein, 341 aa, Triticum aestivum
  misc_feature (1)..(341): Ceres Seq. ID no. 12593500
NRKDRDGTGTGVRQFPARGKISRTRARASPAIRKNRTTTVSCSTSPTSAASHRMGRKRRARVSSDSDGDDVEMNGDEPAPAAAESKSLYEILGVASTASQQEIKKAYHKLALRLHPDKNPGDEEANEKFQQLQKVISILGDQEKRALYDETGITDDDALVGEAADNLQAYFRTVYRKVTEADIEEFEAKYRGSDSEKKDLKELYTKFKGNMNRLFCSMICSDAKLDSHRFKDIIDQAIAEGEVKSTKVYAKWAKKISEIEPPTNPLERRVKKKKSQESDLILAISQRREQRKERFDSVLSSIMSKCDDNKAGSSEPTEEEFERARQRLEKKRTKGRKWYES

SEQ ID NO: 9513 - protein, 288 aa, Triticum aestivum
  misc_feature (1)..(288): Ceres Seq. ID no. 12593501
MGRKRRARVSSDSDGDDVEMNGDEPAPAAAESKSLYEILGVASTASQQEIKKAYHKLALRLHPDKNPGDEEANEKFQQLQKVISILGDQEKRALYDETGITDDDALVGEAADNLQAYFRTVYRKVTEADIEEFEAKYRGSDSEKKDLKELYTKFKGNMNRLFCSMICSDAKLDSHRFKDIIDQAIAEGEVKSTKVYAKWAKKISEIEPPTNPLERRVKKKKSQESDLILAISQRREQRKERFDSVLSSIMSKCDDNKAGSSEPTEEEFERARQRLEKKRTKGRKWYES

SEQ ID NO: 9514 - protein, 269 aa, Triticum aestivum
  misc_feature (1)..(269): Ceres Seq. ID no. 12593502
MNGDEPAPAAAESKSLYEILGVASTASQQEIKKAYHKLALRLHPDKNPGDEEANEKFQQLQKVISILGDQEKRALYDETGITDDDALVGEAADNLQAYFRTVYRKVTEADIEEFEAKYRGSDSEKKDLKELYTKFKGNMNRLFCSMICSDAKLDSHRFKDIIDQAIAEGEVKSTKVYAKWAKKISEIEPPTNPLERRVKKKKSQESDLILAISQRREQRKERFDSVLSSIMSKCDDNKAGSSEPTEEEFERARQRLEKKRTKGRKWYES

SEQ ID NO: 9515 - DNA, 694 bp, Triticum aestivum
  misc_feature (1)..(694): Ceres Seq. ID no. 12598891
cgagccgtccagatcgctgccgtcccagactctccgcccccaaatctcgcccggagaaaagagagatttcgcggcgatggcggcggccggcggcacctcctccgacgatgtccccgtcatccaggcagagaacctcaccagcaacgtcaggtccatcctctacagccggacattcttgtcgatcatcagtggagttgttgctggtatctgggggttcacaggtctgacgggcttcgtcttctactttctgataatgttggtagcttctattgggctcttggcaaagtcgaagttctcagtccacacgtactttgatagttggagcaggattttagttgaaggagttttggccggccttatgtccttcgtgctgttctggacatttgcgtatgatatcgtccacatcttctgagttctgatggaaggagagtctgatgaacacagcatgttgcatcttctgatggaaggagctaatgtcagatgaagcaagcatatgcaagatttccccttaacatgatggaacaatggagtctcatcgttatcacatttttgttattagtttacggagggagtactattactgtctagtttggtgaactgcaacgcaacattgtatatgcctatttgatggccagtgtatcagatatcacaggtgtaacacaacacttaaattcgtttacccatgtcgtagttc

SEQ ID NO: 9516 - protein, 136 aa, Triticum aestivum
  misc_feature (1)..(136): Ceres Seq. ID no. 12598892
EPSRSLPSQTLRPQISPGEKRDFAAMAAAGGTSSDDVPVIQAENLTSNVRSILYSRTFLSIISGVVAGIWGFTGLTGFVFYFLIMLVASIGLLAKSKFSVHTYFDSWSRILVEGVLAGLMSFVLFWTFAYDIVHIF

SEQ ID NO: 9517 - protein, 111 aa, Triticum aestivum
  misc_feature (1)..(111): Ceres Seq. ID no. 12598893
MAAAGGTSSDDVPVIQAENLTSNVRSILYSRTFLSIISGVVAGIWGFTGLTGFVFYFLIMLVASIGLLAKSKFSVHTYFDSWSRILVEGVLAGLMSFVLFWTFAYDIVHIF

SEQ ID NO: 9518 - protein, 104 aa, Triticum aestivum
  misc_feature (1)..(104): Ceres Seq. ID no. 12598894
RAVQIAAVPDSPPPNLARRKERFRGDGGGRRHLLRRCPRHPGREPHQQRQVHPLQPDILVDHQWSCCWYLGVHRSDGLRLLLSDNVGSFYWALGKVEVLSPHVL

SEQ ID NO: 9519 - DNA, 965 bp, Triticum aestivum
  misc_feature (1)..(965): Ceres Seq. ID no. 12599167
cttctccgttctcctagctagctcccacacatcctcgaatcacagcctcacacctcctcccctgatcgaccaccctgcagctagcttcgtgcccgcagccagcaccgatcacacgctagctgctgctgctgctggggcgaccgaccggccatccatggcggtgaaggactgcggcgggcacaagggcgggggctgcgagtgccaccgccggcggctctaccgcaagtgctgcggcgcgctgctcgccctcgtcctcctcgccctcttcatcatcctcatcgtctacctggtgctccgcccccacaagccccgcttctacctgcaggacctggcggtgctctgcctcaacgtcacgccgcccacctccgcctacctcttcaccaccatgcaggccacggtcgcggcgcgcaaccccaacgaccgcgtcggcgtctactacgacgaggcggacatgtacgcgcagtacaagggcgtcgccatcaccgtccccacccgcctccccgtcgcctaccagggccaccgcgaccagtccgtgtggtcgccgtatctgaggtccatggacagcgtcgtgctcccgccgcagctcgccgtggcgctggcgcaggacgagacggccgggtacgtgctggtggacgtgcgcgtggacggtcaggtgcgctggaaggtgggcacgtggatctccggccactaccacctccgggtcaactgcccggcgctcatcagggtgaacgagggcaagggcagctacggcgccaccaccggcggcggccccgactacttccgcttccagcaggccgccgcctgcgccgtcgacgtctgatcatgcatcatcggttcgacctccaccgatccatgcatgtgtccaaattcagtggaatcgattgattgcttctccttctagtctctttcttgcttctttttagtctctttttgacttgttgatcgattggttaaagaaatggatg

SEQ ID NO: 9520 - protein, 272 aa, Triticum aestivum
  misc_feature (1)..(272): Ceres Seq. ID no. 12599168
FSVLLASSHTSSNHSLTPPPLIDHPAASFVPAASTDHTLAAAAAGATDRPSMAVKDCGGHKGGGCECHRRRLYRKCCGALLALVLLALFIILIVYLVLRPHKPRFYLQDLAVLCLNVTPPTSAYLFTTMQATVAARNPNDRVGVYYDEADMYAQYKGVAITVPTRLPVAYQGHRDQSVWSPYLRSMDSVVLPPQLAVALAQDETAGYVLVDVRVDGQVRWKVGTWISGHYHLRVNCPALIRVNEGKGSYGATTGGGPDYFRFQQAAACAVDV

SEQ ID NO: 9521 - protein, 221 aa, Triticum aestivum
  misc_feature (1)..(221): Ceres Seq. ID no. 12599169
MAVKDCGGHKGGGCECHRRRLYRKCCGALLALVLLALFIILIVYLVLRPHKPRFYLQDLAVLCLNVTPPTSAYLFTTMQATVAARNPNDRVGVYYDEADMYAQYKGVAITVPTRLPVAYQGHRDQSVWSPYLRSMDSVVLPPQLAVALAQDETAGYVLVDVRVDGQVRWKVGTWISGHYHLRVNCPALIRVNEGKGSYGATTGGGPDYFRFQQAAACAVDV

SEQ ID NO: 9522 - protein, 144 aa, Triticum aestivum
  misc_feature (1)..(144): Ceres Seq. ID no. 12599170
MQATVAARNPNDRVGVYYDEADMYAQYKGVAITVPTRLPVAYQGHRDQSVWSPYLRSMDSVVLPPQLAVALAQDETAGYVLVDVRVDGQVRWKVGTWISGHYHLRVNCPALIRVNEGKGSYGATTGGGPDYFRFQQAAACAVDV

SEQ ID NO: 9523 - DNA, 1542 bp, Triticum aestivum
  misc_feature (1)..(1542): Ceres Seq. ID no. 12613390
ccaaacaaacgccaccgtcttccccacctctcccgtccccggtccggtccaccaaccgcctccaggccgcaaccatgcacggccgccgccatctggcggcctccctggcgagagccctgtcccaggccccctcccgctccatctcctccaccccgtccctcctccaaaccctcgacccgaccccgcagtcccctcccctcgccgcgcccgcggcggggcggctcgcggagatgcggaggcggctgcaggcggagacgccgtcgctgggggacttcgcgtactcggtggaggtggggacgcggaagaagccgctgcccaagcccaagtggatgaaggagacgatccccggcggggccaagtacgcggccatcaaggccaagctgcgggagctgaagctgcacactgtctgcgaggaggcgcgctgccccaacctcggcgagtgctggtcgggcggcgagaccggcaccgccactgccaccatcatgatcctcggtgacacctgcacgcgtggatgcagattttgcaatgtcaagacatcacgaacccctcctccaccagatcctaatgagcctgccaatgttgcgcaagctattgcatcgtggggccttgaatatatagtcatcacaagtgtggaccgggatgatttacctgatcaggggagcggccattttgctgaaacagtacagaggttgaagactttaaagccagatatgcttattgaagcgcttgttcctgatttccaaggagatcgaagttgtgtagaaaaggtagcaacttccgggttgcatgtttttgcacacaatattgaaacggtggaagagcttcaaagaagtgtgcgagaccaccgtgcaaattttaagcaatcaatggatgttctgaaaatggcgaaggagtatgcccctcctggcaccctcacaaagacatcagtcatgctgggttgtggggagactcccgatcaggttatcagcacaatggaaaaggtgcgagctgctggtgttgatgtcattacatttggtcagtacatgaggccgtcaaagcgacatatgccagtgtctgagtatattacacctgaagccttcgagaactaccgcgcccttggtgttgaaatgggatttcgttatgttgcatctggtccgatggttcggtcctcctacaaagcaggcgaattctacatcaaagccatgatcgaagatgaccgagcaaaatcaggtgctgttgcagaatcaagttcatagttgacacacctccagtcattgacatggctacgctgcaaataagatgttctaattggagaaacatgtttgtctttttacatcttggtaaaactgatattctttttgagagaataaattcttctgcctcttcacttcaaaaaattatttacatttcttcatactatctcctcctttgtactactatacgtggctataatcatccattgtaagttgtaacagtagcagggatagagtccgtcaatgtaccccaccgaatattattgaggccattattgtgcctcatgtgatgtgcttgtacagagttttg

SEQ ID NO: 9524 - protein, 410 aa, Triticum aestivum
  misc_feature (1)..(410): Ceres Seq. ID no. 12613391
KQTPPSSPPLPSPVRSTNRLQAATMHGRRHLAASLARALSQAPSRSISSTPSLLQTLDPTPQSPPLAAPAAGRLAEMRRRLQAETPSLGDFAYSVEVGTRKKPLPKPKWMKETIPGGAKYAAIKAKLRELKLHTVCEEARCPNLGECWSGGETGTATATIMILGDTCTRGCRFCNVKTSRTPPPPDPNEPANVAQAIASWGLEYIVITSVDRDDLPDQGSGHFAETVQRLKTLKPDMLIEALVPDFQGDRSCVEKVATSGLHVFAHNIETVEELQRSVRDHRANFKQSMDVLKMAKEYAPPGTLTKTSVMLGCGETPDQVISTMEKVRAAGVDVITFGQYMRPSKRHMPVSEYITPEAFENYRALGVEMGFRYVASGPMVRSSYKAGEFYIKAMIEDDRAKSGAVAESSS

SEQ ID NO: 9525 - protein, 386 aa, Triticum aestivum
  misc_feature (1)..(386): Ceres Seq. ID no. 12613392
MHGRRHLAASLARALSQAPSRSISSTPSLLQTLDPTPQSPPLAAPAAGRLAEMRRRLQAETPSLGDFAYSVEVGTRKKPLPKPKWMKETIPGGAKYAAIKAKLRELKLHTVCEEARCPNLGECWSGGETGTATATIMILGDTCTRGCRFCNVKTSRTPPPPDPNEPANVAQAIASWGLEYIVITSVDRDDLPDQGSGHFAETVQRLKTLKPDMLIEALVPDFQGDRSCVEKVATSGLHVFAHNIETVEELQRSVRDHRANFKQSMDVLKMAKEYAPPGTLTKTSVMLGCGETPDQVISTMEKVRAAGVDVITFGQYMRPSKRHMPVSEYITPEAFENYRALGVEMGFRYVASGPMVRSSYKAGEFYIKAMIEDDRAKSGAVAESSS

SEQ ID NO: 9526 - protein, 334 aa, Triticum aestivum
  misc_feature (1)..(334): Ceres Seq. ID no. 12613393
MRRRLQAETPSLGDFAYSVEVGTRKKPLPKPKWMKETIPGGAKYAAIKAKLRELKLHTVCEEARCPNLGECWSGGETGTATATIMILGDTCTRGCRFCNVKTSRTPPPPDPNEPANVAQAIASWGLEYIVITSVDRDDLPDQGSGHFAETVQRLKTLKPDMLIEALVPDFQGDRSCVEKVATSGLHVFAHNIETVEELQRSVRDHRANFKQSMDVLKMAKEYAPPGTLTKTSVMLGCGETPDQVISTMEKVRAAGVDVITFGQYMRPSKRHMPVSEYITPEAFENYRALGVEMGFRYVASGPMVRSSYKAGEFYIKAMIEDDRAKSGAVAESSS

SEQ ID NO: 9527 - DNA, 1180 bp, Triticum aestivum
  misc_feature (1)..(1180): Ceres Seq. ID no. 12613576
gatcgatcgagtcgattctcgcgcagagcttgagagagatcggaggcgatgggaggcggcagcatggggatccgcgcggccgccagggccgccttcatcggcggctaccgctccgcctcgaacgcccgccgctccgccctgccctcctcctccgccgccgcggccgacacccgccccgtctccacggccaccaccttcgacgactggtacatccccgaccgcgaggtgttcggccccgtgccctcccacgaggaggccatggccgccaccctcgacctcagggacgccttcgagattgccaagattgattcccatggtggccgcctggatatctccaagacacatatctcccatgatggccttgatgatcccacaaaggttgctcaggaaacatttcaggatcatctccattcagaagcatctaagcatgaagagaagcatgacagtttatccgttgcctctggatcctctgcacgtgttattgaagccttcaccatgctacacgagagtcctgaagctcaggatgttgttgcttcgcttgcttctgataagaatgtctgggaagctgtgatgaagaacaagaaacttgtggagttttacaagacaaacctcagcgagtcatccagtgtcactgacgaagctgagcagagcgacgccgagagctcgcagagcagcaatggtgtcgtctcgccggcagatgcattcagtgattacattcagatgatgaaggcgttcgtgtcggagatggtgacgaatctttcgagcataatgcaggacctggtggccacgtcagacgagggccagagcaaggggaggttgaagaccctgatcatcaactccaagaaggatttcacaaatggcccgtcgtccttcgtgctcctggccatcgcgtctattctggtcgttttgctcaagcgtgcatagttctaaataaaacaaaggagctggcagagtggttgttctgagtttagtttcgtttcagctttttgagacagacaggatttgatcttctttttctacttattagttcatcaaatggtcgattctacgcactgtacaggtcgacgttaagtcttttcaagggtttatctggtggctgtgtgttcacctggggatgaacatgttctgcatgatgtttagctgttactgcaactttatatgatggagtttagttttcttt

SEQ ID NO: 9528 - protein, 291 aa, Triticum aestivum
  misc_feature (1)..(291): Ceres Seq. ID no. 12613577
MGGGSMGIRAAARAAFIGGYRSASNARRSALPSSSAAAADTRPVSTATTFDDWYIPDREVFGPVPSHEEAMAATLDLRDAFEIAKIDSHGGRLDISKTHISHDGLDDPTKVAQETFQDHLHSEASKHEEKHDSLSVASGSSARVIEAFTMLHESPEAQDVVASLASDKNVWEAVMKNKKLVEFYKTNLSESSSVTDEAEQSDAESSQSSNGVVSPADAFSDYIQMMKAFVSEMVTNLSSIMQDLVATSDEGQSKGRLKTLIINSKKDFTNGPSSFVLLAIASILVVLLKRA

SEQ ID NO: 9529 - protein, 286 aa, Triticum aestivum
  misc_feature (1)..(286): Ceres Seq. ID no. 12613578
MGIRAAARAAFIGGYRSASNARRSALPSSSAAAADTRPVSTATTFDDWYIPDREVFGPVPSHEEAMAATLDLRDAFEIAKIDSHGGRLDISKTHISHDGLDDPTKVAQETFQDHLHSEASKHEEKHDSLSVASGSSARVIEAFTMLHESPEAQDVVASLASDKNVWEAVMKNKKLVEFYKTNLSESSSVTDEAEQSDAESSQSSNGVVSPADAFSDYIQMMKAFVSEMVTNLSSIMQDLVATSDEGQSKGRLKTLIINSKKDFTNGPSSFVLLAIASILVVLLKRA

SEQ ID NO: 9530 - protein, 221 aa, Triticum aestivum
  misc_feature (1)..(221): Ceres Seq. ID no. 12613579
MAATLDLRDAFEIAKIDSHGGRLDISKTHISHDGLDDPTKVAQETFQDHLHSEASKHEEKHDSLSVASGSSARVIEAFTMLHESPEAQDVVASLASDKNVWEAVMKNKKLVEFYKTNLSESSSVTDEAEQSDAESSQSSNGVVSPADAFSDYIQMMKAFVSEMVTNLSSIMQDLVATSDEGQSKGRLKTLIINSKKDFTNGPSSFVLLAIASILVVLLKRA

SEQ ID NO: 9531 - DNA, 851 bp, Triticum aestivum
  misc_feature (1)..(851): Ceres Seq. ID no. 12613614
acaacttgggtcccccggcggtttcctccttcctctcggacaaaaccaaacgaaccaagatacaaacttcttcttcttcttcttcttcctccggcggatctcatcttcagatcacatccaagcagcgcaagcaggagacgagacgcgctccctcgctcgctccaccgtccacaaccaaaccaggcaaagggcagcgatgacgttcgacaaggtggaggagctgcggccgggcacctacggccacaacctccagctccgggtgctcagctccaagcccgtcgtcctccacaggccgcagggcggcagggccggcggcaacatgcgcatcgccgagtgcatcgtcggcgacgacaccggcgtcgtcgtattcaccgcccgcaacgagcaagtggacgtcatgaagcccggggctgtcgtggaggcgaggaaggcgagggtggacatgtacaaggggtcgatgcgcctggccgtggacaagtgggggacgctcaaggccgccgagagccctgcggacttcaaggtgaaggaggacaacaatgtgtccttggtcgagtttgagctcatcactgtgatgcagtgattgaagagggctcctcctcccccttgcctaggaggaggaggaggaggaggaggcagaggaggctcagcagctgttaggctgagcacaaagcaataagtcggccaatcatggctcatgttcttcaccccctcccccctctctctgtttactctttatttgctgaaagttttgctagtcctgctaccttggattaattgtcgttagtaataccatatatgtttgtgaggagttacaaaaaaaaaaaaaaaaaagcttatcgataccgtcgacc

SEQ ID NO: 9532 - protein, 192 aa, Triticum aestivum
  misc_feature (1)..(192): Ceres Seq. ID no. 12613615
QLGSPGGFLLPLGQNQTNQDTNFFFFFFFLRRISSSDHIQAAQAGDETRSLARSTVHNQTRQRAAMTFDKVEELRPGTYGHNLQLRVLSSKPVVLHRPQGGRAGGNMRIAECIVGDDTGVVVFTARNEQVDVMKPGAVVEARKARVDMYKGSMRLAVDKWGTLKAAESPADFKVKEDNNVSLVEFELITVMQ

SEQ ID NO: 9533 - protein, 185 aa, Triticum aestivum
  misc_feature (1)..(185): Ceres Seq. ID no. 12613616
TTWVPRRFPPSSRTKPNEPRYKLLLLLLLPPADLIFRSHPSSASRRRDALPRSLHRPQPNQAKGSDDVRQGGGAAAGHLRPQPPAPGAQLQARRPPQAAGRQGRRQHAHRRVHRRRRHRRRRIHRPQRASGRHEARGCRGGEEGEGGHVQGVDAPGRGQVGDAQGRREPCGLQGEGGQQCVLGRV

SEQ ID NO: 9534 - protein, 127 aa, Triticum aestivum
  misc_feature (1)..(127): Ceres Seq. ID no. 12613617
MTFDKVEELRPGTYGHNLQLRVLSSKPVVLHRPQGGRAGGNMRIAECIVGDDTGVVVFTARNEQVDVMKPGAVVEARKARVDMYKGSMRLAVDKWGTLKAAESPADFKVKEDNNVSLVEFELITVMQ

SEQ ID NO: 9535 - DNA, 1824 bp, Triticum aestivum
  misc_feature (1)..(1824): Ceres Seq. ID no. 12613725
atcggagcctgctcgcccgcgcacactcggaagacgacgcagacgccgccatgggggacgccgtcgctggcgccgtcgactaccgcggccggcccgcctcccgcgccgccaccggcggctggaagtcctcggtgttcgtcatggcaatggagatcgccgagcggttcgcgtacaagggcgtggcggcgaacctcatcacgtacctcacggggccgctgggccagcccatggcgcgcgcggcggcgtccatcgacgcgtggaagggcgtctcccagatgctgccgctgccggtggcctgcgtcgccgacgcctggctcggccgctaccgggccatcgtcctcgcctccatcctcttcgtcgtgagcatgggcacgctgtcgctgtcgtcggcgttccacatcttccgctccggcggccacgtggccgtcttctacgtcgcgctctacctggtggcgctgggcgagggcgcgcacaagccctgcgcgcaggcgttcgcggccgaccagttcgacgagaaggaccccaaggagaacgtggcaaggagctccttcttcaactggtggtacttcggcatgtgcgccggcaccgccgtcaccaccatggtctccagctacgtccaggacaacgtcggctggggcctcggcttcggtatcccctgcatcgtcatcctcgtctccctcgccgtcttcctcattggcaccccctcctaccgctactacaccaccaaggagcccagccccgtcgcccgcgtcggcaaggcgctcctggtgctgatcaagagctggagatcgaagcaccgcaccaatccggcgagcggcaaggtggaggcccataagaactccgacgaggacctcgtggaggaggtgagtagcgtcttccgcctgctgcccatctgggcctcctgcataatctacgccatcatcttctcccagacctccaccttcttcaccaagcaggcggccacgctggaccgccggatcggccccaacttcaaggtgccgccggcggcgctgcagaccttcatcagcgtcagcatcgtggccttcatcccggtctacgaccgtctcttcgtgccgctcgcgcgccgctacacggggcggcccacgggcatcaccatgctgcagagggtcggcgccggcctctccctctccctcgtcgccgtcgtgctctcggcgctcgtggagatgaagcggctcgccgtcgccagggacgccggcctgctggacgcccccaaggcttctcaccttcccatgacgctctggtggatggtgccgcagtacgtcctcatcggcgtctccgacgtgttcgccatgatcggcctccaggagttcttctacgaccaggtccccgacgccgtgcgcagcctcggcctcgcgctcttcctcagcatcttcggcgtcggccacctcctcagcagcttcctcatctccgtcatcgacagggccacggccaggcgcggcgccagctggttctccaacaacctcaaccgcgcgcacctcgactacttctactggctgctcgccgggctctgcgtcgtcgagctcgtcgccttcttcttcttctcgcgagcctatgtctacaagaagaagagcgacgatggcgattacaggggaggtgatgctgatgctacattggtgtaacttattaattcgggttagtactacgccgtgcgaaattttcaaaacaagtacagtacaaaattttcagattgtttgttatagagtgcgctcgcggtagattgtcataaattttggggtttaaaaacacactcaaaacggatcttttcttaactgaacctgaatgaatcattcgacttttctttgc

SEQ ID NO: 9536 - protein, 545 aa, Triticum aestivum
  misc_feature (1)..(545): Ceres Seq. ID no. 12613726
RSLLARAHSEDDADAAMGDAVAGAVDYRGRPASRAATGGWKSSVFVMAMEIAERFAYKGVAANLITYLTGPLGQPMARAAASIDAWKGVSQMLPLPVACVADAWLGRYRAIVLASILFVVSMGTLSLSSAFHIFRSGGHVAVFYVALYLVALGEGAHKPCAQAFAADQFDEKDPKENVARSSFFNWWYFGMCAGTAVTTMVSSYVQDNVGWGLGFGIPCIVILVSLAVFLIGTPSYRYYTTKEPSPVARVGKALLVLIKSWRSKHRTNPASGKVEAHKNSDEDLVEEVSSVFRLLPIWASCIIYAIIFSQTSTFFTKQAATLDRRIGPNFKVPPAALQTFISVSIVAFIPVYDRLFVPLARRYTGRPTGITMLQRVGAGLSLSLVAVVLSALVEMKRLAVARDAGLLDAPKASHLPMTLWWMVPQYVLIGVSDVFAMIGLQEFFYDQVPDAVRSLGLALFLSIFGVGHLLSSFLISVIDRATARRGASWFSNNLNRAHLDYFYWLLAGLCVVELVAFFFFSRAYVYKKKSDDGDYRGGDADATLV

SEQ ID NO: 9537 - protein, 529 aa, Triticum aestivum
  misc_feature (1)..(529): Ceres Seq. ID no. 12613727
MGDAVAGAVDYRGRPASRAATGGWKSSVFVMAMEIAERFAYKGVAANLITYLTGPLGQPMARAAASIDAWKGVSQMLPLPVACVADAWLGRYRAIVLASILFVVSMGTLSLSSAFHIFRSGGHVAVFYVALYLVALGEGAHKPCAQAFAADQFDEKDPKENVARSSFFNWWYFGMCAGTAVTTMVSSYVQDNVGWGLGFGIPCIVILVSLAVFLIGTPSYRYYTTKEPSPVARVGKALLVLIKSWRSKHRTNPASGKVEAHKNSDEDLVEEVSSVFRLLPIWASCIIYAIIFSQTSTFFTKQAATLDRRIGPNFKVPPAALQTFISVSIVAFIPVYDRLFVPLARRYTGRPTGITMLQRVGAGLSLSLVAVVLSALVEMKRLAVARDAGLLDAPKASHLPMTLWWMVPQYVLIGVSDVFAMIGLQEFFYDQVPDAVRSLGLALFLSIFGVGHLLSSFLISVIDRATARRGASWFSNNLNRAHLDYFYWLLAGLCVVELVAFFFFSRAYVYKKKSDDGDYRGGDADATLV

SEQ ID NO: 9538 - protein, 499 aa, Triticum aestivum
  misc_feature (1)..(499): Ceres Seq. ID no. 12613728
MAMEIAERFAYKGVAANLITYLTGPLGQPMARAAASIDAWKGVSQMLPLPVACVADAWLGRYRAIVLASILFVVSMGTLSLSSAFHIFRSGGHVAVFYVALYLVALGEGAHKPCAQAFAADQFDEKDPKENVARSSFFNWWYFGMCAGTAVTTMVSSYVQDNVGWGLGFGIPCIVILVSLAVFLIGTPSYRYYTTKEPSPVARVGKALLVLIKSWRSKHRTNPASGKVEAHKNSDEDLVEEVSSVFRLLPIWASCIIYAIIFSQTSTFFTKQAATLDRRIGPNFKVPPAALQTFISVSIVAFIPVYDRLFVPLARRYTGRPTGITMLQRVGAGLSLSLVAVVLSALVEMKRLAVARDAGLLDAPKASHLPMTLWWMVPQYVLIGVSDVFAMIGLQEFFYDQVPDAVRSLGLALFLSIFGVGHLLSSFLISVIDRATARRGASWFSNNLNRAHLDYFYWLLAGLCVVELVAFFFFSRAYVYKKKSDDGDYRGGDADATLV

SEQ ID NO: 9539 - DNA, 1470 bp, Triticum aestivum
  misc_feature (1)..(1470): Ceres Seq. ID no. 12613795
agcggcgttccagtgtgtgtgtgtcacccacgacacgacgcctcccctaaacctccgcgtcgccattcccccctccagcccgccgcgatggccggaggcggcggcaagccgttcggggacaacgtgttcgccggccacgcggccgccggcgccgcggcgatcagcgcctccgcggtcgccgtccaccccctcgacaccgtcaagagcctcctccagttgagcgcggcggggcagaagcagaagatggagatccgccatgcggtggaccggctcatgcacgtctccggccctgcaggtctttacagtggcattggatggtcaatattaggtaaactgcctggtttgggagcgcgttttgggacctatgagcttttaacagccttctataaagatggcagggaggacaaccatgttaattattctgaggcaatgttggctggcataactgctggtgctgtagaggcatttgtgtgcacaccatttgaacttctcaaacttcggtcccaagttggttctgccatacctatgaaagctacgaaccctgctaatgttgtacaggagtcgtttccactgctttccaagctattacctggtcatgtccctgacatgagagtatggaatggcagtgtcagtctgttgtccaatctttccccaaagcatcctgacatgatgggtgccctgaaacagcacccatggatgctgactggctctgggaagcccccgttaccctctgatgttcaggtgccttcgagagtgatagcacttgaaggatggggtgctttatggagaggacttaggccaggggtagcccgagactgtgtctttagtggaatgttcttttcttgttggcaattcatacatacagcgatgcttacttggtagtctgttaacatgaaccctgaacccaggaatttagaagaagcaggtcctgtaccccctttagcttctagtcttgctgcaggcttctctggagttgtagcagctgctgcttcacatacttttgatactgccaaaagtcgttcacagtgcactgtgatacctaagtatatagcaatggagaggaggtttcttaaatggagagcaccaggaatgtggatagagagagtgacgggaacatcacctgctgataggaatgttctatttcgtggcattggactacggatggcgcgcagtggaatcgcatcttttgtacttgttgggtcctactatttagccgtagatcagctcttgtagatggcagtcagagaaatcattaatgaaattcaaacacctaaactatgtggtacctttttcgtctgaacaaccagagaagaggtaactatgtggtaactttttcgtctcttccagtcttaattggagttgagtgctccaggatagaattttggttactaatgtaaatgtttataacaaacagaattgaaggttcgcctttggttttgttgcttgtgttgaagagatattaagtgtttt

SEQ ID NO: 9540 - protein, 293 aa, Triticum aestivum
  misc_feature (1)..(293): Ceres Seq. ID no. 12613796
SGVPVCVCHPRHDASPKPPRRHSPLQPAAMAGGGGKPFGDNVFAGHAAAGAAAISASAVAVHPLDTVKSLLQLSAAGQKQKMEIRHAVDRLMHVSGPAGLYSGIGWSILGKLPGLGARFGTYELLTAFYKDGREDNHVNYSEAMLAGITAGAVEAFVCTPFELLKLRSQVGSAIPMKATNPANVVQESFPLLSKLLPGHVPDMRVWNGSVSLLSNLSPKHPDMMGALKQHPWMLTGSGKPPLPSDVQVPSRVIALEGWGALWRGLRPGVARDCVFSGMFFSCWQFIHTAMLTW

SEQ ID NO: 9541 - protein, 264 aa, Triticum aestivum
  misc_feature (1)..(264): Ceres Seq. ID no. 12613797
MAGGGGKPFGDNVFAGHAAAGAAAISASAVAVHPLDTVKSLLQLSAAGQKQKMEIRHAVDRLMHVSGPAGLYSGIGWSILGKLPGLGARFGTYELLTAFYKDGREDNHVNYSEAMLAGITAGAVEAFVCTPFELLKLRSQVGSAIPMKATNPANVVQESFPLLSKLLPGHVPDMRVWNGSVSLLSNLSPKHPDMMGALKQHPWMLTGSGKPPLPSDVQVPSRVIALEGWGALWRGLRPGVARDCVFSGMFFSCWQFIHTAMLTW

SEQ ID NO: 9542 - protein, 212 aa, Triticum aestivum
  misc_feature (1)..(212): Ceres Seq. ID no. 12613798
MEIRHAVDRLMHVSGPAGLYSGIGWSILGKLPGLGARFGTYELLTAFYKDGREDNHVNYSEAMLAGITAGAVEAFVCTPFELLKLRSQVGSAIPMKATNPANVVQESFPLLSKLLPGHVPDMRVWNGSVSLLSNLSPKHPDMMGALKQHPWMLTGSGKPPLPSDVQVPSRVIALEGWGALWRGLRPGVARDCVFSGMFFSCWQFIHTAMLTW

SEQ ID NO: 9543 - DNA, 499 bp, Triticum aestivum
  misc_feature (1)..(499): Ceres Seq. ID no. 12613836
agccgagatcgggagcatccgatccaccgagagagagcgaggggaagatgagcgcggcggcgggcgggcttcgtcagctgctgacggcggcggtgacggcgggggcggcggaggcgcgcgccgcgattttcgggcacgcggtgaacccgttggggaagcgcgcggcgacgaagctgctgcggaagaagctcatcggcgagcatgtcgcgcagtggtaccccgacgacatcaagcgcgacgaccccgaagtcatggcgcgcgaggagaaagagcgtcttgcgaagctggaaatgctcaagcgtcgtgggaagggtccgccgaagaagggccagggaaggcgtgcgatcaagagaaacaaataagtgccttgcttctgtttaattttagtactgatttggcagctaatgccgaaatgtttgctgcgaaactaccctctgtaataggtcaatcaagcttcattttgttactgatttcgcaatgggtgtgcttcttcttgtct

SEQ ID NO: 9544 - protein, 166 aa, Triticum aestivum
  misc_feature (1)..(166): Ceres Seq. ID no. 12613837
AEIGSIRSTERERGEDERGGGRASSAADGGGDGGGGGGARRDFRARGEPVGEARGDEAAAEEAHRRACRAVVPRRHQARRPRSHGARGERASCEAGNAQASWEGSAEEGPGKACDQEKQISALLLFNFSTDLAANAEMFAAKLPSVIGQSSFILLLISQWVCFFLS

SEQ ID NO: 9545 - protein, 119 aa, Triticum aestivum
  misc_feature (1)..(119): Ceres Seq. ID no. 12613838
PRSGASDPPRESEGKMSAAAGGLRQLLTAAVTAGAAEARAAIFGHAVNPLGKRAATKLLRKKLIGEHVAQWYPDDIKRDDPEVMAREEKERLAKLEMLKRRGKGPPKKGQGRRAIKRNK

SEQ ID NO: 9546 - protein, 104 aa, Triticum aestivum
  misc_feature (1)..(104): Ceres Seq. ID no. 12613839
MSAAAGGLRQLLTAAVTAGAAEARAAIFGHAVNPLGKRAATKLLRKKLIGEHVAQWYPDDIKRDDPEVMAREEKERLAKLEMLKRRGKGPPKKGQGRRAIKRNK

SEQ ID NO: 9547 - DNA, 1306 bp, Triticum aestivum
  misc_feature (1)..(1306): Ceres Seq. ID no. 12613953
ataaaatcctccccgttccatctcggccctcttctctcccaaccctcccccccttcaccgccgccgccacccccccgccgcgagctccgccgccccaatctccccgcggcagccatggcgaacatgcaggagtcgctcgccctggtgggcacgatgcgcggccacaacgacgtggtgacggcgatcgccgcgccgatcgacaactcgccctacatcgtgtccggctcccgcgacaagtcgctgctggtctgggacctcaccaacccggtgccgtccctcggcgacggcaccgtcggcaccgactacgccgtgcccttccgccgcctcaccggccacggccacttcgtccaggacgtggtcatcagctccgacggccagttcgcgctctccggctcctgggacggcgagctccgcctctgggacctctccaccggcctcaccacccgccgcttcgtcggccacaccaaggacgtcatctcggtcgccttctccgtcgacaaccgccagatcgtctccgcctcccgcgacaacaccatcaagctctggaacaccctcggcgagtgcaagtacaccatcggcggcgacatgggcggcggcgagggccacaccggctgggtctcgtgcgtcaggttctcccccaacatccagcagcccaccatcgtctccggctcctgggacaagaccgtcaaggtctggaatctcaccaactgcaagctccgctccaccctcgccggccacggtggctacgtgaacgccgtcgccgtcagccccgatggctcgctctgcgcctccggcggcaaggacggcgtcacgctgctctgggacctgtccgaggggaagaggctgtaccagctggaagccggctccatcatccatgcgctctgcttctcgcccaaccgctactggctctgcgctgcgacagaggaatctgtcaagatctgggacctcgagtccaagcatgtcgtgcaggacctcaagccagaagtgcaggtctccaagaaccagatgctgtactgcacaagcttgagctggagcgcggacggaagcaccctctacaccggatacaccgacgggaccatcagggtcttcaagatccaagccgggttcgccggatacgcgtaggggtcttgctggccagagaggttgtaatgcccgtcaagtttttgactgttctgaggcaacattgtctgcctggtactttcagcttgagttactgtttactttctgcttaggtgatttgttgatgagcacattatgaggtactatggaagacgatccgtttcgcaccagggtttttgctgctttc

SEQ ID NO: 9548 - protein, 409 aa, Triticum aestivum
  misc_feature (1)..(409): Ceres Seq. ID no. 12613954
KILPVPSRPSSLPTLPPFTAAATPPPRAPPPQSPRGSHGEHAGVARPGGHDARPQRRGDGDRRADRQLALHRVRLPRQVAAGLGPHQPGAVPRRRHRRHRLRRALPPPHRPRPLRPGRGHQLRRPVRALRLLGRRAPPLGPLHRPHHPPLRRPHQGRHLGRLLRRQPPDRLRLPRQHHQALEHPRRVQVHHRRRHGRRRGPHRLGLVRQVLPQHPAAHHRLRLLGQDRQGLESHQLQAPLHPRRPRWLRERRRRQPRWLALRLRRQGRRHAALGPVRGEEAVPAGSRLHHPCALLLAQPLLALRCDRGICQDLGPRVQACRAGPQARSAGLQEPDAVLHKLELERGRKHPLHRIHRRDHQGLQDPSRVRRIRVGVLLAREVVMPVKFLTVLRQHCLPGTFSLSYCLLSA

SEQ ID NO: 9549 - protein, 373 aa, Triticum aestivum
  misc_feature (1)..(373): Ceres Seq. ID no. 12613955
IKSSPFHLGPLLSQPSPPSPPPPPPRRELRRPNLPAAAMANMQESLALVGTMRGHNDVVTAIAAPIDNSPYIVSGSRDKSLLVWDLTNPVPSLGDGTVGTDYAVPFRRLTGHGHFVQDVVISSDGQFALSGSWDGELRLWDLSTGLTTRRFVGHTKDVISVAFSVDNRQIVSASRDNTIKLWNTLGECKYTIGGDMGGGEGHTGWVSCVRFSPNIQQPTIVSGSWDKTVKVWNLTNCKLRSTLAGHGGYVNAVAVSPDGSLCASGGKDGVTLLWDLSEGKRLYQLEAGSIIHALCFSPNRYWLCAATEESVKIWDLESKHVVQDLKPEVQVSKNQMLYCTSLSWSADGSTLYTGYTDGTIRVFKIQAGFAGYA

SEQ ID NO: 9550 - protein, 335 aa, Triticum aestivum
  misc_feature (1)..(335): Ceres Seq. ID no. 12613956
MANMQESLALVGTMRGHNDVVTAIAAPIDNSPYIVSGSRDKSLLVWDLTNPVPSLGDGTVGTDYAVPFRRLTGHGHFVQDVVISSDGQFALSGSWDGELRLWDLSTGLTTRRFVGHTKDVISVAFSVDNRQIVSASRDNTIKLWNTLGECKYTIGGDMGGGEGHTGWVSCVRFSPNIQQPTIVSGSWDKTVKVWNLTNCKLRSTLAGHGGYVNAVAVSPDGSLCASGGKDGVTLLWDLSEGKRLYQLEAGSIIHALCFSPNRYWLCAATEESVKIWDLESKHVVQDLKPEVQVSKNQMLYCTSLSWSADGSTLYTGYTDGTIRVFKIQAGFAGYA

SEQ ID NO: 9551 - DNA, 1407 bp, Triticum aestivum
  misc_feature (1)..(1407): Ceres Seq. ID no. 12613979
attgactcttttgcccctgcctctgaaactcaacgatttgggagttctccaccctcgccgccgccgccgcctgcatcccgggggagagcgagggtctgggtatggacgtggggtcctgcaacctcggcggcaacgccgacgcggtggagttctgcccgcaccgccccttccgccacatcctggcggccgccacgtacacgctgcaggagcaggcgggggaggagcagcagcagcaggaccgcgcgggcaccgtgtcgctcttctccgtcgacgctggcgctgaggacgagccccgacgtctccggctgctccacacggtggagaccgccggcgtcttcgacatgaagtggagccccacggcgccgctgctcgcgcaggccgacgcccacggccgcctcgtgctccggcgcctcgagcatgaagacggctcggacgaaggtgttgttctcacagacgtggttgctggaaacatttcttcatcaatgtgcttgtatgtcgactggaaccaaaatgccgattccctggccgttgcattatcagatggttcactgtctgtggttcccatgagagaggaccgcctggaggtatcagaacaatggactgctcatcagtatgaagtttggacatgttatttcgatcgtgcaagaccacacttgttgtacagtggatcggacgactgctcttacggttgctgggatttgcgggaaagcctatcgaatgctgtgtttcggaataagaagactcatactatgggtgtgtgttgcattgctcagaacccattggaggggaatatgctactcactggaagctatgatgaatttctcagagttcgggacatgagatcaatgatgaaacctgtgaacgagaagtccctgaatttaggaggtggtgtatggaggttgaaatatcatcctaatattgcagatgtagtattggctgcatgcatgcacaacggttttgccattgttaaagcaggggctggagatgctaccataatggaaacatattgcaagcatgagtccttagcatatggtgcagattggcagactagtgaagcagcggaacataacacaaattcttcagttattgctacttgttcattttatgaccgccttctccgtgtgtggcaaccagagaacctagtcaaccacccaacctctaaggcgtaaaacatcattatgcccagttgaagcatcaatatggcatggaccaacctattccctgaatgaaccaaattgatttcattcaggtagctctttgaatttatgttaatttatttcaaatggtgagcttatagtagtatgatgtctaatttatagctaggcattcacagtaatcagtatttgttgtaagcttccacaaaactttgaagttatctgttcatgttatttgagcacaaactgtttt

SEQ ID NO: 9552 - protein, 355 aa, Triticum aestivum
  misc_feature (1)..(355): Ceres Seq. ID no. 12613980
MDVGSCNLGGNADAVEFCPHRPFRHILAAATYTLQEQAGEEQQQQDRAGTVSLFSVDAGAEDEPRRLRLLHTVETAGVFDMKWSPTAPLLAQADAHGRLVLRRLEHEDGSDEGVVLTDVVAGNISSSMCLYVDWNQNADSLAVALSDGSLSVVPMREDRLEVSEQWTAHQYEVWTCYFDRARPHLLYSGSDDCSYGCWDLRESLSNAVFRNKKTHTMGVCCIAQNPLEGNMLLTGSYDEFLRVRDMRSMMKPVNEKSLNLGGGVWRLKYHPNIADVVLAACMHNGFAIVKAGAGDATIMETYCKHESLAYGADWQTSEAAEHNTNSSVIATCSFYDRLLRVWQPENLVNHPTSKA

SEQ ID NO: 9553 - protein, 275 aa, Triticum aestivum
  misc_feature (1)..(275): Ceres Seq. ID no. 12613981
MKWSPTAPLLAQADAHGRLVLRRLEHEDGSDEGVVLTDVVAGNISSSMCLYVDWNQNADSLAVALSDGSLSVVPMREDRLEVSEQWTAHQYEVWTCYFDRARPHLLYSGSDDCSYGCWDLRESLSNAVFRNKKTHTMGVCCIAQNPLEGNMLLTGSYDEFLRVRDMRSMMKPVNEKSLNLGGGVWRLKYHPNIADVVLAACMHNGFAIVKAGAGDATIMETYCKHESLAYGADWQTSEAAEHNTNSSVIATCSFYDRLLRVWQPENLVNHPTSKA

SEQ ID NO: 9554 - protein, 228 aa, Triticum aestivum
  misc_feature (1)..(228): Ceres Seq. ID no. 12613982
MCLYVDWNQNADSLAVALSDGSLSVVPMREDRLEVSEQWTAHQYEVWTCYFDRARPHLLYSGSDDCSYGCWDLRESLSNAVFRNKKTHTMGVCCIAQNPLEGNMLLTGSYDEFLRVRDMRSMMKPVNEKSLNLGGGVWRLKYHPNIADVVLAACMHNGFAIVKAGAGDATIMETYCKHESLAYGADWQTSEAAEHNTNSSVIATCSFYDRLLRVWQPENLVNHPTSKA

SEQ ID NO: 9555 - DNA, 885 bp, Triticum aestivum
  misc_feature (1)..(885): Ceres Seq. ID no. 12614051
cacgcacgcacccgagccccacaattcccatcccccactccactccccaccgaaaaaccatggcgcggcggagcggcatgctcctcctactcgccgcggccgccctgcttgccctcggcgcgggcgccgccgtgccgccgtcgtgcgagcgcatcgagtgcccggcgtacgacgtggtggacagcgccaacgggttcgagatccggcggtacaaggacgccatgtgggtgtccaccgcgcccatcgaggacatctcgctcgtcgacgccacccgctccggcttcctccagcttttcaagtacatccaggggaagaacgcctacaacgagacgatcgagatgacggcgccggtgctgacgcgggtggcgcccagcgacgggcccttctgcgtctcctccttcgtggtcagcttctacgtgccggcgaagaaccaggcggacccgccgccggccgagggcctgcacgtgcagaggtgggccggggcgaggtacgcggccgtgcgccggttcggcggcttcgtggccgacgccgacgtcggcaagcaggccgcgctgctcgacgccagcctgcaggggaccaggtgggccgccgccgtgtccgacggccgcaaggccgacccggcgtccgagtacaccgtggcgcagtacaactcgccgttcgagttcagcggcagggtcaacgagatctggatgctcttcgacaccatggccgcgtctgacatgtaactggctagatcaatcagtgaactcgtatatgagtgtcttgtcttttaagcttctatataaccggacgaataatggtggtgccttataaactgcttaagcgaaatagtgaactgttttgcgctgtatggacttgcgagcaataaagtgcctcttttggtgc

SEQ ID NO: 9556 - protein, 240 aa, Triticum aestivum
  misc_feature (1)..(240): Ceres Seq. ID no. 12614052
RTHPSPTIPIPHSTPHRKTMARRSGMLLLLAAAALLALGAGAAVPPSCERIECPAYDVVDSANGFEIRRYKDAMWVSTAPIEDISLVDATRSGFLQLFKYIQGKNAYNETIEMTAPVLTRVAPSDGPFCVSSFVVSFYVPAKNQADPPPAEGLHVQRWAGARYAAVRRFGGFVADADVGKQAALLDASLQGTRWAAAVSDGRKADPASEYTVAQYNSPFEFSGRVNEIWMLFDTMAASDM

SEQ ID NO: 9557 - protein, 238 aa, Triticum aestivum
  misc_feature (1)..(238): Ceres Seq. ID no. 12614053
THAPEPHNSHPPLHSPPKNHGAAERHAPPTRRGRPACPRRGRRRAAVVRAHRVPGVRRGGQRQRVRDPAVQGRHVGVHRAHRGHLARRRHPLRLPPAFQVHPGEERLQRDDRDDGAGADAGGAQRRALLRLLLRGQLLRAGEEPGGPAAGRGPARAEVGRGEVRGRAPVRRLRGRRRRRQAGRAARRQPAGDQVGRRRVRRPQGRPGVRVHRGAVQLAVRVQRQGQRDLDALRHHGRV

SEQ ID NO: 9558 - protein, 221 aa, Triticum aestivum
  misc_feature (1)..(221): Ceres Seq. ID no. 12614054
MARRSGMLLLLAAAALLALGAGAAVPPSCERIECPAYDVVDSANGFEIRRYKDAMWVSTAPIEDISLVDATRSGFLQLFKYIQGKNAYNETIEMTAPVLTRVAPSDGPFCVSSFVVSFYVPAKNQADPPPAEGLHVQRWAGARYAAVRRFGGFVADADVGKQAALLDASLQGTRWAAAVSDGRKADPASEYTVAQYNSPFEFSGRVNEIWMLFDTMAASDM

SEQ ID NO: 9559 - DNA, 1869 bp, Triticum aestivum
  misc_feature (1)..(1869): Ceres Seq. ID no. 12614124
caacacacatcatccaatcaacgcacatcacttcctcttataacacagttaaccatggataaggcatacattgccatcctctccttcgccttcctcttcctgatccactacattctaggcaaggtcaccaatggcaggcacagcaagggcgccgtccagctgccgccgagcccccgggccatcccgttcctcggccacctccacctcctggagaagccgttccacgccgctctgtgcggcctcgccaagcgcctcggccccgtcttctcgctgcgcctcggctcgcgccgcgcggtggtggtgtcctcgccggagtgcgccagggagtgcttcacggagcacgacgtgatcttcgccgaccggccccagttcccctcgcagctgctcgtgtccttcgacggcatcgcgctctccacgtccagctacggcccgcactggcgcaacctccgtcgcgtcgccgccgtgcagctgctctctgcgcaccgcgtcgcctgcatgtcgggcgtgatcgggggcgaggtgcgcgccatggcgcgccggcttttccgggccgccgcggcgtcccccgacggcgccgcgcgggtcgagctgaagcggaggctcttcgagctctccctcagcgtgctcatggagaccatcgcccagaccaaggggacccggccggaggccgacgccgacacggacatgtccctggaggcccaggagttcaagaaggtggtggacgagatcatcccgcacatcggcgccgccaacctgtgggactacctgccggtgctgcggtggttcgacgtgttcggagtgaggaacaagatccttgccgcggtgagcaggagggacgccttcatgctgcatctcatcgacaacgagcgccggaggcttgacgatggcggcgccgaaggcgacaagaagagcatgatcgccgtgctgctcactctgcagaagacggagccagaggtgtacaccgataccatgatcatggctctctgcgcgaatttattcggggctggaacggagaccacgtcgacgacgacggagtgggcgatgtcgctgctgctgaaccacccggcggccctcaaagaggcgcaggccgagatcgacgcggccgtggggacctcccggctggtgaccgccgacgacgtgccccggctggcctacctgcagtgcatcgtgagcgagacgctgcggctgtacccggcggcaccgatgctgctgccgcaccagtcctcggctgactgcaaggtcggcggctacaacgtgccgagcggcacgatgctgatggtgaacgcgtacgccatccaccgggacccggcggcgtgggagcggccgctggagttcgtcccggagcggttcgaggacgggaaggccgaggggcggttcatgatcccgttcgggatgggccggcggcggtgccccggagagacgctggcgctgcggactatcggcatggtgctggccacgctggtgcagtgcttcgactgggagcgcgtggacggcgcggaggtggacatgacggagggcggcgggctcaccatccccaaggccgtgccgctcgaggccgtgtgcaggccgcgcccggccatgcgcgacgtgcttgagagcctctgatctgacaatccaacttcgttcttggcatcataaaatgcatggactggtggcgtgctgatgtagtagtaaataaagtcgtgacccttgtgtgagcagagtcaagctagctatcatcctatgcagtaaattacaggtaagtgtcggggttttgtgagaactagctaaactatctaggtagcgctcgtggatcgtgatagtaccaagccagcaatttgtaatttagtttgtatcaagaatgttgtgtatgggataacaaattatttc

SEQ ID NO: 9560 - protein, 534 aa, Triticum aestivum
  misc_feature (1)..(534): Ceres Seq. ID no. 12614125
QHTSSNQRTSLPLITQLTMDKAYIAILSFAFLFLIHYILGKVTNGRHSKGAVQLPPSPRAIPFLGHLHLLEKPFHAALCGLAKRLGPVFSLRLGSRRAVVVSSPECARECFTEHDVIFADRPQFPSQLLVSFDGIALSTSSYGPHWRNLRRVAAVQLLSAHRVACMSGVIGGEVRAMARRLFRAAAASPDGAARVELKRRLFELSLSVLMETIAQTKGTRPEADADTDMSLEAQEFKKVVDEIIPHIGAANLWDYLPVLRWFDVFGVRNKILAAVSRRDAFMLHLIDNERRRLDDGGAEGDKKSMIAVLLTLQKTEPEVYTDTMIMALCANLFGAGTETTSTTTEWAMSLLLNHPAALKEAQAEIDAAVGTSRLVTADDVPRLAYLQCIVSETLRLYPAAPMLLPHQSSADCKVGGYNVPSGTMLMVNAYAIHRDPAAWERPLEFVPERFEDGKAEGRFMIPFGMGRRRCPGETLALRTIGMVLATLVQCFDWERVDGAEVDMTEGGGLTIPKAVPLEAVCRPRPAMRDVLESL

SEQ ID NO: 9561 - protein, 516 aa, Triticum aestivum
  misc_feature (1)..(516): Ceres Seq. ID no. 12614126
MDKAYIAILSFAFLFLIHYILGKVTNGRHSKGAVQLPPSPRAIPFLGHLHLLEKPFHAALCGLAKRLGPVFSLRLGSRRAVVVSSPECARECFTEHDVIFADRPQFPSQLLVSFDGIALSTSSYGPHWRNLRRVAAVQLLSAHRVACMSGVIGGEVRAMARRLFRAAAASPDGAARVELKRRLFELSLSVLMETIAQTKGTRPEADADTDMSLEAQEFKKVVDEIIPHIGAANLWDYLPVLRWFDVFGVRNKILAAVSRRDAFMLHLIDNERRRLDDGGAEGDKKSMIAVLLTLQKTEPEVYTDTMIMALCANLFGAGTETTSTTTEWAMSLLLNHPAALKEAQAEIDAAVGTSRLVTADDVPRLAYLQCIVSETLRLYPAAPMLLPHQSSADCKVGGYNVPSGTMLMVNAYAIHRDPAAWERPLEFVPERFEDGKAEGRFMIPFGMGRRRCPGETLALRTIGMVLATLVQCFDWERVDGAEVDMTEGGGLTIPKAVPLEAVCRPRPAMRDVLESL

SEQ ID NO: 9562 - protein, 369 aa, Triticum aestivum
  misc_feature (1)..(369): Ceres Seq. ID no. 12614127
MSGVIGGEVRAMARRLFRAAAASPDGAARVELKRRLFELSLSVLMETIAQTKGTRPEADADTDMSLEAQEFKKVVDEIIPHIGAANLWDYLPVLRWFDVFGVRNKILAAVSRRDAFMLHLIDNERRRLDDGGAEGDKKSMIAVLLTLQKTEPEVYTDTMIMALCANLFGAGTETTSTTTEWAMSLLLNHPAALKEAQAEIDAAVGTSRLVTADDVPRLAYLQCIVSETLRLYPAAPMLLPHQSSADCKVGGYNVPSGTMLMVNAYAIHRDPAAWERPLEFVPERFEDGKAEGRFMIPFGMGRRRCPGETLALRTIGMVLATLVQCFDWERVDGAEVDMTEGGGLTIPKAVPLEAVCRPRPAMRDVLESL

SEQ ID NO: 9563 - DNA, 748 bp, Triticum aestivum
  misc_feature (1)..(748): Ceres Seq. ID no. 12614157
atcttacctcgagcgaggcaaccggcagcagcctccgctgccagagtgccggtgggcgcgcgatgcaccagctttccctggccgcgcggccgccggcgccgcagtctcagtgttctcggagtaggacggcgtgccgctgtagcctgaagcaggcgcctgcctctctcgccgtggccgcaagacggtgcgctgccgcgccgctcttggccgcgtcgctcctcctcgccgccgccgccgcgtctcctggcattcctgccggtactccaccagcgtttgcccaatcccaaggcgcggcgctgttccggaaagcgtgcatcgggtgccacgacacgggagggaacatcctacagccgggcgccaccctctccatgaaggatcttgagaggaacggagttgccacggaggaagagatatacaacatcacttactacgggaagggaaggatgccgggttatggagagcaatgcacgccgagagggcagtgtaccttcggcccccggctgcctgaagaggatatcaagatgcttgcagcatttgtcaaatcgcaagcagagaacgggtggccaaagatcgacggtgatgtcgagtgatccgattagggttgaacacgaggtgctggctccatttcgcgaggaggctgaaaccataactgttgatgaggttaaattttttttttttttttgactcgcaaactgtagaacaattgttctaagtaattttatattaataaaatgaaaatagttattcg

SEQ ID NO: 9564 - protein, 195 aa, Triticum aestivum
  misc_feature (1)..(195): Ceres Seq. ID no. 12614158
LTSSEATGSSLRCQSAGGRAMHQLSLAARPPAPQSQCSRSRTACRCSLKQAPASLAVAARRCAAAPLLAASLLLAAAAASPGIPAGTPPAFAQSQGAALFRKACIGCHDTGGNILQPGATLSMKDLERNGVATEEEIYNITYYGKGRMPGYGEQCTPRGQCTFGPRLPEEDIKMLAAFVKSQAENGWPKIDGDVE

SEQ ID NO: 9565 - protein, 175 aa, Triticum aestivum
  misc_feature (1)..(175): Ceres Seq. ID no. 12614159
MHQLSLAARPPAPQSQCSRSRTACRCSLKQAPASLAVAARRCAAAPLLAASLLLAAAAASPGIPAGTPPAFAQSQGAALFRKACIGCHDTGGNILQPGATLSMKDLERNGVATEEEIYNITYYGKGRMPGYGEQCTPRGQCTFGPRLPEEDIKMLAAFVKSQAENGWPKIDGDVE

SEQ ID NO: 9566 - DNA, 1094 bp, Triticum aestivum
  misc_feature (1)..(1094): Ceres Seq. ID no. 12614195
atctcatcctctctctctcacacacacacaaaaccactacaggcatccatcacgattccttgcctacgcctcctcatggcggctgccaccggcgccaagcagcagcatccgcacccagctccaccaccgggggcaacggtggtggaccccaagttcgagtgggcggagaaggccggcacctacgtgctccgcctcaccctgaccggcttcaggaaggacgacttccgggtgcaggtcgacggcgcgggccggctcaccatccgcggcaccaggccgggcgcctccctccacaaggtcttccagctgccctccgccgccagcctcgacgacatcgccggccgcttcgaggccggtgtgctcacgctcaccatgcccaagcgtgccggtgcgcccaaggaggagggtgcgccaacagagcaggtcgacggcgacgggaagaggagagacgccggcggtgagaagaaggtgcctgaacccgcaccttccggtgatgcggctcccacatccatcgaggagatcagaacgaagcccaaggaagagcagcagaggccgaagaaggaaaaagaactggatcccaaggctccccaggcggcagcagctgcgcagacaccggagaagcaagcaccgaatccaacctccagcgacaagaccatggcggtggttgaccgggagtgcctggcagagacggtgaggcgacgcggcgaggaagagagggcctaggctgctgcggcggcgacggccatggaagctagagcagagcaggagaagaaggcggcggccacggcgtgcagccgctggaaagagcgcatgacggaaggcctggggcagctgacggacatgaagtgggcggagagcgcaatggagatggcgaggaagaacaaggaggtggtggccgtcggagtcgccgccttcacactcggcttcttcgtctcccagaggctcttcaagaagtgagtagctatatggagcatgaacatgtcacatacaccaacagtgagtaatacgtacgggctagtattgtgtggttataatgtacattgactgaacaaccatgtaaaaaggtatttgtgtataatcaaagtgggtgtacattg

SEQ ID NO: 9567 - protein, 239 aa, Triticum aestivum
  misc_feature (1)..(239): Ceres Seq. ID no. 12614196
ISSSLSHTHTKPLQASITIPCLRLLMAAATGAKQQHPHPAPPPGATVVDPKFEWAEKAGTYVLRLTLTGFRKDDFRVQVDGAGRLTIRGTRPGASLHKVFQLPSAASLDDIAGRFEAGVLTLTMPKRAGAPKEEGAPTEQVDGDGKRRDAGGEKKVPEPAPSGDAAPTSIEEIRTKPKEEQQRPKKEKELDPKAPQAAAAAQTPEKQAPNPTSSDKTMAVVDRECLAETVRRRGEEERA

SEQ ID NO: 9568 - protein, 214 aa, Triticum aestivum
  misc_feature (1)..(214): Ceres Seq. ID no. 12614197
MAAATGAKQQHPHPAPPPGATVVDPKFEWAEKAGTYVLRLTLTGFRKDDFRVQVDGAGRLTIRGTRPGASLHKVFQLPSAASLDDIAGRFEAGVLTLTMPKRAGAPKEEGAPTEQVDGDGKRRDAGGEKKVPEPAPSGDAAPTSIEEIRTKPKEEQQRPKKEKELDPKAPQAAAAAQTPEKQAPNPTSSDKTMAVVDRECLAETVRRRGEEERA

SEQ ID NO: 9569 - protein, 151 aa, Triticum aestivum
  misc_feature (1)..(151): Ceres Seq. ID no. 12614198
LILSLSHTHKTTTGIHHDSLPTPPHGGCHRRQAAASAPSSTTGGNGGGPQVRVGGEGRHLRAPPHPDRLQEGRLPGAGRRRGPAHHPRHQAGRLPPQGLPAALRRQPRRHRRPLRGRCAHAHHAQACRCAQGGGCANRAGRRRREEERRRR

SEQ ID NO: 9570 - DNA, 958 bp, Triticum aestivum
  misc_feature (1)..(958): Ceres Seq. ID no. 12614289
cagcgactagaatatcccggcccgaaacagcaaggtctctctctcgcgctcgcctctctcctcctcgtcttcggcggcggcgacggcggtggcgatgctgtccggcgacgttcccccgaaccagaccgtctacttcaggaacctcaacgagaaggtcaagaaagaagagctgaagagatcactttatgcattgtgctctcagtatggaaggatagtggatgttgtggccttgaaaactcataaactgagggggcaagcctgggtggcattcagtgaaattacagcggctaccaacgctttccggggcctacaggacttcgatttttacggcaaaaaaatgcgggtacaatatgcaaaaacaaagtctgactgttttgcaaaagcagatgggtcttatgctcctaaagagaaaaggaagaagcaagaggagaaagctgctgagaaaaaacggcgaactgaagatgggcaacaacctggtgctagtgctcctgttgccccaagcaatggaactggtcatcaaccttctcgttttgccaagcctccgcaagagccagctgctccgccgaacaacatcctcttcctccagaacatgccggaccagaccacgagcatgatgctccagatcctgttccagcaataccctggtttccgggaggtgcggatgatcgaagccaagccaggcattgcttttgtggagtacgaggatgagaaccagtccatggttgcaatggaagccctccagggtttcaagatcagcccagagaacccaatggccatctcatacgccaaaaagtgaaaacgatccatgtgatctcggaaccggccaaaagaaatctgtaactgtaagattttccaccttaagctttcaagctgctgtgctgtgcttgtgctggctttctaaccctgtatttcttggaagtgacttgcttgttgtttaagaagttaaaaagtatgtgct

SEQ ID NO: 9571 - protein, 233 aa, Triticum aestivum
  misc_feature (1)..(233): Ceres Seq. ID no. 12614290
MLSGDVPPNQTVYFRNLNEKVKKEELKRSLYALCSQYGRIVDVVALKTHKLRGQAWVAFSEITAATNAFRGLQDFDFYGKKMRVQYAKTKSDCFAKADGSYAPKEKRKKQEEKAAEKKRRTEDGQQPGASAPVAPSNGTGHQPSRFAKPPQEPAAPPNNILFLQNMPDQTTSMMLQILFQQYPGFREVRMIEAKPGIAFVEYEDENQSMVAMEALQGFKISPENPMAISYAKK

SEQ ID NO: 9572 - protein, 152 aa, Triticum aestivum
  misc_feature (1)..(152): Ceres Seq. ID no. 12614291
MRVQYAKTKSDCFAKADGSYAPKEKRKKQEEKAAEKKRRTEDGQQPGASAPVAPSNGTGHQPSRFAKPPQEPAAPPNNILFLQNMPDQTTSMMLQILFQQYPGFREVRMIEAKPGIAFVEYEDENQSMVAMEALQGFKISPENPMAISYAKK

SEQ ID NO: 9573 - DNA, 802 bp, Triticum aestivum
  misc_feature (1)..(802): Ceres Seq. ID no. 12614534
acggcgaaacaccccagaaatcccacccgtctccacccagataatcgcgagagatatttcgtcccggacgcgtccgccccgacgaccgaccgacaaacagcgcaaaagtaggagggagaggatgagcaccatggcgatgtcggcgctgaacccggacgcgcccatgttcatcccggcggcgttcaagaaggtggaggactactcgcccgagtggtgggagctcgtcaagaccaccgcctggttccgcgaccactggttccgccagcaccagctctacgaggacctcgccgacaacgtggacgtggacgacgtcgccgccctcctccccgacgactccgtcgacctgctcgacgccgacgacctcttctactccccgccgtcgccccagccccagcccgacttctaccactacaaaccagcagggttcggcggcgacatggacgcggtgctcaagacgctgagcctgaactcgccgaggggcggcggccccgcagcagcctgggcgccgatgaggcacgccgagaagccagcgcagcacgtcagccccagggccggcggtgccgcccgccgcgccatccaccagcctcgctagagctaaacgagtgctgctgccgccgctgctgctgtgtagtgtaaccttgagttcagttcagtcgggttcagtctagtctctccctgcatctgtgtatacagctgaaaaatgaaggggaaaacaaactgcaggcccctgcttgctagctagtgatttcccttcccttgtagcttccctcccgtgttcagaaatgggtcaagaacaaaagct

SEQ ID NO: 9574 - protein, 196 aa, Triticum aestivum
  misc_feature (1)..(196): Ceres Seq. ID no. 12614535
RRNTPEIPPVSTQIIARDISSRTRPPRRPTDKQRKSRRERMSTMAMSALNPDAPMFIPAAFKKVEDYSPEWWELVKTTAWFRDHWFRQHQLYEDLADNVDVDDVAALLPDDSVDLLDADDLFYSPPSPQPQPDFYHYKPAGFGGDMDAVLKTLSLNSPRGGGPAAAWAPMRHAEKPAQHVSPRAGGAARRAIHQPR

SEQ ID NO: 9575 - protein, 156 aa, Triticum aestivum
  misc_feature (1)..(156): Ceres Seq. ID no. 12614536
MSTMAMSALNPDAPMFIPAAFKKVEDYSPEWWELVKTTAWFRDHWFRQHQLYEDLADNVDVDDVAALLPDDSVDLLDADDLFYSPPSPQPQPDFYHYKPAGFGGDMDAVLKTLSLNSPRGGGPAAAWAPMRHAEKPAQHVSPRAGGAARRAIHQPR

SEQ ID NO: 9576 - protein, 153 aa, Triticum aestivum
  misc_feature (1)..(153): Ceres Seq. ID no. 12614537
MAMSALNPDAPMFIPAAFKKVEDYSPEWWELVKTTAWFRDHWFRQHQLYEDLADNVDVDDVAALLPDDSVDLLDADDLFYSPPSPQPQPDFYHYKPAGFGGDMDAVLKTLSLNSPRGGGPAAAWAPMRHAEKPAQHVSPRAGGAARRAIHQPR

SEQ ID NO: 9577 - DNA, 1357 bp, Triticum aestivum
  misc_feature (1)..(1357): Ceres Seq. ID no. 12614549
ccgcaggctcccagcacaaacaactgctaagcccactttgatggtgaatcgagccgttttgccgcagcaccatcgtcgacttgtagggatcaagggccagcgtcaacgcctttgaaagaaatcgaaggaattagggctactaataattcaggtggtgcgtagatcacaagaaggcgacggttaaggaagatcgaggatgccaaagcagcggcacgggaaacgcctaggcgctcttgagctagagcctcggcctcggcaggatcacctgtaccttgtctttgatgactggtcgttcggatataccatccgcaaggtaaatacgtcgaatcgcttcaatccccccgtgcagcgcttgcctcggcctttcttcaaattggaggcgccgcacgagtctccggagtacttcgcgtcagcctttggcactaggattttgctgatgcatcccagggatcctgcgggtcataacttgtccggcagcttcttccccatgttggacgtccgctcgcggagtctcacctttggccctgggctcgagtttccgattcatcccgtctatctcgccgtcggcaataagctattcattattgccgaagcctcttttgagatgctctacttggatccacaatctggctccgagtggtcgtgggaactgctcccacatccgccattccagatttacgacgtctgctcgtacgctttgtacggacattctctccttgtgagcaccgagaacgaagcctttgctgccaccttcacctttgacacggtaaaaagttcatggaaacaacttggcaagtgggtgctgcctttcgagggtcgtggtcacttcgaccctctcctgggcgcatttgttgggctctcgaaagacccagacaccctcggccaactcatttgctgctacatgcacacctccgacactggccacacccttgagttgaagctcagcaaggagaagctgttcagcgaggacccagccttgaggcacataggcgccacccttgtgtacatggaaagccagagcaaattctgcctcgtagaatgtgtctccattgttgacgacagtgctgatcaggagctcaaggaagaggaagacctgccccaatctggctgctgtctttgttgtttgactacattctatctctgtcatgacatgaatggagacccgacgaccggcaggagctgtatggtgcagtactacgaagtgcctagagcaacctctatgttgttcctccaagatcctgttgcattttggatgtaaaatgctaaaatcatgttatgatgaccgagttcctatgtttatttttcactcagttgtgactgctgcatttctatgttttaataatgtgtttactcgtct

SEQ ID NO: 9578 - protein, 353 aa, Triticum aestivum
  misc_feature (1)..(353): Ceres Seq. ID no. 12614550
MPKQRHGKRLGALELEPRPRQDHLYLVFDDWSFGYTIRKVNTSNRFNPPVQRLPRPFFKLEAPHESPEYFASAFGTRILLMHPRDPAGHNLSGSFFPMLDVRSRSLTFGPGLEFPIHPVYLAVGNKLFIIAEASFEMLYLDPQSGSEWSWELLPHPPFQIYDVCSYALYGHSLLVSTENEAFAATFTFDTVKSSWKQLGKWVLPFEGRGHFDPLLGAFVGLSKDPDTLGQLICCYMHTSDTGHTLELKLSKEKLFSEDPALRHIGATLVYMESQSKFCLVECVSIVDDSADQELKEEEDLPQSGCCLCCLTTFYLCHDMNGDPTTGRSCMVQYYEVPRATSMLFLQDPVAFWM

SEQ ID NO: 9579 - protein, 273 aa, Triticum aestivum
  misc_feature (1)..(273): Ceres Seq. ID no. 12614551
MHPRDPAGHNLSGSFFPMLDVRSRSLTFGPGLEFPIHPVYLAVGNKLFIIAEASFEMLYLDPQSGSEWSWELLPHPPFQIYDVCSYALYGHSLLVSTENEAFAATFTFDTVKSSWKQLGKWVLPFEGRGHFDPLLGAFVGLSKDPDTLGQLICCYMHTSDTGHTLELKLSKEKLFSEDPALRHIGATLVYMESQSKFCLVECVSIVDDSADQELKEEEDLPQSGCCLCCLTTFYLCHDMNGDPTTGRSCMVQYYEVPRATSMLFLQDPVAFWM

SEQ ID NO: 9580 - protein, 256 aa, Triticum aestivum
  misc_feature (1)..(256): Ceres Seq. ID no. 12614552
MLDVRSRSLTFGPGLEFPIHPVYLAVGNKLFIIAEASFEMLYLDPQSGSEWSWELLPHPPFQIYDVCSYALYGHSLLVSTENEAFAATFTFDTVKSSWKQLGKWVLPFEGRGHFDPLLGAFVGLSKDPDTLGQLICCYMHTSDTGHTLELKLSKEKLFSEDPALRHIGATLVYMESQSKFCLVECVSIVDDSADQELKEEEDLPQSGCCLCCLTTFYLCHDMNGDPTTGRSCMVQYYEVPRATSMLFLQDPVAFWM

SEQ ID NO: 9581 - DNA, 1148 bp, Triticum aestivum
  misc_feature (1)..(1148): Ceres Seq. ID no. 12614573
acaaagctggaccagaccagaccagaggcaggcagcattcgcagcagcagaagaagacgacgcagccgccaccgccaccgccaccaccgccgacgcgcgcagagctcgacactcgagagaggctgacgagggcgacgacgccggtggccatgtcggcggagacggagcggagctccacggagtcgtccgcggcgtccgggctcgacttcgaggacaccgcgctcacgctcaccctgcgcctccccggcgaccccgaccgcaagcgcggcgcctcctcctcctcctcctgctccctcgccgaccgctcctccctcctcgccgaggctccgccggcccccaaggagcgggtggttggctggccgccggtgaggtcgttccgcaagaacgcgctcgagaacgtcgccgccgggtccaccagggcggccgccgcgccggccaagttcgtcaaggtggccgtcgatggcgcgccctacctgcgcaaggtgaacctgcgggactacgccggctacgaccagctcctccgcgcgctccagggcaagttctgctcccacttcaccatcaggaagttcgccaacgacgagatgaagctggtggacgcggtgaacgggacggagtacgtgcccacctacgaggacaaggacggcgactggatgctcgtcggcgacgtcccctggaagatgtttgaggaagcctgccaacgcgtccgcctgatgaagaactccgaggccgtgaacgtagcacccagagctgcccggtgaggcacgccgcgtggcccttacgaacggtgctgccggaaaggaggaggaggctttgctctgccgaggagataggaatgtgtacagctatcggttaccactttgggtttacttgatgctcttgggtcgtgaaaagttgctggtttcattactcgtctgtagcagcaccactatagtctctactactacatatagaagatggtgatggtcaaagtactgggagcttgaaatatacgcctttacatatagtttgtttgtttgtctcttgatgaataagaccaagcttgcagaaactcggcgttctctgctgtttgcgcgcacccgtcgcgaggtcgcctgtgatgccgcaggcaacgcctttggctttgccttggtagagtttatttttgtgtc

SEQ ID NO: 9582 - protein, 251 aa, Triticum aestivum
  misc_feature (1)..(251): Ceres Seq. ID no. 12614574
KAGPDQTRGRQHSQQQKKTTQPPPPPPPPPTRAELDTRERLTRATTPVAMSAETERSSTESSAASGLDFEDTALTLTLRLPGDPDRKRGASSSSSCSLADRSSLLAEAPPAPKERVVGWPPVRSFRKNALENVAAGSTRAAAAPAKFVKVAVDGAPYLRKVNLRDYAGYDQLLRALQGKFCSHFTIRKFANDEMKLVDAVNGTEYVPTYEDKDGDWMLVGDVPWKMFEEACQRVRLMKNSEAVNVAPRAAR

SEQ ID NO: 9583 - protein, 227 aa, Triticum aestivum
  misc_feature (1)..(227): Ceres Seq. ID no. 12614575
QSWTRPDQRQAAFAAAEEDDAAATATATTADARRARHSREADEGDDAGGHVGGDGAELHGVVRGVRARLRGHRAHAHPAPPRRPRPQARRLLLLLLLPRRPLLPPRRGSAGPQGAGGWLAAGEVVPQERARERRRRVHQGGRRAGQVRQGGRRWRALPAQGEPAGLRRLRPAPPRAPGQVLLPLHHQEVRQRRDEAGGRGERDGVRAHLRGQGRRLDARRRRPLEDV

SEQ ID NO: 9584 - protein, 202 aa, Triticum aestivum
  misc_feature (1)..(202): Ceres Seq. ID no. 12614576
MSAETERSSTESSAASGLDFEDTALTLTLRLPGDPDRKRGASSSSSCSLADRSSLLAEAPPAPKERVVGWPPVRSFRKNALENVAAGSTRAAAAPAKFVKVAVDGAPYLRKVNLRDYAGYDQLLRALQGKFCSHFTIRKFANDEMKLVDAVNGTEYVPTYEDKDGDWMLVGDVPWKMFEEACQRVRLMKNSEAVNVAPRAAR

SEQ ID NO: 9585 - DNA, 1728 bp, Triticum aestivum
  misc_feature (1)..(1728): Ceres Seq. ID no. 12614670
atcaagtacacagttcactatcatctagcctttcttcccccatctctctcgagaaacaaagcaatggttcttggactgctggtgagttccccagccacggtgctatggagcctcctgggcctggcgcttctctggcaggtcaagcggctggttgactacacgtggtggcggccacggcggctccagcgggcgctgcgtgcgcagggcctccgcgggacgccgtaccgcttccccgtcggcgacctcggcgactacgggcggcagggcaaagaggcgtcgtccagggcgctgccgctgcggtgccatgacatacgcgcccacgtcgcgccgtacctctgcaacaccgtccgggagcacggcaagacgtgcgtctcctggttcggccccgtccccaaggtgaccatcgccgaccccggcgtcacccgggaggtgatgtccaacaagttcggccacttcgagaagctccagttcccgacgctgaccaggctcctcgctggcggcgtcgcggtctatgagggtgagaagtgggtcaagcacaggaggatccttaacccggcgttccatatcgagaagctcaagttcatgatgccagcattctctgcatgctgtgaagagcttgtgagcagatggactcagtcccttggttctgacggttggtgtgaggtggatgtctgcccagagtttcaaaccctcaccggagatgtcatctcacgaaccgcgttcggcagcagctacctcgaaggtagacggattttcgagctgcaatctgtgcaagccgaccgcattgtggctgaagttaagaagatcttcattcctggttatatgtccttgcctaccaagaagaacagactgatgcgtcagactaataacgagattgaacccattctacgaggtctaattgaaaaaagaatgcaatccatgcaacaaggagaaagcaccaaggatgatttactcggcttaatgcttgagtcaaacatgaggggaacagatgacaagggtcaacccatcctaggaatgacaattgaagaagtgatagaggaatgcaaattgttctattttgcagggtccgagacaacatctgtattgctcacctggacaatgatcgtactggccatgcaccccgagtggcaagaccgtgcaagggaggaggtccttggcctatttgagaagaagaagcccgagtatgacggctttagcaaactcaaaaccgtgaccatgattctttacgaggttctccgtctttatccgccggccgttgcattcatgcgaaaaacatacaaggagatagagattgaaagcatcacctaccctgccggtgtgatcatcgagcttcctgtgctgcttatccaccatgacccagacatatggggaagcgatgtgcatgagttcaagccagaaaggtttgctgatgggatcgccaaggcatccaaggatcctggtgccttcctcccatttggttggggtccacggatctgcatcggtcagaattttgctctgcttgaggccaagatggctttgtgcatgatccttcaacatttcgaattcgaccttggcccgacgtattctcatatgctgcataaccagaaaatgttgcgccccatgcatggtgcacaaattaagctcagggcaatatgacggtcagtattatagcagtgtgcatgatgtcattttattacatagtgtttagtggttggccatgtaataagctttcatacctacaaatgtttg

SEQ ID NO: 9586 - protein, 544 aa, Triticum aestivum
  misc_feature (1)..(544): Ceres Seq. ID no. 12614671
IKYTVHYHLAFLPPSLSRNKAMVLGLLVSSPATVLWSLLGLALLWQVKRLVDYTWWRPRRLQRALRAQGLRGTPYRFPVGDLGDYGRQGKEASSRALPLRCHDIRAHVAPYLCNTVREHGKTCVSWFGPVPKVTIADPGVTREVMSNKFGHFEKLQFPTLTRLLAGGVAVYEGEKWVKHRRILNPAFHIEKLKFMMPAFSACCEELVSRWTQSLGSDGWCEVDVCPEFQTLTGDVISRTAFGSSYLEGRRIFELQSVQADRIVAEVKKIFIPGYMSLPTKKNRLMRQTNNEIEPILRGLIEKRMQSMQQGESTKDDLLGLMLESNMRGTDDKGQPILGMTIEEVIEECKLFYFAGSETTSVLLTWTMIVLAMHPEWQDRAREEVLGLFEKKKPEYDGFSKLKTVTMILYEVLRLYPPAVAFMRKTYKEIEIESITYPAGVIIELPVLLIHHDPDIWGSDVHEFKPERFADGIAKASKDPGAFLPFGWGPRICIGQNFALLEAKMALCMILQHFEFDLGPTYSHMLHNQKMLRPMHGAQIKLRAI

SEQ ID NO: 9587 - protein, 523 aa, Triticum aestivum
  misc_feature (1)..(523): Ceres Seq. ID no. 12614672
MVLGLLVSSPATVLWSLLGLALLWQVKRLVDYTWWRPRRLQRALRAQGLRGTPYRFPVGDLGDYGRQGKEASSRALPLRCHDIRAHVAPYLCNTVREHGKTCVSWFGPVPKVTIADPGVTREVMSNKFGHFEKLQFPTLTRLLAGGVAVYEGEKWVKHRRILNPAFHIEKLKFMMPAFSACCEELVSRWTQSLGSDGWCEVDVCPEFQTLTGDVISRTAFGSSYLEGRRIFELQSVQADRIVAEVKKIFIPGYMSLPTKKNRLMRQTNNEIEPILRGLIEKRMQSMQQGESTKDDLLGLMLESNMRGTDDKGQPILGMTIEEVIEECKLFYFAGSETTSVLLTWTMIVLAMHPEWQDRAREEVLGLFEKKKPEYDGFSKLKTVTMILYEVLRLYPPAVAFMRKTYKEIEIESITYPAGVIIELPVLLIHHDPDIWGSDVHEFKPERFADGIAKASKDPGAFLPFGWGPRICIGQNFALLEAKMALCMILQHFEFDLGPTYSHMLHNQKMLRPMHGAQIKLRAI

SEQ ID NO: 9588 - protein, 400 aa, Triticum aestivum
  misc_feature (1)..(400): Ceres Seq. ID no. 12614673
MSNKFGHFEKLQFPTLTRLLAGGVAVYEGEKWVKHRRILNPAFHIEKLKFMMPAFSACCEELVSRWTQSLGSDGWCEVDVCPEFQTLTGDVISRTAFGSSYLEGRRIFELQSVQADRIVAEVKKIFIPGYMSLPTKKNRLMRQTNNEIEPILRGLIEKRMQSMQQGESTKDDLLGLMLESNMRGTDDKGQPILGMTIEEVIEECKLFYFAGSETTSVLLTWTMIVLAMHPEWQDRAREEVLGLFEKKKPEYDGFSKLKTVTMILYEVLRLYPPAVAFMRKTYKEIEIESITYPAGVIIELPVLLIHHDPDIWGSDVHEFKPERFADGIAKASKDPGAFLPFGWGPRICIGQNFALLEAKMALCMILQHFEFDLGPTYSHMLHNQKMLRPMHGAQIKLRAI

SEQ ID NO: 9589 - DNA, 1360 bp, Triticum aestivum
  misc_feature (1)..(1360): Ceres Seq. ID no. 12614739
aaccgccgtccgccggccgattcgactcctcccgcgaagcgccgtccatcttcgccgcccgtgccatgtcgcgccccgccggcaatccctcgtacgccgccgagctcggcgctgccaagaaggccgtcgccctcgccgcccgcctatgccagacggtgcagcaggaaattgtgcaatcagacatccaatccaaggcggataagactcctgtgaccgtagctgattatggatctcaagtactggtaagtgttgtgttaaatatggaagtaacttctggttccttttctatggtggccgaggaggactcagaagacttgagaaaggatggcgctgaagaaattctggagcgcattactgatcttgtaaacaaaactctcgctgaggatggttcatacaaccttttattatctaaggaagctatcctctctgcaattgataccgggaagtccgagggaggtccatctggccgacattgggttctagatccaattgatgggactaaaggattcgtgagaggaggccaatatgccattgcactggcactgcttgatgaaggcagggttgtcttgggtgcgttgggatgtccaaatcttccttttacatcagtaagtaacctcagtggtagctcaacaggagatcaaactggggccctcttttcagcggcaatcggttgtggtgctgaagtacagtcgttagatggctctccaccacaaaagattagtttttgtaccatcgacaatccagccaatgcctcgttctttgaatcctatgaaggagcgcactcgatgcgtgattttactggctgtgtagtggagaaacttggtgtccaagctcctccagtcagaatagatagccaagcaaaatatggtgctctggcccgtggggatggtgccatttactggcgttttccgcacgagggttacagggaaacgatatgggatcatgcagccggctcaattgtcgtcacagaagctggaggtgtagttaaagatgcctcaggaaacgatctcgatttctcgaaaggcagatttcttgatcgtgacacaggcatcattgctacaaataaacagttgatgccatcagtcctgaagtgtgtccaggaggcaatcaaggagaaaaaacaggcctcttccccattgtagaaggttcttgaaccttccctgttgtggaagttggattggtccaaaataatgatcgctatgctactccttattcatttgttcacactgtttatgtgtaactggccttttattggaaataaatacaacccttgttatacaatatctgtacatatccaaggagtggctgataggcagccatgacctgaaagaaactgaataaagatagaaatttcctgcgg

SEQ ID NO: 9590 - protein, 379 aa, Triticum aestivum
  misc_feature (1)..(379): Ceres Seq. ID no. 12614740
PPSAGRFDSSREAPSIFAARAMSRPAGNPSYAAELGAAKKAVALAARLCQTVQQEIVQSDIQSKADKTPVTVADYGSQVLVSVVLNMEVTSGSFSMVAEEDSEDLRKDGAEEILERITDLVNKTLAEDGSYNLLLSKEAILSAIDTGKSEGGPSGRHWVLDPIDGTKGFVRGGQYAIALALLDEGRVVLGALGCPNLPFTSVSNLSGSSTGDQTGALFSAAIGCGAEVQSLDGSPPQKISFCTIDNPANASFFESYEGAHSMRDFTGCVVEKLGVQAPPVRIDSQAKYGALARGDGAIYWRFPHEGYRETIWDHAAGSIVVTEAGGVVKDASGNDLDFSKGRFLDRDTGIIATNKQLMPSVLKCVQEAIKEKKQASSPL

SEQ ID NO: 9591 - protein, 358 aa, Triticum aestivum
  misc_feature (1)..(358): Ceres Seq. ID no. 12614741
MSRPAGNPSYAAELGAAKKAVALAARLCQTVQQEIVQSDIQSKADKTPVTVADYGSQVLVSVVLNMEVTSGSFSMVAEEDSEDLRKDGAEEILERITDLVNKTLAEDGSYNLLLSKEAILSAIDTGKSEGGPSGRHWVLDPIDGTKGFVRGGQYAIALALLDEGRVVLGALGCPNLPFTSVSNLSGSSTGDQTGALFSAAIGCGAEVQSLDGSPPQKISFCTIDNPANASFFESYEGAHSMRDFTGCVVEKLGVQAPPVRIDSQAKYGALARGDGAIYWRFPHEGYRETIWDHAAGSIVVTEAGGVVKDASGNDLDFSKGRFLDRDTGIIATNKQLMPSVLKCVQEAIKEKKQASSPL

SEQ ID NO: 9592 - protein, 293 aa, Triticum aestivum
  misc_feature (1)..(293): Ceres Seq. ID no. 12614742
MEVTSGSFSMVAEEDSEDLRKDGAEEILERITDLVNKTLAEDGSYNLLLSKEAILSAIDTGKSEGGPSGRHWVLDPIDGTKGFVRGGQYAIALALLDEGRVVLGALGCPNLPFTSVSNLSGSSTGDQTGALFSAAIGCGAEVQSLDGSPPQKISFCTIDNPANASFFESYEGAHSMRDFTGCVVEKLGVQAPPVRIDSQAKYGALARGDGAIYWRFPHEGYRETIWDHAAGSIVVTEAGGVVKDASGNDLDFSKGRFLDRDTGIIATNKQLMPSVLKCVQEAIKEKKQASSPL

SEQ ID NO: 9593 - DNA, 1212 bp, Triticum aestivum
  misc_feature (1)..(1212): Ceres Seq. ID no. 12614805
caaccacaagcccaactgcacggcgagcgggattggatcagtcagtagcggcgctagagagaggtaacagagggattggattggtggctggcactttgatttgcttagcgcgcgacgaagcaagctaagcgagcgcgatggtggtgctcatggagtacgcccccggcgtcggcgcgaccatgaagaggaagggagaggaggagccggggctgttcgcgttccccgatgacggcgacggcggcagcgttccggtttcctgccgtgccaccaagatgaggcgtctggagggtgccggcgccggccacgatgtgccggcggcagcggccgttgagacggagggcgacgtaatgatggcggaggagccgccggcgccgtccctcggggccgtggaaggggaaaagagggctgtggtggtgtacggcccggcagtcgacgccgcgtgcactggtggccggctcggccttctcggccaatggcggctccgcccgtgggcgcccctgagcgccggcgccgagtggatccgtgacatgctgcgcgaggcggatggccgcacggtgcgggcggtgctgtccagcgctcaggaagggggcggcgccgacctggccctggtcccttggggcgccgcacacgtgccggcagaggcgaatcaggcgtccacggccgcggagacggtggacggggaagaggacgccgagggaacggcagcgatggacgtcgaagaggagagggaccatcatcaggcccaggcggtcggggccggctgcggtgaggggtacttgtgccggtggccgcagcactgtatggcgccgcctccgttgccggcggttcgccaggcgaccccggctgtgtggtcgtggtgaaccgcgcgtggctggacgactacgaccgacggaattgatatgttcctctttgccgatgcgtgtcgcgtcgatttgtgtttgtggtgtccagttcgtcgaaatcagagcaagatcatctcttttctgacggaaagaccttcctgcccagctttattaaaattcaaataatgctaagaatgaaatctggatctggtggtgcctccaccattcaaaccgtgttgacactactcactagctagctcagggctgcaagaaaagcacgaggctcgtgagccgactcgcattttgactcgactcgaaaaaaataagctaaatataaacattttcttttttcaaaaaaaatttgtttatt

SEQ ID NO: 9594 - protein, 240 aa, Triticum aestivum
  misc_feature (1)..(240): Ceres Seq. ID no. 12614806
MVVLMEYAPGVGATMKRKGEEEPGLFAFPDDGDGGSVPVSCRATKMRRLEGAGAGHDVPAAAAVETEGDVMMAEEPPAPSLGAVEGEKRAVVVYGPAVDAACTGGRLGLLGQWRLRPWAPLSAGAEWIRDMLREADGRTVRAVLSSAQEGGGADLALVPWGAAHVPAEANQASTAAETVDGEEDAEGTAAMDVEEERDHHQAQAVGAGCGEGYLCRWPQHCMAPPPLPAVRQATPAVWSW

SEQ ID NO: 9595 - protein, 236 aa, Triticum aestivum
  misc_feature (1)..(236): Ceres Seq. ID no. 12614807
MEYAPGVGATMKRKGEEEPGLFAFPDDGDGGSVPVSCRATKMRRLEGAGAGHDVPAAAAVETEGDVMMAEEPPAPSLGAVEGEKRAVVVYGPAVDAACTGGRLGLLGQWRLRPWAPLSAGAEWIRDMLREADGRTVRAVLSSAQEGGGADLALVPWGAAHVPAEANQASTAAETVDGEEDAEGTAAMDVEEERDHHQAQAVGAGCGEGYLCRWPQHCMAPPPLPAVRQATPAVWSW

SEQ ID NO: 9596 - protein, 226 aa, Triticum aestivum
  misc_feature (1)..(226): Ceres Seq. ID no. 12614808
MKRKGEEEPGLFAFPDDGDGGSVPVSCRATKMRRLEGAGAGHDVPAAAAVETEGDVMMAEEPPAPSLGAVEGEKRAVVVYGPAVDAACTGGRLGLLGQWRLRPWAPLSAGAEWIRDMLREADGRTVRAVLSSAQEGGGADLALVPWGAAHVPAEANQASTAAETVDGEEDAEGTAAMDVEEERDHHQAQAVGAGCGEGYLCRWPQHCMAPPPLPAVRQATPAVWSW

SEQ ID NO: 9597 - DNA, 1243 bp, Triticum aestivum
  misc_feature (1)..(1243): Ceres Seq. ID no. 12614809
aacatccaatcgaaaaacacactgttaacctcggtagcagaggcatcactccacagcttgcctgcaagccatcttctccacgattccgctcacggttcatcggttgccacccgattctggtgcgccgtcgcagagcggcgaagatggccaccaaggggcgcaaggtcgtcgaggtccgtgacgcgagcaggacggacgggaagggcgacgccgcggacgtccacgtcgtccgcgaggggaagagcgaccacgacaccgccggcggcgtcggccaccgcggcgcgagcaggacggacgggcatggcgacgcgggcggcaaggtcggggacttccgcggcatcgacgggaaggactccctgaagatcgtcgcgatgcaggcgccggtcaccgtggagcgccccgtccgcggcgacctcgaggagcacgtccccaagccctatttggcgagggctttggcggctccggacatgtaccacccggaggggacgacggatgatcaccagcaccacaacatgagcgtgctgcagcagcacgtcgccttcttcgaccgcgacaacaacggcatcatctatccctgggagacttacgatggatgccgtgcggttgggttcaacgtgttcatgtccgccttcatcgcgtttctggtgaacctggtcatgagctatcccaccctgcccggttggctgccgaaccctctcttcccgatctacgtgcacaacatccacaagagcaagcacgggagtgattcggggacctatgacaaagagggccggttcatgccggtgaatttcgagaacatcttcagcaagtacgcccgcacgtacccggacaggctcagctacagggagctgtggcggatgaccgaggggtgccgggaggtgttcgatttcttcggctgggtggcgatgaagctggagtggtcgttcctgtacgtgctggctcgggacgacgaagggtacctgtcgagggaggccatccggcgcatgtacgacggcagcctcttcgagtacatggagaggcagcgcatggagcacgtcaagatgtcctagatcacagtcgacggtgaaactcgcatggtcggagctgcacccacctgtgatgctttccgtgtccgtgtgtgtgatgtacagcaggccacagatccatgcggtgtgccgctggtgtggcgaaatgaaaacataaataacgtgatatatgccatggtttaaaaaaaaaaaaaaaaaagcttatcgataccgtcgac

SEQ ID NO: 9598 - protein, 348 aa, Triticum aestivum
  misc_feature (1)..(348): Ceres Seq. ID no. 12614810
HPIEKHTVNLGSRGITPQLACKPSSPRFRSRFIGCHPILVRRRRAAKMATKGRKVVEVRDASRTDGKGDAADVHVVREGKSDHDTAGGVGHRGASRTDGHGDAGGKVGDFRGIDGKDSLKIVAMQAPVTVERPVRGDLEEHVPKPYLARALAAPDMYHPEGTTDDHQHHNMSVLQQHVAFFDRDNNGIIYPWETYDGCRAVGFNVFMSAFIAFLVNLVMSYPTLPGWLPNPLFPIYVHNIHKSKHGSDSGTYDKEGRFMPVNFENIFSKYARTYPDRLSYRELWRMTEGCREVFDFFGWVAMKLEWSFLYVLARDDEGYLSREAIRRMYDGSLFEYMERQRMEHVKMS

SEQ ID NO: 9599 - protein, 301 aa, Triticum aestivum
  misc_feature (1)..(301): Ceres Seq. ID no. 12614811
MATKGRKVVEVRDASRTDGKGDAADVHVVREGKSDHDTAGGVGHRGASRTDGHGDAGGKVGDFRGIDGKDSLKIVAMQAPVTVERPVRGDLEEHVPKPYLARALAAPDMYHPEGTTDDHQHHNMSVLQQHVAFFDRDNNGIIYPWETYDGCRAVGFNVFMSAFIAFLVNLVMSYPTLPGWLPNPLFPIYVHNIHKSKHGSDSGTYDKEGRFMPVNFENIFSKYARTYPDRLSYRELWRMTEGCREVFDFFGWVAMKLEWSFLYVLARDDEGYLSREAIRRMYDGSLFEYMERQRMEHVKMS

SEQ ID NO: 9600 - protein, 225 aa, Triticum aestivum
  misc_feature (1)..(225): Ceres Seq. ID no. 12614812
MQAPVTVERPVRGDLEEHVPKPYLARALAAPDMYHPEGTTDDHQHHNMSVLQQHVAFFDRDNNGIIYPWETYDGCRAVGFNVFMSAFIAFLVNLVMSYPTLPGWLPNPLFPIYVHNIHKSKHGSDSGTYDKEGRFMPVNFENIFSKYARTYPDRLSYRELWRMTEGCREVFDFFGWVAMKLEWSFLYVLARDDEGYLSREAIRRMYDGSLFEYMERQRMEHVKMS

SEQ ID NO: 9601 - DNA, 1151 bp, Triticum aestivum
  misc_feature (1)..(1151): Ceres Seq. ID no. 12614814
cttttcgcattgcagcctctcaaaacagccaaaccgaaccccaaaagctcgccgagaaacgcagaaaggagcgaagcaaaccaagcagcagcagcagcggaagaagaagaagaagcgaggagctgagccagctagcaatggcggcggacctgggcttcgaggcgaccgagctccggctcggcctgcccggcggcggcgagggggaggcgaggagctcctccggcaagaggggcttcgccgagaccatcgacctgaagctcaagctggagccggccggcgaggaggcgccggccgaggaggatcgggccgacgtggccgtggtcgccgccgcggcggcagagaaccaggaggagacggcgaccgacgccggcggagggaagatgaagaggtcgccgagccagagcagcgtcgtcaccaccgccgcgctgcccgaccccgccgagaagccgcgcgctcccaaggcgcaggtggtggggtggcctccggtccggtcgttccggaagaacatcctggcggagaagtcgtcgccggcggcagcggcggcgttcgtcaaggtgagcatggacggcgcgccctacctgcgcaaggtggacctcaacatgtacaagacctaccaggacctctccaaggccctcgagaagatgttcagctccttcaccatcggaaactgtggaactccagggatgaacggcatgaacgagagcaagctgatggatcttctcaacggatccgagtatgttccgacgtacgaggacaaggacggcgactggatgctcgtcggcgacgtcccatgggagatgttcgtcgagtcatgcaagcgccttcggataatgaagggatcagaagctattggccttgcaccaagggcgatggagaaatgcaagaacaggagctgaggagaggatgcactaaatgttatgcaagaatcaaaatacctatataaccttgcttgctcatccctgtatcatattctctgtcctaagtctaagtctgtatctcctgatcagtgaagtcattttggtttgtgatcttctcttttccagtcagtcagtcccaagtctcatcttgttatatacataagaaagaagaatccaagaacatgtgagatgtatctgtacctgtctgccacataattgtgtcttctccttttc

SEQ ID NO: 9602 - protein, 313 aa, Triticum aestivum
  misc_feature (1)..(313): Ceres Seq. ID no. 12614815
FSHCSLSKQPNRTPKARRETQKGAKQTKQQQQRKKKKKRGAEPASNGGGPGLRGDRAPARPARRRRGGGEELLRQEGLRRDHRPEAQAGAGRRGGAGRGGSGRRGRGRRRGGREPGGDGDRRRRREDEEVAEPEQRRHHRRAARPRREAARSQGAGGGVASGPVVPEEHPGGEVVAGGSGGVRQGEHGRRALPAQGGPQHVQDLPGPLQGPREDVQLLHHRKLWNSRDERHEREQADGSSQRIRVCSDVRGQGRRLDARRRRPMGDVRRVMQAPSDNEGIRSYWPCTKGDGEMQEQELRRGCTKCYARIKIPI

SEQ ID NO: 9603 - protein, 297 aa, Triticum aestivum
  misc_feature (1)..(297): Ceres Seq. ID no. 12614816
FRIAASQNSQTEPQKLAEKRRKERSKPSSSSSGRRRRSEELSQLAMAADLGFEATELRLGLPGGGEGEARSSSGKRGFAETIDLKLKLEPAGEEAPAEEDRADVAVVAAAAAENQEETATDAGGGKMKRSPSQSSVVTTAALPDPAEKPRAPKAQVVGWPPVRSFRKNILAEKSSPAAAAAFVKVSMDGAPYLRKVDLNMYKTYQDLSKALEKMFSSFTIGNCGTPGMNGMNESKLMDLLNGSEYVPTYEDKDGDWMLVGDVPWEMFVESCKRLRIMKGSEAIGLAPRAMEKCKNRS

SEQ ID NO: 9604 - protein, 252 aa, Triticum aestivum
  misc_feature (1)..(252): Ceres Seq. ID no. 12614817
MAADLGFEATELRLGLPGGGEGEARSSSGKRGFAETIDLKLKLEPAGEEAPAEEDRADVAVVAAAAAENQEETATDAGGGKMKRSPSQSSVVTTAALPDPAEKPRAPKAQVVGWPPVRSFRKNILAEKSSPAAAAAFVKVSMDGAPYLRKVDLNMYKTYQDLSKALEKMFSSFTIGNCGTPGMNGMNESKLMDLLNGSEYVPTYEDKDGDWMLVGDVPWEMFVESCKRLRIMKGSEAIGLAPRAMEKCKNRS

SEQ ID NO: 9605 - DNA, 1116 bp, Triticum aestivum
  misc_feature (1)..(1116): Ceres Seq. ID no. 12614847
cccaaattcctcctcctgcctgcctgctgccgcgagagtcctccactccacaacaaccttcgagaacgagcgcgcgcacggaggcggccgcgatctctcgcccaccaacccaccacccgcgccatggcttccaccaatggcggctttgtcagtcctcttgcagcggccgttccagttgaggcggttttgtttgacattgatggtaccttgtgcgactcggatcctcttcatcacatcgctttccaagaattgcttcttgcgattgggtacaacaatggtgtgcctattgacgacgagttcttcataaacaacatcgctggaagaagcgatgctgaagctgcccagaatttgttcccagactggcccctcgaaaaggggctgaaattcctagaggacaaagacgtcaaatacagaagtttggcgatggagcgcctagagcctgtaaagggccttcacaaagtggttcagtgggtgaaagatcacggctacaagcgtgccgcagtaaccaatgccccaaggatcaatgcagagctcatgatcaaacttcttggtctatcagacttcttccaggctgtcattgttggaggcgaatgtgagaagccaaaacccgccccctttccatacctgaaggccctcaaggagctcgaagtgtccgcagcacacaccttcatcttcgaggattccgcttcagggacacgcgcaggtgttgccgcgggaatgcccgtcgtcgccgtctcgacgaggaacccggagaagtccctacaggaagctggggccgcattgatcatcagtgactatgaagaccagaaactgtggaacgcgctcgaggagattgatagggaggaagcgaagctaaagactggtggggcgtgagacttttgatggggatgaacagttgattagaccactgcaaatttatccattcttattatttataagggattctacaccctgaagttattatggtaggatagtttgatatatgtttcttttggttctctagtagagaatcaaataaaaaactttagtgcccaacacatgagatttgtttggttgacgggacctatgaaaatggcatatctgtcaggctcattgcctaccagaattttgactgtt

SEQ ID NO: 9606 - protein, 290 aa, Triticum aestivum
  misc_feature (1)..(290): Ceres Seq. ID no. 12614848
PKFLLLPACCRESPPLHNNLRERARARRRPRSLAHQPTTRAMASTNGGFVSPLAAAVPVEAVLFDIDGTLCDSDPLHHIAFQELLLAIGYNNGVPIDDEFFINNIAGRSDAEAAQNLFPDWPLEKGLKFLEDKDVKYRSLAMERLEPVKGLHKVVQWVKDHGYKRAAVTNAPRINAELMIKLLGLSDFFQAVIVGGECEKPKPAPFPYLKALKELEVSAAHTFIFEDSASGTRAGVAAGMPVVAVSTRNPEKSLQEAGAALIISDYEDQKLWNALEEIDREEAKLKTGGA

SEQ ID NO: 9607 - protein, 249 aa, Triticum aestivum
  misc_feature (1)..(249): Ceres Seq. ID no. 12614849
MASTNGGFVSPLAAAVPVEAVLFDIDGTLCDSDPLHHIAFQELLLAIGYNNGVPIDDEFFINNIAGRSDAEAAQNLFPDWPLEKGLKFLEDKDVKYRSLAMERLEPVKGLHKVVQWVKDHGYKRAAVTNAPRINAELMIKLLGLSDFFQAVIVGGECEKPKPAPFPYLKALKELEVSAAHTFIFEDSASGTRAGVAAGMPVVAVSTRNPEKSLQEAGAALIISDYEDQKLWNALEEIDREEAKLKTGGA

SEQ ID NO: 9608 - protein, 149 aa, Triticum aestivum
  misc_feature (1)..(149): Ceres Seq. ID no. 12614850
MERLEPVKGLHKVVQWVKDHGYKRAAVTNAPRINAELMIKLLGLSDFFQAVIVGGECEKPKPAPFPYLKALKELEVSAAHTFIFEDSASGTRAGVAAGMPVVAVSTRNPEKSLQEAGAALIISDYEDQKLWNALEEIDREEAKLKTGGA

SEQ ID NO: 9609 - DNA, 1369 bp, Triticum aestivum
  misc_feature (1)..(1369): Ceres Seq. ID no. 12614996
aaaaaacacgcgctccccattcttcttattaattcccgcgtgcgcggacgtacggcagcgagcctctcccggactccgattccttccttccttccggcggaggtgtcggctctcctctcccctcccagagagaggaaacccggaggaagcagagacggccggacagatggattttggggcagagcagcacggctgcgagcattacacgaggaggtgcaggatacgggcgccctgctgcggcgaggtcttcggctgccggcattgccacaaccaagctaagaattcgctggaggtggacctcctcgaccggcacgagatcccccgccacgaaatcagcaaggttatctgctctctctgcaacaaagaacaggatgtgcaacagaactgctccggttgcggggcatgcatgggaaaatacttctgtgaaaaatgcaacttctttgacgacgatatctcaaagaagcagtatcactgcgatggatgcggcatctgcagaactggcggcatagacaacttcttccactgcgaaaaatgcgggtgttgctacagcaatgttttgaaggactctcatcattgtgtggaacgagcaatgcatcacaactgccctgtctgcttcgagtacctatttgactcgaccatggacatcagcgtactgcactgcgggcacacgatccatttggaatgcctgaacgagatgagggttcatcaccacttctcgtgcccggtctgctcacggtcggcctgcgacatgacggatgcgtggcagaagctcgaccaggaggtcgccgccacgccgatgccagagttctaccagaagaagatggtatggatcctctgcaacgactgcggggcgacgtcgagcgtgcgcttccacgtcctggcgcaaaagtgtcctgggtgcagctcctacaacaccagggagacgaggggcggcccagctacagcggcgtgctccagagtctgagcgccaggaggagacgacagtacaacagacactactcactcatagtcacagctgtgacactaccaaggatctggtcaagatgatgggggcattagagctagcttgtaggttgaagctgcgagtgcttgctgcagtaggaagcacaggagagtcacgcgtctcctcttgcgaacaagccaggaattgcttgccgtcgccgacagggaggccaccgcggttgctcatcgcaattcggagaacaacaaaactcgatgcgcttgcataaatccggaggaatgatttaccgcttgatcatcccctctgatatgtatgagttgttgtgtggtacatgaccctgtctagggagctcctgtaaggctatgaaacaattacacaccagaaagaaaacttgttcttctttctgtt

SEQ ID NO: 9610 - protein, 320 aa, Triticum aestivum
  misc_feature (1)..(320): Ceres Seq. ID no. 12614997
KNTRSPFFLLIPACADVRQRASPGLRFLPSFRRRCRLSSPLPERGNPEEAETAGQMDFGAEQHGCEHYTRRCRIRAPCCGEVFGCRHCHNQAKNSLEVDLLDRHEIPRHEISKVICSLCNKEQDVQQNCSGCGACMGKYFCEKCNFFDDDISKKQYHCDGCGICRTGGIDNFFHCEKCGCCYSNVLKDSHHCVERAMHHNCPVCFEYLFDSTMDISVLHCGHTIHLECLNEMRVHHHFSCPVCSRSACDMTDAWQKLDQEVAATPMPEFYQKKMVWILCNDCGATSSVRFHVLAQKCPGCSSYNTRETRGGPATAACSRV

SEQ ID NO: 9611 - protein, 265 aa, Triticum aestivum
  misc_feature (1)..(265): Ceres Seq. ID no. 12614998
MDFGAEQHGCEHYTRRCRIRAPCCGEVFGCRHCHNQAKNSLEVDLLDRHEIPRHEISKVICSLCNKEQDVQQNCSGCGACMGKYFCEKCNFFDDDISKKQYHCDGCGICRTGGIDNFFHCEKCGCCYSNVLKDSHHCVERAMHHNCPVCFEYLFDSTMDISVLHCGHTIHLECLNEMRVHHHFSCPVCSRSACDMTDAWQKLDQEVAATPMPEFYQKKMVWILCNDCGATSSVRFHVLAQKCPGCSSYNTRETRGGPATAACSRV

SEQ ID NO: 9612 - protein, 185 aa, Triticum aestivum
  misc_feature (1)..(185): Ceres Seq. ID no. 12614999
MGKYFCEKCNFFDDDISKKQYHCDGCGICRTGGIDNFFHCEKCGCCYSNVLKDSHHCVERAMHHNCPVCFEYLFDSTMDISVLHCGHTIHLECLNEMRVHHHFSCPVCSRSACDMTDAWQKLDQEVAATPMPEFYQKKMVWILCNDCGATSSVRFHVLAQKCPGCSSYNTRETRGGPATAACSRV

SEQ ID NO: 9613 - DNA, 887 bp, Triticum aestivum
  misc_feature (1)..(887): Ceres Seq. ID no. 12615117
aaaccatttgtcgtgagaccatctctcaccataggtcaactgctttggaaaggcggaagtggaagctagggtttaagaaggtccaggacgaagtggatcacggcgatggcgtcggcgaaaatcctagcgcgggctggctcctccttcctcggccgcctcctcgcctccccgcctccgtctcttctgcggaccggacctcctcttccgtcgctgctccataggatccagccgcacgtcccgccgccgccggcgtcggtggacgcacacgacgcggaggtggtcgcgagactaacttcgctccccggggagatctccttcccctgcggcctcccctctctccggttcctcattgacgatggaattgatcctgttgctaatgaaccccttgagttacttcccaaaaggacttaccaacccagcaccatcaagcggaaacgaacccatggatttcgtgcacgtaaatcaaccacgggtgggcgtaaggtgattgctcggagaattgctaaaggaaggcacaaaatttcatggtaatgaaaacccatggcaccgatgggagtttcacctcagctttgaatgatgctaatgtgaacatctaggagcttacaatagatgtattctccttccgaggcggggttagagcaaagccaagagacacctgcctgaatttcttcaccaaacaaaacgtttgttccactgaataaacatgacaaggagatggttatcgatgattttactgctatttgagatatgtacttgtatgctagttcgactgcattatgcatttgcttgtgttgtcaaactgtcagagtagcatccttggggtcatttccgtccatcaaactatgatgttcgcgttttcccccctttaagaaaaaagttttgcgtgc

SEQ ID NO: 9614 - protein, 141 aa, Triticum aestivum
  misc_feature (1)..(141): Ceres Seq. ID no. 12615118
MASAKILARAGSSFLGRLLASPPPSLLRTGPPLPSLLHRIQPHVPPPPASVDAHDAEVVARLTSLPGEISFPCGLPSLRFLIDDGIDPVANEPLELLPKRTYQPSTIKRKRTHGFRARKSTTGGRKVIARRIAKGRHKISW

SEQ ID NO: 9615 - protein, 72 aa, Triticum aestivum
  misc_feature (1)..(72): Ceres Seq. ID no. 12615119
TICRETISHHRSTALERRKWKLGFKKVQDEVDHGDGVGENPSAGWLLLPRPPPRLPASVSSADRTSSSVAAP

SEQ ID NO: 9616 - DNA, 693 bp, Triticum aestivum
  misc_feature (1)..(693): Ceres Seq. ID no. 12615235
attctcgttccaatccaccactccgccgctagggtttttaggttttaatcccacagcagcggcggccgtcggcggcgacaaccaaaaccccgcgtcatctccagcgaactcgagcgagagagatgaggctcctcacgcacaacttcttggcgtcgaacgtgaagggcgtgagcacgggctacccgctcgcgctggaggtcgccaagacgtccatcaaggaggtggagctcaacgtcgacttcctccgcgggatccttcccaagatcgactggagagcgctcttcgcagccaccagcgccgcggggttcccggagctcctcgccgcggagcagccgcccgaggccgagctcttcgccgagggcgccgcggaggtcgagggcagcgctatccgccgcctccaccacgcgctcctcgagatccacgtcgaggagggcaccctcgtctgccccgacagcggccgctccttccccatcctgaagggcgtccccaatatgcttctccatgaggacgaggtgcggcactgactcgcgcgtagcaggccggttgccttgcttgcttgtttgctcgtgccacatacggttatgcacttccagggcttggactcctaagattgtgtgtatgaactatcttagtatgaattgtggatcttgaagtcgtaccttgataaatactactcctacctgtgacgttttc

SEQ ID NO: 9617 - protein, 167 aa, Triticum aestivum
  misc_feature (1)..(167): Ceres Seq. ID no. 12615236
FSFQSTTPPLGFLGFNPTAAAAVGGDNQNPASSPANSSERDEAPHAQLLGVEREGREHGLPARAGGRQDVHQGGGAQRRLPPRDPSQDRLESALRSHQRRGVPGAPRRGAAARGRALRRGRRGGRGQRYPPPPPRAPRDPRRGGHPRLPRQRPLLPHPEGRPQYASP

SEQ ID NO: 9618 - protein, 133 aa, Triticum aestivum
  misc_feature (1)..(133): Ceres Seq. ID no. 12615237
MRLLTHNFLASNVKGVSTGYPLALEVAKTSIKEVELNVDFLRGILPKIDWRALFAATSAAGFPELLAAEQPPEAELFAEGAAEVEGSAIRRLHHALLEIHVEEGTLVCPDSGRSFPILKGVPNMLLHEDEVRH

SEQ ID NO: 9619 - DNA, 816 bp, Triticum aestivum
  misc_feature (1)..(816): Ceres Seq. ID no. 12615300
aacccaaacccccgctaagcatcagcagcagtgcagcacctcccttctacctcctctgctctgcattcctccttccagctccagccgcaatcaatggccgccatgaagatcaccctcctcgccgtggccgcgatggccgtcttactaggcagcgcgtcagcggtaacctacaacgtcggcgatcagggcggttgggccctcagcaccgactacagcaactgggtgtccggcaagaagttcaacgtgggtgatgacatcgtcttcaagtactcgaccccgacgcacgacgtggtcgaggtcagcaaggccggctacgactcctgcagcaccgacggcgccatcaacaccttaacctccggcaacgacgtcatctccctcaacgccaccggcacccgctacttcatctgtggcgtccctaaccattgcagccccgccgccgccgccagcatgaaggtcgtgatcgacgtcgcctcgggctcctcctcgccgtcgtcacccatgccagctgcaggtcctggcgcgagcaactctcccccggcgccgccctccaacgccgctacctccgtcggtgccacagcaggatttggcctcgtcgccctcctggcggccggtctcatggcttgaacgcatatattgatcagctgccgcgcgcacatacgactttatcttttgttattaactactatactgtagttattatcacgggtgaatacatgtattcttttttagagcgagaatgtgatagttacttgtatctatcacgtctatatgtaatctgcaggccttcatgtctttttatataatgattctagactg

SEQ ID NO: 9620 - protein, 176 aa, Triticum aestivum
  misc_feature (1)..(176): Ceres Seq. ID no. 12615301
MAAMKITLLAVAAMAVLLGSASAVTYNVGDQGGWALSTDYSNWVSGKKFNVGDDIVFKYSTPTHDVVEVSKAGYDSCSTDGAINTLTSGNDVISLNATGTRYFICGVPNHCSPAAAASMKVVIDVASGSSSPSSPMPAAGPGASNSPPAPPSNAATSVGATAGFGLVALLAAGLMA

SEQ ID NO: 9621 - protein, 173 aa, Triticum aestivum
  misc_feature (1)..(173): Ceres Seq. ID no. 12615302
MKITLLAVAAMAVLLGSASAVTYNVGDQGGWALSTDYSNWVSGKKFNVGDDIVFKYSTPTHDVVEVSKAGYDSCSTDGAINTLTSGNDVISLNATGTRYFICGVPNHCSPAAAASMKVVIDVASGSSSPSSPMPAAGPGASNSPPAPPSNAATSVGATAGFGLVALLAAGLMA

SEQ ID NO: 9622 - protein, 163 aa, Triticum aestivum
  misc_feature (1)..(163): Ceres Seq. ID no. 12615303
MAVLLGSASAVTYNVGDQGGWALSTDYSNWVSGKKFNVGDDIVFKYSTPTHDVVEVSKAGYDSCSTDGAINTLTSGNDVISLNATGTRYFICGVPNHCSPAAAASMKVVIDVASGSSSPSSPMPAAGPGASNSPPAPPSNAATSVGATAGFGLVALLAAGLMA

SEQ ID NO: 9623 - DNA, 1382 bp, Triticum aestivum
  misc_feature (1)..(1382): Ceres Seq. ID no. 12615622
aaaaaaccaagtctcgcacgccatcttggcaagcactctctcctcccccaccgcgccgccgagctccgcctccggcagacgcaagcaggccacctcggacgaattcttcttcccctactcctcgtatctaccgcgatggcgtcgggtggagatctcccatccgggtttgctgatgagagcaaaagtacgaaaacagaaggatcatccaacgaacgtcaaggggttcctccagctgccgctgcaggcttgtcgggtcctttcgatttttcttctatgcaaagtttgctcaatgatccatctataaaggagatggcagaccagattgcaagggaccctgcattcaatcagatggctgagcagctacagaaaggtgctcagactgcaggagaacagggcatgcctccattggatcctcatcaatacatggaaacaatgcaaaaggtcatggaaaaccctcagtttatgacaatggcagagcgcctcgggactgctcttatgcaggatcctgctatgtccagtatgctggaaaatttgactagtccaacacataaggaggagcttgaagagcgcatgtctcggattaaggaagatccagccttgaagccaattcttgatgagttagagaatggtggtcctgctgcaatgataaagtactggaatgaccctgaaactcttcaaaagattggccaggcaatgggaactaccatgccgtttagcactgtctctactgctgaaccttctggtactgaagaaactgaagaagaaggtgaagatgaagacgaatccattgtccaccacactgccagtgttggtgacggtgagggtctgaagaaggctctagatggtggagcagacaaggatgaagaagactctgagggaagaagggccttgcactttgcatgtggatatggtgagttcaagtgtgcggaaatcctccttgaggcgggtgctgctgtagatgccatggataagaacaagaacaccccactgcattacgctgctggctatggccggaaagagtgtgtggatcttctgttgaagcacggtgctgctgtcactctccaaaacatggatgggaagacgcccatcgacgtcgccaagctcaacaaccaggacgaggtcctcaagctgctcgagaaggacgtgttcctgtaaatcacttcacttggcccccatgaagagacatcatgttttacatcccttggcattggttttatatagtcatacacgaatcggcattttattcgttgtgtaagaatctactgttagctagcctgcaggccgactggctgaggttagaactgcatgttactgtatatggagacctgtgtatcgtccactttgtttctgttgattccactagagtaatccaagatgtactc

SEQ ID NO: 9624 - protein, 384 aa, Triticum aestivum
  misc_feature (1)..(384): Ceres Seq. ID no. 12615623
KKPSLARHLGKHSLLPHRAAELRLRQTQAGHLGRILLPLLLVSTAMASGGDLPSGFADESKSTKTEGSSNERQGVPPAAAAGLSGPFDFSSMQSLLNDPSIKEMADQIARDPAFNQMAEQLQKGAQTAGEQGMPPLDPHQYMETMQKVMENPQFMTMAERLGTALMQDPAMSSMLENLTSPTHKEELEERMSRIKEDPALKPILDELENGGPAAMIKYWNDPETLQKIGQAMGTTMPFSTVSTAEPSGTEETEEEGEDEDESIVHHTASVGDGEGLKKALDGGADKDEEDSEGRRALHFACGYGEFKCAEILLEAGAAVDAMDKNKNTPLHYAAGYGRKECVDLLLKHGAAVTLQNMDGKTPIDVAKLNNQDEVLKLLEKDVFL

SEQ ID NO: 9625 - protein, 339 aa, Triticum aestivum
  misc_feature (1)..(339): Ceres Seq. ID no. 12615624
MASGGDLPSGFADESKSTKTEGSSNERQGVPPAAAAGLSGPFDFSSMQSLLNDPSIKEMADQIARDPAFNQMAEQLQKGAQTAGEQGMPPLDPHQYMETMQKVMENPQFMTMAERLGTALMQDPAMSSMLENLTSPTHKEELEERMSRIKEDPALKPILDELENGGPAAMIKYWNDPETLQKIGQAMGTTMPFSTVSTAEPSGTEETEEEGEDEDESIVHHTASVGDGEGLKKALDGGADKDEEDSEGRRALHFACGYGEFKCAEILLEAGAAVDAMDKNKNTPLHYAAGYGRKECVDLLLKHGAAVTLQNMDGKTPIDVAKLNNQDEVLKLLEKDVFL

SEQ ID NO: 9626 - protein, 293 aa, Triticum aestivum
  misc_feature (1)..(293): Ceres Seq. ID no. 12615625
MQSLLNDPSIKEMADQIARDPAFNQMAEQLQKGAQTAGEQGMPPLDPHQYMETMQKVMENPQFMTMAERLGTALMQDPAMSSMLENLTSPTHKEELEERMSRIKEDPALKPILDELENGGPAAMIKYWNDPETLQKIGQAMGTTMPFSTVSTAEPSGTEETEEEGEDEDESIVHHTASVGDGEGLKKALDGGADKDEEDSEGRRALHFACGYGEFKCAEILLEAGAAVDAMDKNKNTPLHYAAGYGRKECVDLLLKHGAAVTLQNMDGKTPIDVAKLNNQDEVLKLLEKDVFL

SEQ ID NO: 9627 - DNA, 1485 bp, Triticum aestivum
  misc_feature (1)..(1485): Ceres Seq. ID no. 12615948
attcgccccccaaaccaaaaccaaatccctcgccaaaatccccaatccccggccatggcgacgagcccgcctccgccgctccgctcccgccggacgctggagctgccagacgacgtcatggaggagatcttcctccgcctaccggcggacaaccccgccagcctcgcccgcgtcgccggcggctgcaagagctggctggccatggtctcggaccccaacttcgcccccgcctaccgcaggctccgcgacgcgccgcccatgctgggcttcctctacaactaccgctacaccgacgagggagcgccctactggacgtcccacttccgcgccgccgcggccctccccccgcgggtgcgccgcgaccgcaagcactggcgcgctctcgactcccgccacggcctcgtcctcttcgacacccctgagagtgacggccacctcgtcgtctccgacctcgtcaccggcgagcactggaaaatcgacggccacatcacgttcccggatgcgtgtaatgctacagtgctctgcgccagggacggatgtgaccaccgtgattgccatggcggccctttcctcgtggcctgcgtggactccgtcgtggcaggggaccggaggataacctgcgccatgttctactcatcagttactggcaagtggatcgacccgatcttcgtcgagcaacccaatgtcatcgatgccagggggcacagtgctgtgctgggaaataaggtctatgtcccctgtgtgaaggatggcagtgtcgtggagtacaacacgcgtgagaacaagctatctgtgatcaaggcgccatttgaggtccaggaccagaagattgagctcatgggggtggaggacggaatgctgctgtttgcgtctgtggtgaagcctagactctacctatggtcaatggaggctggtcccagaggagctgcgggacgggcacaaagcaggttcatcgagctcgggccgttgctccctcgtcctgtcctcgtggacaacaccgaagtgtcggcggttggttttgcggaaggtgttggtgtcatcttcatcaagacaaaagttgggttgtacacaattcatctcaaatcaaaacaaagcaaccaggtgcaccgagggtacatcaataaggtcatgccctacatgagcttctacactggagcatgggagcctttgccagcatctgatgaaacttaacgcgcagttgttgatgctacaatgatataaccaaatggcgccaggacttgggtttactttttctgcccaggaagaatttgaagtgaacttgagcctcattcactgccggttgtgttgaacagtttggttagagtggatgcgcttttgtcctatttgtgcttgtgccataaacttgagtttgtttgttcgtccgagttgggtgcggctcaaactgtccgtcaggagaaattttagcgatcagttgacggttttgtggcaaaaaaaaaaaaaaaaaaaaaaagaaaaaaaaaaaaa

SEQ ID NO: 9628 - protein, 396 aa, Triticum aestivum
  misc_feature (1)..(396): Ceres Seq. ID no. 12615949
IRPPNQNQIPRQNPQSPAMATSPPPPLRSRRTLELPDDVMEEIFLRLPADNPASLARVAGGCKSWLAMVSDPNFAPAYRRLRDAPPMLGFLYNYRYTDEGAPYWTSHFRAAAALPPRVRRDRKHWRALDSRHGLVLFDTPESDGHLVVSDLVTGEHWKIDGHITFPDACNATVLCARDGCDHRDCHGGPFLVACVDSVVAGDRRITCAMFYSSVTGKWIDPIFVEQPNVIDARGHSAVLGNKVYVPCVKDGSVVEYNTRENKLSVIKAPFEVQDQKIELMGVEDGMLLFASVVKPRLYLWSMEAGPRGAAGRAQSRFIELGPLLPRPVLVDNTEVSAVGFAEGVGVIFIKTKVGLYTIHLKSKQSNQVHRGYINKVMPYMSFYTGAWEPLPASDET

SEQ ID NO: 9629 - protein, 378 aa, Triticum aestivum
  misc_feature (1)..(378): Ceres Seq. ID no. 12615950
MATSPPPPLRSRRTLELPDDVMEEIFLRLPADNPASLARVAGGCKSWLAMVSDPNFAPAYRRLRDAPPMLGFLYNYRYTDEGAPYWTSHFRAAAALPPRVRRDRKHWRALDSRHGLVLFDTPESDGHLVVSDLVTGEHWKIDGHITFPDACNATVLCARDGCDHRDCHGGPFLVACVDSVVAGDRRITCAMFYSSVTGKWIDPIFVEQPNVIDARGHSAVLGNKVYVPCVKDGSVVEYNTRENKLSVIKAPFEVQDQKIELMGVEDGMLLFASVVKPRLYLWSMEAGPRGAAGRAQSRFIELGPLLPRPVLVDNTEVSAVGFAEGVGVIFIKTKVGLYTIHLKSKQSNQVHRGYINKVMPYMSFYTGAWEPLPASDET

SEQ ID NO: 9630 - protein, 357 aa, Triticum aestivum
  misc_feature (1)..(357): Ceres Seq. ID no. 12615951
MEEIFLRLPADNPASLARVAGGCKSWLAMVSDPNFAPAYRRLRDAPPMLGFLYNYRYTDEGAPYWTSHFRAAAALPPRVRRDRKHWRALDSRHGLVLFDTPESDGHLVVSDLVTGEHWKIDGHITFPDACNATVLCARDGCDHRDCHGGPFLVACVDSVVAGDRRITCAMFYSSVTGKWIDPIFVEQPNVIDARGHSAVLGNKVYVPCVKDGSVVEYNTRENKLSVIKAPFEVQDQKIELMGVEDGMLLFASVVKPRLYLWSMEAGPRGAAGRAQSRFIELGPLLPRPVLVDNTEVSAVGFAEGVGVIFIKTKVGLYTIHLKSKQSNQVHRGYINKVMPYMSFYTGAWEPLPASDET

SEQ ID NO: 9631 - DNA, 1203 bp, Triticum aestivum
  misc_feature (1)..(1203): Ceres Seq. ID no. 12616221
gatatccctctcggtagacggtacaatcataccgatcaggagccagctgctgcttcttgtgttgtgttggtcccactgccgagatcggcagcagaagcagccgtcggtcctctgtacctctcgttgatcgcttgatccgaggggatccgaggggatccaaggcgagctgcgtgcgtggtggcggcgatgagttcgctgagcatggtggaggcgaggctgccgccgggcttcaggttccacccacgggacgacgagctcgtgctcgactacctgtccaggaagctcggcggcggtggcgccggaggggcggcggccgcggtggcgagcatctacggctgccccgccatggtcgacgtcgacctcaacaagatcgagccctgggacctccccgaaatcgcatgcattggcggcaaggagtggtacttctacagcttaagggacaagaagtacgctacaggccagcgaacaaatagagcaactgaatcaggctactggaaggccacagggaaagaccgtgcgataagccggaaagggttgctagttggcatgagaaaaaccctggtgttttatgaaggtagagcccctaaagggaagaagactgaatgggtcatgcacgaattccgcaaggaagggcaaggcgatctgatgaagttgccactcaaggaggactgggtcttgtgtagggttttttacaagaccaggacaaccattgccaaaccatccacagggagcaactacaacattgacagtgcagccgcaacctcactgcctcctctcattgacaactacattgcctttgaccatcctggaatgtccacggtgcaaaacctagagggttatgagcaagtgccctgcttctccaatggcccctcctctcacccgtcgtcgtcggcctcgatgaacatcccggtgatggcgatggcgcccatggctgccgatcaggagcagcagcacatggggaaggcgatcaaggacgcgctgagccagctcaccaggtttgagcaaggcaacgtgaaaagggaggcgcctgcccagggtggtgtgtttgctcaagatgggttcgagtacttagctgagagtggcttttcacagatgtggaactcactcagttgattttctagctaggggtattattgctagtgctaccaatcaaagatctacattttctccacccgcaaaaataaagatctacattttcttgcg

SEQ ID NO: 9632 - protein, 308 aa, Triticum aestivum
  misc_feature (1)..(308): Ceres Seq. ID no. 12616222
MSSLSMVEARLPPGFRFHPRDDELVLDYLSRKLGGGGAGGAAAAVASIYGCPAMVDVDLNKIEPWDLPEIACIGGKEWYFYSLRDKKYATGQRTNRATESGYWKATGKDRAISRKGLLVGMRKTLVFYEGRAPKGKKTEWVMHEFRKEGQGDLMKLPLKEDWVLCRVFYKTRTTIAKPSTGSNYNIDSAAATSLPPLIDNYIAFDHPGMSTVQNLEGYEQVPCFSNGPSSHPSSSASMNIPVMAMAPMAADQEQQHMGKAIKDALSQLTRFEQGNVKREAPAQGGVFAQDGFEYLAESGFSQMWNSLS

SEQ ID NO: 9633 - protein, 303 aa, Triticum aestivum
  misc_feature (1)..(303): Ceres Seq. ID no. 12616223
MVEARLPPGFRFHPRDDELVLDYLSRKLGGGGAGGAAAAVASIYGCPAMVDVDLNKIEPWDLPEIACIGGKEWYFYSLRDKKYATGQRTNRATESGYWKATGKDRAISRKGLLVGMRKTLVFYEGRAPKGKKTEWVMHEFRKEGQGDLMKLPLKEDWVLCRVFYKTRTTIAKPSTGSNYNIDSAAATSLPPLIDNYIAFDHPGMSTVQNLEGYEQVPCFSNGPSSHPSSSASMNIPVMAMAPMAADQEQQHMGKAIKDALSQLTRFEQGNVKREAPAQGGVFAQDGFEYLAESGFSQMWNSLS

SEQ ID NO: 9634 - protein, 255 aa, Triticum aestivum
  misc_feature (1)..(255): Ceres Seq. ID no. 12616224
MVDVDLNKIEPWDLPEIACIGGKEWYFYSLRDKKYATGQRTNRATESGYWKATGKDRAISRKGLLVGMRKTLVFYEGRAPKGKKTEWVMHEFRKEGQGDLMKLPLKEDWVLCRVFYKTRTTIAKPSTGSNYNIDSAAATSLPPLIDNYIAFDHPGMSTVQNLEGYEQVPCFSNGPSSHPSSSASMNIPVMAMAPMAADQEQQHMGKAIKDALSQLTRFEQGNVKREAPAQGGVFAQDGFEYLAESGFSQMWNSLS

SEQ ID NO: 9635 - DNA, 1818 bp, Triticum aestivum
  misc_feature (1)..(1818): Ceres Seq. ID no. 12616225
ctcgacactgcgctcctttcccctcgccagacctggccgcgtccccaccgcccccgacccctcccactcctccctggccgcgtcgactgcccggatctccgcgcccagatcgccgggacacctcctcccctggagcagctgccgtcctcaccgcgccggattcctcactctcggaatcaggtggatgctatttgcaggctggtaaagacaactaactttgttgatcctgtgcgcaagaagtaatgatccggcccagctccaaggagtcacttaattatgacaacaatagccagaaagtttatcctcaaccaattgatgaaaatatgaatcagaacatgggcagtatgattggaagaatattcaacaacatatcctctttaaaggctgcatacattcagctgcaggaagctcacaccccatatgacccggacaagatacaaactgctgataagcttgtcatagatgagctcacgagcctttcagaactcaaacatacttacagagagagaaatcctaagccagtagcagcatcacctcaagattcacgcttgctttctgaaatacaggagcagcaaaacttgttaaagacgtacgaggtcatggtaaagaagttccagtcccagatccagaatagagatactgagattacccacttacagcagcaaaccgatgaggccaaacatcggaaaacaaaactggagaagaaattgaagcaaaggggcttacttaacaaggaatcagaggaatctgatgaagaagagagctatttctctgttgagctgacaccaagcttgtttacatctactgctgataacgcataccaatcaatacatgagttctcaaagcccttgatcaacatgatgaaagctgcaggttgggatcttgatgctgctgctaacgcaattgaacctgatgtagtttacacaaggagagctcacaagaagtatgcatttgagtcttatatctgccagagaatcttcagtggtttccatcaagagaacttcttgattgacgctgctaatgccactgtttccaatgaggctttcttccatcaattccttgcagtacgagccatggatcctttggatgtattgagccaaaacccagattcagttttcggaaagttctgcagaagcaaatacctactgcttgtgcacccaaagatggaaggttctttcttcggcaacatggatcagagaaactacgtcatgagtggcgggcatccaaggacacctttctatcaggcatttctcaagttggcgaagtccatatggttgttgcacaggctggcctactctttcgacccaaaggtcagggtcttccaagtgaagaaggcaagcgagttctcagagattcacatggaaagcgttgtgaagaacatcgtcttggatgagaatgccgagaggcctagagtcgacttgatggtgatgcctggtttcttgatcgggactagcgtcatacagtctcgagtgtacctttctggtgtaaagtgtgacgactgataagtgttagggttgcctgagaagattccgggcgtctcacacatcctgcaagatcatcgtacgtcttgtatgtaatgccgcctctccaaaatgttattcgtatgaaatgtggtagcaacacctttttcgtaaaaagcatagtatgctttggtcattcgaagactgtaatgtgtgctttctctgttttgtaatgcatgtaaatcctgtcccaacgtttggtctacatataagttatgaaaaattgtcaatgtggcgtggatgtaccatctatatggtgactgtacagccatttgcaaactggcattcagttcctcgc

SEQ ID NO: 9636 - protein, 419 aa, Triticum aestivum
  misc_feature (1)..(419): Ceres Seq. ID no. 12616226
MIRPSSKESLNYDNNSQKVYPQPIDENMNQNMGSMIGRIFNNISSLKAAYIQLQEAHTPYDPDKIQTADKLVIDELTSLSELKHTYRERNPKPVAASPQDSRLLSEIQEQQNLLKTYEVMVKKFQSQIQNRDTEITHLQQQTDEAKHRKTKLEKKLKQRGLLNKESEESDEEESYFSVELTPSLFTSTADNAYQSIHEFSKPLINMMKAAGWDLDAAANAIEPDVVYTRRAHKKYAFESYICQRIFSGFHQENFLIDAANATVSNEAFFHQFLAVRAMDPLDVLSQNPDSVFGKFCRSKYLLLVHPKMEGSFFGNMDQRNYVMSGGHPRTPFYQAFLKLAKSIWLLHRLAYSFDPKVRVFQVKKASEFSEIHMESVVKNIVLDENAERPRVDLMVMPGFLIGTSVIQSRVYLSGVKCDD

SEQ ID NO: 9637 - protein, 392 aa, Triticum aestivum
  misc_feature (1)..(392): Ceres Seq. ID no. 12616227
MNQNMGSMIGRIFNNISSLKAAYIQLQEAHTPYDPDKIQTADKLVIDELTSLSELKHTYRERNPKPVAASPQDSRLLSEIQEQQNLLKTYEVMVKKFQSQIQNRDTEITHLQQQTDEAKHRKTKLEKKLKQRGLLNKESEESDEEESYFSVELTPSLFTSTADNAYQSIHEFSKPLINMMKAAGWDLDAAANAIEPDVVYTRRAHKKYAFESYICQRIFSGFHQENFLIDAANATVSNEAFFHQFLAVRAMDPLDVLSQNPDSVFGKFCRSKYLLLVHPKMEGSFFGNMDQRNYVMSGGHPRTPFYQAFLKLAKSIWLLHRLAYSFDPKVRVFQVKKASEFSEIHMESVVKNIVLDENAERPRVDLMVMPGFLIGTSVIQSRVYLSGVKCDD

SEQ ID NO: 9638 - protein, 388 aa, Triticum aestivum
  misc_feature (1)..(388): Ceres Seq. ID no. 12616228
MGSMIGRIFNNISSLKAAYIQLQEAHTPYDPDKIQTADKLVIDELTSLSELKHTYRERNPKPVAASPQDSRLLSEIQEQQNLLKTYEVMVKKFQSQIQNRDTEITHLQQQTDEAKHRKTKLEKKLKQRGLLNKESEESDEEESYFSVELTPSLFTSTADNAYQSIHEFSKPLINMMKAAGWDLDAAANAIEPDVVYTRRAHKKYAFESYICQRIFSGFHQENFLIDAANATVSNEAFFHQFLAVRAMDPLDVLSQNPDSVFGKFCRSKYLLLVHPKMEGSFFGNMDQRNYVMSGGHPRTPFYQAFLKLAKSIWLLHRLAYSFDPKVRVFQVKKASEFSEIHMESVVKNIVLDENAERPRVDLMVMPGFLIGTSVIQSRVYLSGVKCDD

SEQ ID NO: 9639 - DNA, 999 bp, Triticum aestivum
  misc_feature (1)..(999): Ceres Seq. ID no. 12616336
aatgccgcgccggtcactgtccccccagccccatcccgattttaacctcctcccctcgcactgaccaaaaccatgatttgcctcagagccatcccctcccctcgactcctccacctacccctaccccgcctcgcctcctccccgctccgccgcctcaggccctccgccgcagccatgtcctcctccccctccgtcgccgcgcccaccgtagcggcaccggtcgagcacatcgtgctcatcaaggtccgcccggaggccgtggcctcgggggccgccgcggcgatggtctccgcgctgcaggcgctctccacgctcgtcccgggggtctcctacatccacgcgggccccgtgctccgcctccgctccccggccgccgaggcgctgggccccacccacctcctccactcccgctacgccaccaaggccgacctcgccgcctacgccccgcacccggcccacgtggccgccgtgcaggcgcacgtcgcccccaacgctctcgacgccaccgccgttgactgggtcaacgccgcgggcgccccgtcccccgtcgcccccggcgccgccgtgcgcctcaccctcgccaaggtcaagcagggcgtggaggtcgggcagctcgtcgagaaggtggccgcggccaccaaggacgccggcgaggccagcggcgccaaggtcagcttcggggagaacttctcccccgcgcgggccaaggggtaccagttcgggatggtggccgtgttcgggagcgtcgaggagctggacgccgtggagggcgacggcaaggtggaggaggccaaggccgccctcaggcccatgctcgacgaggtcatggtgctggacttcgtcgtcgacgctccggcggccgcgagcctctgatggggggtttcaggttgatttcggatccgagtgtgctgccgatttgggaataatggagtcctttgtgatatctgtatcgatcttgagatgaataaccaatcaattgatgtgccagaaaaaaaaaaa

SEQ ID NO: 9640 - protein, 266 aa, Triticum aestivum
  misc_feature (1)..(266): Ceres Seq. ID no. 12616337
MICLRAIPSPRLLHLPLPRLASSPLRRLRPSAAAMSSSPSVAAPTVAAPVEHIVLIKVRPEAVASGAAAAMVSALQALSTLVPGVSYIHAGPVLRLRSPAAEALGPTHLLHSRYATKADLAAYAPHPAHVAAVQAHVAPNALDATAVDWVNAAGAPSPVAPGAAVRLTLAKVKQGVEVGQLVEKVAAATKDAGEASGAKVSFGENFSPARAKGYQFGMVAVFGSVEELDAVEGDGKVEEAKAALRPMLDEVMVLDFVVDAPAAASL

SEQ ID NO: 9641 - protein, 232 aa, Triticum aestivum
  misc_feature (1)..(232): Ceres Seq. ID no. 12616338
MSSSPSVAAPTVAAPVEHIVLIKVRPEAVASGAAAAMVSALQALSTLVPGVSYIHAGPVLRLRSPAAEALGPTHLLHSRYATKADLAAYAPHPAHVAAVQAHVAPNALDATAVDWVNAAGAPSPVAPGAAVRLTLAKVKQGVEVGQLVEKVAAATKDAGEASGAKVSFGENFSPARAKGYQFGMVAVFGSVEELDAVEGDGKVEEAKAALRPMLDEVMVLDFVVDAPAAASL

SEQ ID NO: 9642 - protein, 196 aa, Triticum aestivum
  misc_feature (1)..(196): Ceres Seq. ID no. 12616339
MVSALQALSTLVPGVSYIHAGPVLRLRSPAAEALGPTHLLHSRYATKADLAAYAPHPAHVAAVQAHVAPNALDATAVDWVNAAGAPSPVAPGAAVRLTLAKVKQGVEVGQLVEKVAAATKDAGEASGAKVSFGENFSPARAKGYQFGMVAVFGSVEELDAVEGDGKVEEAKAALRPMLDEVMVLDFVVDAPAAASL

SEQ ID NO: 9643 - DNA, 1357 bp, Triticum aestivum
  misc_feature (1)..(1357): Ceres Seq. ID no. 12616439
ccgttttagctgtagcaggagggagaaaattccggctccaccgtgtcccattcgcattcccccctcgccagcttccagaaaccccccgttcgttcgttcgtccgttccttccttcgattcgcaggcggttcgcgagcgatggcggacgccagcccgcaggcggagaggccgaggctgaggcgcctggagttcgtgcacgtggtggcggtgcaggcggccgtgtgcatcgcggcgctctacgcgctcgccagggaccactccggctcgctccgccccagagtcgacgccgtcgagtccgccgtcaggcgcgtcgccggccccgtcgcccgccgcttccacggcgtccccctccacgtcctcgccttcgtcgaccgcaaggtggacgacgcggtgcaggagctgggccggcacctcccgccggcggtgaagtccgcgtcggcgaaggcgtgccacgcggtccacgccgtgccggagctggccagggagattgccgacggggcgaggcggtccggcgtgaagggcgtggccaaggacgtgtacggcatggtccagccggtggccaagggcctctacgtgcgctgcgagccggtggccaaggacctctacgtgcgctacgagccggcggccgagcacctcgccgtctccgcctggcgctcgctcaacgggctgccggtgttcccgcaggtggcgcacatcgtcgtgcccaccgccgcctactggtgcgagaagtacaacagggtgatctcgttcgcggccgggcgtgggttccccggcgcacggttcctccccggcatccccatcgagcgcatcgccaaggcgttcgggccgagctcggcaggcgagcgctcgccggttgccaagccgacggaacctgatgcccagacttccaaggagcgctcggcggatgccaagccgacgggacttgatgcccagacttccgaggagcgctcaccggatgccaagcctatgggacttgatgcgcagaccgcggaggagagctcgtctgatgccaagcctgtgggacctgatgcgcagaccggggaggagagctcgccggatgccaagcctgtggaatctgacgcccatgccgccggggagagccagccggaggcggccaagactatggatcttggggcacaggcctaggtgtgcctctaatgataatgatgttgtactagctactatgcttttgtgtggtgcgcgtctctaatgttctccgtgcttttgtacaaaagttgcttgatgtcgccttcgtcgacttgatccaatgcaattgggttcgtccttctatggattcgcgagttcgtctctgtggactgtggccactagttaagcactgttttggttttggtgcgtc

SEQ ID NO: 9644 - protein, 335 aa, Triticum aestivum
  misc_feature (1)..(335): Ceres Seq. ID no. 12616440
MADASPQAERPRLRRLEFVHVVAVQAAVCIAALYALARDHSGSLRPRVDAVESAVRRVAGPVARRFHGVPLHVLAFVDRKVDDAVQELGRHLPPAVKSASAKACHAVHAVPELAREIADGARRSGVKGVAKDVYGMVQPVAKGLYVRCEPVAKDLYVRYEPAAEHLAVSAWRSLNGLPVFPQVAHIVVPTAAYWCEKYNRVISFAAGRGFPGARFLPGIPIERIAKAFGPSSAGERSPVAKPTEPDAQTSKERSADAKPTGLDAQTSEERSPDAKPMGLDAQTAEESSSDAKPVGPDAQTGEESSPDAKPVESDAHAAGESQPEAAKTMDLGAQA

SEQ ID NO: 9645 - protein, 290 aa, Triticum aestivum
  misc_feature (1)..(290): Ceres Seq. ID no. 12616441
VLAVAGGRKFRLHRVPFAFPPRQLPETPRSFVRPFLPSIRRRFASDGGRQPAGGEAEAEAPGVRARGGGAGGRVHRGALRARQGPLRLAPPQSRRRRVRRQARRRPRRPPLPRRPPPRPRLRRPQGGRRGAGAGPAPPAGGEVRVGEGVPRGPRRAGAGQGDCRRGEAVRREGRGQGRVRHGPAGGQGPLRALRAGGQGPLRALRAGGRAPRRLRLALAQRAAGVPAGGAHRRAHRRLLVREVQQGDLVRGRAWVPRRTVPPRHPHRAHRQGVRAELGRRALAGCQADGT

SEQ ID NO: 9646 - protein, 200 aa, Triticum aestivum
  misc_feature (1)..(200): Ceres Seq. ID no. 12616442
MVQPVAKGLYVRCEPVAKDLYVRYEPAAEHLAVSAWRSLNGLPVFPQVAHIVVPTAAYWCEKYNRVISFAAGRGFPGARFLPGIPIERIAKAFGPSSAGERSPVAKPTEPDAQTSKERSADAKPTGLDAQTSEERSPDAKPMGLDAQTAEESSSDAKPVGPDAQTGEESSPDAKPVESDAHAAGESQPEAAKTMDLGAQA

SEQ ID NO: 9647 - DNA, 1542 bp, Triticum aestivum
  misc_feature (1)..(1542): Ceres Seq. ID no. 12616581
actctcagccgtttttctccgcctctcccaagctccccgctccccgcatccaaacgccaagacgcacaggggaaagcagccgctcgccgcggcgagtcggaccgtcgcgatggtggatgtggagcaccggatggcgggcatggctccggcggcgcacgcggccggcctgcgccgtctctccacgcgggccgcggccggcccttcctcggcgtcggcctccccgcgccacgggctctactccttccagggcctggcgtcgtccgtgctctcgcacctccgggcgtccggggtggccatcctcccgggcctctccgacacggagctcgcccgcgccgaggccgagatggggttcaccttcccgcccgacctccgagccgtgctggccctcgggctgccgtcaggccccgggttcccggactggcgctcccgcgcggggctccgcgccgcgttcgacctgcccgtcgccgccgcgtcgctccagatcgcgaggggcgcgctgtggccccggtgctggggcaagaggccggccgaccccgaccgcgcgaggcggctcgctcgctccgccatacggcgcgcgccgctgctggtgccgctcttcgatcggtgctacctgccctgcaccccctccctcgccgggaaccccgtgttcttcgtcaccgacgaccgcgtcctctgctgcggcctcgacgtcgtccacttctttacccgggagtcgtccttccagccgatggacatctcctccccgttcgcggcgatgccctcttccggcacgagcacgccgtgcacccgccgcagcctcgacgcggcctgcggcggccaggccccacgctggatcgagttctggagcgacgcggcctccgacaggcgccgccgcgactcgtcgtcctccgaagcctccaccgcatccacatcctcgtcaggctgctgctcgccacctcggaggtcgacgccgcgctgggtcgacaactacctggacaagctcggatcggtgctcaagaaaggtggctggagggacagggaggtggacgagatggtggaggtggccgcgtccgggatgttcgacggcgaggaggctccgccagccgccgacgcggaggccgtgctcgacacactcctcctgaagacggaccggtgctcagactcgctcaggcgcgccggatggagctccgaggacgtatcggacgcgctggggctcgacctccggcggtgcaaggagccgcaccgatcggtcgtgcgagtgcccccagagatcgccgccaaggtgcagcggctcgcgcggacggtggcgaggtcgtgaccagctgatcccgccggcgtcggcagttaatctttcttcttcctttttcccctcgaaggagggatcgattcgattaaacaacaacacttgtatgctactactactaagtgagaaaagtaaaccaggccatgttacttcgtgtgcatggatacgcaagtaaattaagccgtgttcacgtgcgtcatgtaccatcaattgccaagaaacaacgtcccggaaattaacgctgttcttcccagggatcc

SEQ ID NO: 9648 - protein, 434 aa, Triticum aestivum
  misc_feature (1)..(434): Ceres Seq. ID no. 12616582
TLSRFSPPLPSSPLPASKRQDAQGKAAARRGESDRRDGGCGAPDGGHGSGGARGRPAPSLHAGRGRPFLGVGLPAPRALLLPGPGVVRALAPPGVRGGHPPGPLRHGARPRRGRDGVHLPARPPSRAGPRAAVRPRVPGLALPRGAPRRVRPARRRRVAPDREGRAVAPVLGQEAGRPRPREAARSLRHTARAAAGAALRSVLPALHPLPRREPRVLRHRRPRPLLRPRRRPLLYPGVVLPADGHLLPVRGDALFRHEHAVHPPQPRRGLRRPGPTLDRVLERRGLRQAPPRLVVLRSLHRIHILVRLLLATSEVDAALGRQLPGQARIGAQERWLEGQGGGRDGGGGRVRDVRRRGGSASRRRGGRARHTPPEDGPVLRLAQARRMELRGRIGRAGARPPAVQGAAPIGRASAPRDRRQGAAARADGGEVVTS

SEQ ID NO: 9649 - protein, 431 aa, Triticum aestivum
  misc_feature (1)..(431): Ceres Seq. ID no. 12616583
LSAVFLRLSQAPRSPHPNAKTHRGKQPLAAASRTVAMVDVEHRMAGMAPAAHAAGLRRLSTRAAAGPSSASASPRHGLYSFQGLASSVLSHLRASGVAILPGLSDTELARAEAEMGFTFPPDLRAVLALGLPSGPGFPDWRSRAGLRAAFDLPVAAASLQIARGALWPRCWGKRPADPDRARRLARSAIRRAPLLVPLFDRCYLPCTPSLAGNPVFFVTDDRVLCCGLDVVHFFTRESSFQPMDISSPFAAMPSSGTSTPCTRRSLDAACGGQAPRWIEFWSDAASDRRRRDSSSSEASTASTSSSGCCSPPRRSTPRWVDNYLDKLGSVLKKGGWRDREVDEMVEVAASGMFDGEEAPPAADAEAVLDTLLLKTDRCSDSLRRAGWSSEDVSDALGLDLRRCKEPHRSVVRVPPEIAAKVQRLARTVARS

SEQ ID NO: 9650 - protein, 395 aa, Triticum aestivum
  misc_feature (1)..(395): Ceres Seq. ID no. 12616584
MVDVEHRMAGMAPAAHAAGLRRLSTRAAAGPSSASASPRHGLYSFQGLASSVLSHLRASGVAILPGLSDTELARAEAEMGFTFPPDLRAVLALGLPSGPGFPDWRSRAGLRAAFDLPVAAASLQIARGALWPRCWGKRPADPDRARRLARSAIRRAPLLVPLFDRCYLPCTPSLAGNPVFFVTDDRVLCCGLDVVHFFTRESSFQPMDISSPFAAMPSSGTSTPCTRRSLDAACGGQAPRWIEFWSDAASDRRRRDSSSSEASTASTSSSGCCSPPRRSTPRWVDNYLDKLGSVLKKGGWRDREVDEMVEVAASGMFDGEEAPPAADAEAVLDTLLLKTDRCSDSLRRAGWSSEDVSDALGLDLRRCKEPHRSVVRVPPEIAAKVQRLARTVARS

SEQ ID NO: 9651 - DNA, 922 bp, Triticum aestivum
  misc_feature (1)..(922): Ceres Seq. ID no. 12616626
tcccccgatccaaatccgaaatttttcccctccccgcagcccgctccctcctccgcgcccgcactgtagcccgagcgctcggctccaccgccgtgggctgtagccgccgtcgctgccatggcgaacgacgggtcccccaagtccggtgacatcccgccctaccccgagatgattctcgcggcgatcgaggcgctgggcgacaagaacggctcgagcaagtccgccatctccagctacatcgaggagaagtacgagggcctcccctcggcgcacgcctccctcctcacggccaacctcgccagcatgaaggaggccggcaagctcgccttcgtcaagaacaactacctcaaggctgacgctccctccgccaccccggcaaagcgcggccgcggccgcccgcctaaggaccctaacgcgccgcccaagccgaaggctgcgcccaaggaccccaacacgcccaagcgcggccggggccgcccgcccaaggctaaggatcccatggccgacgccgtcaaggatgccgtcgccaaggcgaccaccggcatgccccggggccgcggccgcccgccgggtccctcctcggccaagaaggccaaggtcgccaaggaggctgcctctccggctcccgcggacggctccgctcctgccaagcgtggccgtgggcgcccacgcaaggtggcggtgtgaggcctgcgtgctgatgcctttcggtctgtgtatctcgctgtggttgcgacggtggtaagctcctaggtgtgaccgtgcttcttcgatttgtgctccgtactaattgttccgtcggcttagttgctcagtatgtgttgtaacctaatcgagatgagtgtgcacaatggatggatggatgtttttagcttcggttgtagttgactgtgctgctgtgagtgaacatgttcattttttt

SEQ ID NO: 9652 - protein, 189 aa, Triticum aestivum
  misc_feature (1)..(189): Ceres Seq. ID no. 12616627
MANDGSPKSGDIPPYPEMILAAIEALGDKNGSSKSAISSYIEEKYEGLPSAHASLLTANLASMKEAGKLAFVKNNYLKADAPSATPAKRGRGRPPKDPNAPPKPKAAPKDPNTPKRGRGRPPKAKDPMADAVKDAVAKATTGMPRGRGRPPGPSSAKKAKVAKEAASPAPADGSAPAKRGRGRPRKVAV

SEQ ID NO: 9653 - protein, 172 aa, Triticum aestivum
  misc_feature (1)..(172): Ceres Seq. ID no. 12616628
MILAAIEALGDKNGSSKSAISSYIEEKYEGLPSAHASLLTANLASMKEAGKLAFVKNNYLKADAPSATPAKRGRGRPPKDPNAPPKPKAAPKDPNTPKRGRGRPPKAKDPMADAVKDAVAKATTGMPRGRGRPPGPSSAKKAKVAKEAASPAPADGSAPAKRGRGRPRKVAV

SEQ ID NO: 9654 - protein, 127 aa, Triticum aestivum
  misc_feature (1)..(127): Ceres Seq. ID no. 12616629
MKEAGKLAFVKNNYLKADAPSATPAKRGRGRPPKDPNAPPKPKAAPKDPNTPKRGRGRPPKAKDPMADAVKDAVAKATTGMPRGRGRPPGPSSAKKAKVAKEAASPAPADGSAPAKRGRGRPRKVAV

SEQ ID NO: 9655 - DNA, 1256 bp, Triticum aestivum
  misc_feature (1)..(1256): Ceres Seq. ID no. 12616669
cacaatcgctcgtcccaagcgttcgcacccgccgccgccgccgccgccgcctcaataatctccggggacctaaacctcgacagtaccctaccctccaagctccctccgcctcccgtttttcgttcctccgccgcgccgccaccgcaaggctctcccgcctcgcgccgtgcccgggacgatacgatggtggggctctcggagggggagaagcacttcatccgcggcggcatcgcgcaggacctccgggccgacggccgcaggcggctgcagttccgggccctcaccgtcgagacaggaatcatccctcaggccaacggctcggcgcgtgttaggatgggtgcgaccgaagtcatcgccagcgtcaaggctgagttggggaaaccaaccattcttcatcccgacaaaggaaaagtttccatttatgttgattgtagtccaactgctgcgcctatgtttgagggtagaggttcggaagaattgtctgctgagctctctgttgggctgcaaagatgtttactgggtggtaaaagtggtgcaggggctgcaatcgatttatcgtctctgattgttgttgagggaaaagcctgctgggatctgtacattgatggacttgtggtcagttctgatggtaatttgcttgatgcactggcggctgcgataaaggtagctttgagtgatacaggtataccaaaagttaatgtttctcttaataatgaaacggatggggagcctgaggttgatatcagtgatgaagaatttttgcaattcgacacttctggtgtgcctgtcataattacattgaccaaggttggtaagcactacattgttgatgccacctcggaggaggaatcgcagatgagttctgcggtttccgtttcagtcaacagccatggccagatatgtgggttaaccaagaggggaggcgcagggttggatccaagcgtcatttttgatatgatatccgtggccaagaatgtaagccaacggttctatactctactggaatcagcattcgcagctgctgaagcagtagcggatgagtagagaaaaagcatagaagataccgtgatcacgctgaccgcccgtagttgaccttgctaatgcctcagaagaatgtactatcttggtgccgcaattgccaatgttttgcacaagcttttggttttggtgttatgttgtgtcgagtgccatacgttggtgaaatgttttgatgtataattattttgttgtagctgttcggaggttggattagattt

SEQ ID NO: 9656 - protein, 347 aa, Triticum aestivum
  misc_feature (1)..(347): Ceres Seq. ID no. 12616670
HNRSSQAFAPAAAAAAASIISGDLNLDSTLPSKLPPPPVFRSSAAPPPQGSPASRRARDDTMVGLSEGEKHFIRGGIAQDLRADGRRRLQFRALTVETGIIPQANGSARVRMGATEVIASVKAELGKPTILHPDKGKVSIYVDCSPTAAPMFEGRGSEELSAELSVGLQRCLLGGKSGAGAAIDLSSLIVVEGKACWDLYIDGLVVSSDGNLLDALAAAIKVALSDTGIPKVNVSLNNETDGEPEVDISDEEFLQFDTSGVPVIITLTKVGKHYIVDATSEEESQMSSAVSVSVNSHGQICGLTKRGGAGLDPSVIFDMISVAKNVSQRFYTLLESAFAAAEAVADE

SEQ ID NO: 9657 - protein, 286 aa, Triticum aestivum
  misc_feature (1)..(286): Ceres Seq. ID no. 12616671
MVGLSEGEKHFIRGGIAQDLRADGRRRLQFRALTVETGIIPQANGSARVRMGATEVIASVKAELGKPTILHPDKGKVSIYVDCSPTAAPMFEGRGSEELSAELSVGLQRCLLGGKSGAGAAIDLSSLIVVEGKACWDLYIDGLVVSSDGNLLDALAAAIKVALSDTGIPKVNVSLNNETDGEPEVDISDEEFLQFDTSGVPVIITLTKVGKHYIVDATSEEESQMSSAVSVSVNSHGQICGLTKRGGAGLDPSVIFDMISVAKNVSQRFYTLLESAFAAAEAVADE

SEQ ID NO: 9658 - protein, 236 aa, Triticum aestivum
  misc_feature (1)..(236): Ceres Seq. ID no. 12616672
MGATEVIASVKAELGKPTILHPDKGKVSIYVDCSPTAAPMFEGRGSEELSAELSVGLQRCLLGGKSGAGAAIDLSSLIVVEGKACWDLYIDGLVVSSDGNLLDALAAAIKVALSDTGIPKVNVSLNNETDGEPEVDISDEEFLQFDTSGVPVIITLTKVGKHYIVDATSEEESQMSSAVSVSVNSHGQICGLTKRGGAGLDPSVIFDMISVAKNVSQRFYTLLESAFAAAEAVADE

SEQ ID NO: 9659 - DNA, 1099 bp, Triticum aestivum
  misc_feature (1)..(1099): Ceres Seq. ID no. 12616706
aaaagcactgcattattcatcgctccgacagtcgacacagagcgagtcctcacccagagcaagcaagcaagaagatcgggaggagggtcggagtttgatcgccatttgattcgatggcgccggagtttgggtggtggccgatgtcgccgtggctgagcccaggcacggcgtcgttcatcttcttcaacgtcctcgtcggcgccatcgcggtcatgtcgtcgtcccgggggccggaaccggccgcccggcgcaagctcgttcgcacggcctcgaccgtcgtgctggagagcctgcgctcgatctccaacttccccttccactcactgggcgactacagcgtcgcgtgctctgcaccggcgtcgtcgcagctccaccacatgcaagcgcagtactatagtgctacgatccaagagcaagaagcgcgggaggtgagcgcggtggagcccgagccggcatcagtcgcccgagaagaagctgtagtggcggccgcaacgaccacctcgccgcagagcgcgcctgccgtggcagaggaggtgaacaggatggagcccgagccagcgtcagacgcccaagaagaaactgtagcggcggccacaacaactacctcgccgcagagcgcggcaccggcagcactcgacgcgtcagcgacggcgactcagggcgaggtcgaagacggggagtccatcagcttggacgaggcgtacgcactggcgcgcgcagggcggcagtccgccgccgacacggtggccacggtgccgaagaaggccaagggacgaggagcctacggatgcgggcggggaacggaggacgtccaagggaaggcggaggtggacgcgcgggcggagcagttcatccggcagttccgggaggagctcaagctggagcgcatcaactccatcctcaaccacacccacgcgctgcgccgcaccgccggggcacgctagccgaccggcgccgctcggccgatcctctcgtttgatcgtgtagagagagcagaatatttcatttgcttgtacagccattcatgggtcatttccgcagagaatgatgcgacagcacacagttttggattatttactgtaaccatatagtggcaggc

SEQ ID NO: 9660 - protein, 276 aa, Triticum aestivum
  misc_feature (1)..(276): Ceres Seq. ID no. 12616707
MAPEFGWWPMSPWLSPGTASFIFFNVLVGAIAVMSSSRGPEPAARRKLVRTASTVVLESLRSISNFPFHSLGDYSVACSAPASSQLHHMQAQYYSATIQEQEAREVSAVEPEPASVAREEAVVAAATTTSPQSAPAVAEEVNRMEPEPASDAQEETVAAATTTTSPQSAAPAALDASATATQGEVEDGESISLDEAYALARAGRQSAADTVATVPKKAKGRGAYGCGRGTEDVQGKAEVDARAEQFIRQFREELKLERINSILNHTHALRRTAGAR

SEQ ID NO: 9661 - protein, 267 aa, Triticum aestivum
  misc_feature (1)..(267): Ceres Seq. ID no. 12616708
MSPWLSPGTASFIFFNVLVGAIAVMSSSRGPEPAARRKLVRTASTVVLESLRSISNFPFHSLGDYSVACSAPASSQLHHMQAQYYSATIQEQEAREVSAVEPEPASVAREEAVVAAATTTSPQSAPAVAEEVNRMEPEPASDAQEETVAAATTTTSPQSAAPAALDASATATQGEVEDGESISLDEAYALARAGRQSAADTVATVPKKAKGRGAYGCGRGTEDVQGKAEVDARAEQFIRQFREELKLERINSILNHTHALRRTAGAR

SEQ ID NO: 9662 - protein, 243 aa, Triticum aestivum
  misc_feature (1)..(243): Ceres Seq. ID no. 12616709
MSSSRGPEPAARRKLVRTASTVVLESLRSISNFPFHSLGDYSVACSAPASSQLHHMQAQYYSATIQEQEAREVSAVEPEPASVAREEAVVAAATTTSPQSAPAVAEEVNRMEPEPASDAQEETVAAATTTTSPQSAAPAALDASATATQGEVEDGESISLDEAYALARAGRQSAADTVATVPKKAKGRGAYGCGRGTEDVQGKAEVDARAEQFIRQFREELKLERINSILNHTHALRRTAGAR

SEQ ID NO: 9663 - DNA, 1196 bp, Triticum aestivum
  misc_feature (1)..(1196): Ceres Seq. ID no. 12616895
atcacacaattcccagatcacaccgtgcgccacgcccccttccccaaaaacctttcgaaaaccgccgcgccaaccgccacccagccccgtccaagaaaccgcacgccaccgcggacgcgaccccccgccggcgccaagatggtgcggctaagcaacacggtgatcgggatcctgaacgcggtgaccttcctgctctcggtgcccatcctggcgggcggcatctggctgcgggcgcgcgccgacggcaccgagtgcgagcgctacctggcggcgccggtgatcgcggtgggggtgttcctcatgctcgtctccatcgcggggctcgtcggcgcctgctgccgcgtcacctgcctcctctggttctacctcgtcgccatgttcctgctcatcgtcgtcctcctcggcctcaccgtcttcgccttcgtcgtcacgcacaagggcaccggggaggccgtctccggccgcggattcaaggagtacaggctcggggactactccaactggctgcagaagcgggtggagaacgacaagaactggaacaggatcaagggctgcctccaggacgccaaggtctgcaagtcgctcgaggacaagacggtcgaccagttcatgtcctccgatctctcccccatccagtccggctgctgcaagcctccgatcagctgcggcttcacctacgtcaacagcacgcaatggaccggccccgccaagtcgacggagcccgactgcggcgcgtggtccaacgacggggcgctctgctacggctgccagtcgtgcaaggccggcgtggtggccaccctcaagcgcaattggaagcgctccgccatcatcaacatcgtcttcctcgtcttcatcatcattgtctactccgtcggctgctgcgccttcaggaacaaccgccgcgaccaccgcaacggcggcgggtacaagcagcagggcgcgtacgcctgatcgtttggctcggttatttattgcttggattggatggatgcgatcgtcgtgtcattttcattcatcgtcgtgcttctcttaggatggcctgatctagctttgtacaggcgagattattctgtgctctgatcatctactagttaggttctatactccgtggtcatgaggagggttgtgtatatatcttttctgttctttgatatgtatggcagaccattatatatgtaacagattattctggagtc

SEQ ID NO: 9664 - protein, 346 aa, Triticum aestivum
  misc_feature (1)..(346): Ceres Seq. ID no. 12616896
HTIPRSHRAPRPLPQKPFENRRANRHPAPSKKPHATADATPRRRQDGAAKQHGDRDPERGDLPALGAHPGGRHLAAGARRRHRVRALPGGAGDRGGGVPHARLHRGARRRLLPRHLPPLVLPRRHVPAHRRPPRPHRLRLRRHAQGHRGGRLRPRIQGVQARGLLQLAAEAGGERQELEQDQGLPPGRQGLQVARGQDGRPVHVLRSLPHPVRLLQASDQLRLHLRQQHAMDRPRQVDGARLRRVVQRRGALLRLPVVQGRRGGHPQAQLEALRHHQHRLPRLHHHCLLRRLLRLQEQPPRPPQRRRVQAAGRVRLIVWLGYLLLGLDGCDRRVIFIHRRASLRMA

SEQ ID NO: 9665 - protein, 316 aa, Triticum aestivum
  misc_feature (1)..(316): Ceres Seq. ID no. 12616897
ITQFPDHTVRHAPFPKNLSKTAAPTATQPRPRNRTPPRTRPPAGAKMVRLSNTVIGILNAVTFLLSVPILAGGIWLRARADGTECERYLAAPVIAVGVFLMLVSIAGLVGACCRVTCLLWFYLVAMFLLIVVLLGLTVFAFVVTHKGTGEAVSGRGFKEYRLGDYSNWLQKRVENDKNWNRIKGCLQDAKVCKSLEDKTVDQFMSSDLSPIQSGCCKPPISCGFTYVNSTQWTGPAKSTEPDCGAWSNDGALCYGCQSCKAGVVATLKRNWKRSAIINIVFLVFIIIVYSVGCCAFRNNRRDHRNGGGYKQQGAYA

SEQ ID NO: 9666 - protein, 270 aa, Triticum aestivum
  misc_feature (1)..(270): Ceres Seq. ID no. 12616898
MVRLSNTVIGILNAVTFLLSVPILAGGIWLRARADGTECERYLAAPVIAVGVFLMLVSIAGLVGACCRVTCLLWFYLVAMFLLIVVLLGLTVFAFVVTHKGTGEAVSGRGFKEYRLGDYSNWLQKRVENDKNWNRIKGCLQDAKVCKSLEDKTVDQFMSSDLSPIQSGCCKPPISCGFTYVNSTQWTGPAKSTEPDCGAWSNDGALCYGCQSCKAGVVATLKRNWKRSAIINIVFLVFIIIVYSVGCCAFRNNRRDHRNGGGYKQQGAYA

SEQ ID NO: 9667 - DNA, 520 bp, Triticum aestivum
  misc_feature (1)..(520): Ceres Seq. ID no. 12617123
agaggatcctagtccttgatgggattcaggatccgggtaaccttggaacgttgataaggtcagcttgtgcgttcaaatgggatggggtatttcttcttccggcttgctgtgatcctttcaatgaaaaggctcttcgtgcagctcgtggagcctctttgcagcttccaattgtctctggcaactggtgtgatctgcatgatttggtaactagatatggcatgaagatgttagcaggccatccagaaagtagcagtgatggatctgaaagaacccacacgctgtccaatgagcttgcagattcactgatgagtgagtcactatgcttagtgttaggaagtgagggcaatggcctctctgaagagaccgtccaagcttgtgatcttgtaagcattcctatggaaggtatttttgaatctctgaatgtttctgttgctgggggtatctttttatttatgttacaacccaaacagcaaacatatagcagaattttaactccttaagttacctgcttgtccagttc

SEQ ID NO: 9668 - protein, 165 aa, Triticum aestivum
  misc_feature (1)..(165): Ceres Seq. ID no. 12617124
RILVLDGIQDPGNLGTLIRSACAFKWDGVFLLPACCDPFNEKALRAARGASLQLPIVSGNWCDLHDLVTRYGMKMLAGHPESSSDGSERTHTLSNELADSLMSESLCLVLGSEGNGLSEETVQACDLVSIPMEGIFESLNVSVAGGIFLFMLQPKQQTYSRILTP

SEQ ID NO: 9669 - protein, 93 aa, Triticum aestivum
  misc_feature (1)..(93): Ceres Seq. ID no. 12617125
MKMLAGHPESSSDGSERTHTLSNELADSLMSESLCLVLGSEGNGLSEETVQACDLVSIPMEGIFESLNVSVAGGIFLFMLQPKQQTYSRILTP

SEQ ID NO: 9670 - protein, 91 aa, Triticum aestivum
  misc_feature (1)..(91): Ceres Seq. ID no. 12617126
MLAGHPESSSDGSERTHTLSNELADSLMSESLCLVLGSEGNGLSEETVQACDLVSIPMEGIFESLNVSVAGGIFLFMLQPKQQTYSRILTP

SEQ ID NO: 9671 - DNA, 1325 bp, Triticum aestivum
  misc_feature (1)..(1325): Ceres Seq. ID no. 12617152
atgaccttcttccggtacctaccggaactcctctcctggccctccccttcttccagctcttcttgataaggccacactccgtagaagaacagcaccttgcgatgaaaatggcgagagccctgctcgtcgctcctcttctcgcctcgtgctttgtggcgctcggcctgtccggccgcgccgatgcggcggccgagacgaagaccgtcggtgtctacgagctcaagaagggggatttctccatcaaggtcaccaactggggtgccaccctcatgtccgtgatcctccccgactcgagaggaaacttgggggatgtgatcctgggctacgatacggttgctgagtatgtgaatggcaccgcctactttggagggttgatcggccgcgtcgccaacaggatcgccaacgcccggttcacgctggacgggaaggcctaccggctggttcccaacgatggcaacaacacgctacacggtggtcaccggggattcgataaggtcgtatggacggtgaaggagcacgtcgccggcggcagctccccattcatcactctgtactatcatagcttcgacggagagcaagggtttccaggcgatgtggacgtgcacgtgaagtaccagctctccggcccgcacgagctgagcgtgcgcatgaacgcgacggcgcggggcaaggccaccccggtgaacctcgcgcaccacgcctactggaacctcggcggccacggcagcggcagcgtcctcggcgaggaggtccgcctcttcgcctcccggtacacgcccgtggatgccgcgctcatcccgacgggccacctggcgcccgtggccggcacgccctacgacttccgcacgccggccgccgtgggctcgcgcatcggtggtctcctgagccggggcgttaatgggtacgacatcaactacgtcgtggacggcgggggcctgcgcccggtggcagttgtccgggatggcgcgtccggtagggcgatggagctgtgggcggatcagcccggggtgcagttctacaccgccaacgggctgagtggcgtgagggggaagggcggcaaggtctatggccgatacggcgcgctctgcttggagacgcaggggttccccgacgccgtgaaccgcccgagtttcccgtcgcagatcgtccggccggggaaggtgtacatgcatcacatggtgttcaagttctccttctagtatagctagtggtagtgtggtacccgagcttggtcgtttgtcaggcaacacagccgctcttgtgttttgtgtgctgtctgaatttgatcggttgagcttcaatggaggaataaaagcttgcatgct

SEQ ID NO: 9672 - protein, 398 aa, Triticum aestivum
  misc_feature (1)..(398): Ceres Seq. ID no. 12617153
DLLPVPTGTPLLALPFFQLFLIRPHSVEEQHLAMKMARALLVAPLLASCFVALGLSGRADAAAETKTVGVYELKKGDFSIKVTNWGATLMSVILPDSRGNLGDVILGYDTVAEYVNGTAYFGGLIGRVANRIANARFTLDGKAYRLVPNDGNNTLHGGHRGFDKVVWTVKEHVAGGSSPFITLYYHSFDGEQGFPGDVDVHVKYQLSGPHELSVRMNATARGKATPVNLAHHAYWNLGGHGSGSVLGEEVRLFASRYTPVDAALIPTGHLAPVAGTPYDFRTPAAVGSRIGGLLSRGVNGYDINYVVDGGGLRPVAVVRDGASGRAMELWADQPGVQFYTANGLSGVRGKGGKVYGRYGALCLETQGFPDAVNRPSFPSQIVRPGKVYMHHMVFKFSF

SEQ ID NO: 9673 - protein, 365 aa, Triticum aestivum
  misc_feature (1)..(365): Ceres Seq. ID no. 12617154
MKMARALLVAPLLASCFVALGLSGRADAAAETKTVGVYELKKGDFSIKVTNWGATLMSVILPDSRGNLGDVILGYDTVAEYVNGTAYFGGLIGRVANRIANARFTLDGKAYRLVPNDGNNTLHGGHRGFDKVVWTVKEHVAGGSSPFITLYYHSFDGEQGFPGDVDVHVKYQLSGPHELSVRMNATARGKATPVNLAHHAYWNLGGHGSGSVLGEEVRLFASRYTPVDAALIPTGHLAPVAGTPYDFRTPAAVGSRIGGLLSRGVNGYDINYVVDGGGLRPVAVVRDGASGRAMELWADQPGVQFYTANGLSGVRGKGGKVYGRYGALCLETQGFPDAVNRPSFPSQIVRPGKVYMHHMVFKFSF

SEQ ID NO: 9674 - protein, 363 aa, Triticum aestivum
  misc_feature (1)..(363): Ceres Seq. ID no. 12617155
MARALLVAPLLASCFVALGLSGRADAAAETKTVGVYELKKGDFSIKVTNWGATLMSVILPDSRGNLGDVILGYDTVAEYVNGTAYFGGLIGRVANRIANARFTLDGKAYRLVPNDGNNTLHGGHRGFDKVVWTVKEHVAGGSSPFITLYYHSFDGEQGFPGDVDVHVKYQLSGPHELSVRMNATARGKATPVNLAHHAYWNLGGHGSGSVLGEEVRLFASRYTPVDAALIPTGHLAPVAGTPYDFRTPAAVGSRIGGLLSRGVNGYDINYVVDGGGLRPVAVVRDGASGRAMELWADQPGVQFYTANGLSGVRGKGGKVYGRYGALCLETQGFPDAVNRPSFPSQIVRPGKVYMHHMVFKFSF

SEQ ID NO: 9675 - DNA, 1226 bp, Triticum aestivum
  misc_feature (1)..(1226): Ceres Seq. ID no. 12617197
gtctgctgtccacttcagcgcagcgtggcgagacgcggagcaaccaaactccgcacagcagaggggactagccggagcggggagaaaaaacagcatggcggcggcggcggcggcgaggaagagcgtgtgcgtgaccggcgcagggggcttcgtcgcctcgtggctcgtcaagctcctcctctctaagggccactacgcggtccgcggcaccgtgcgcgatcccggtaatgctaagaatgctcaccttaaggcgctagaaggtgctggggaaaggttggagctgctcagcgccgacctgctgaactacgacagcattgcgtcagcggttgctggctgtgagggcgtctttcatgttgctagccctgtcccttctggcagatcaaccaatcctgaggaagaagttatagcccctgctgtaacaggcacactgaatgtcttgaaggcttgctacgaggcgaaagttaagcgagttgtcatggtgtcttcagttgctgctgtgtccaataatcctaactggcctaaggataaattatttgatgaagatagctggtcagacgaggatctctgcagaaagggtgaggattggtatttcctttccaaaacactcgcagagcgtgaggcttttgcttatgcagcaaaaactgggctggatattgtaactatttgcccgtcgttggtaattggccccttgatgcagtctacagtaaatacaagcagtaacattctccttaattacctcaaaggagaacgtgatactgtagaaaataaactcaggaatgtagtggatgtccgtgatgttgccgatgctcttctattggcatatgaaaatccagaggcgtctggacggtacatctgcagttcaaaaccagtaaaagtctctgatatgataagcgtactgaagaccttatatccaatgtacacttatcccaaaaactttacggaagtggaagaaaataccatttatagttcagagaaacttcagaagctagggtggaccttcaggcctttagagaagaccctgggggacagcgtggaatcctacaaagcatctggcgtcctgaactgagcatccaaccagggaaagtttggctgttaatgcttgcaaactccttgtggttcatgtaagcagtgaaacaaaataagttggtgacacaatcgtcacgagagtctgtgtgaacatgaacaaagcatgaatcgtatgcgcgcctttcttttggtgtgtcttg

SEQ ID NO: 9676 - protein, 354 aa, Triticum aestivum
  misc_feature (1)..(354): Ceres Seq. ID no. 12617198
SAVHFSAAWRDAEQPNSAQQRGLAGAGRKNSMAAAAAARKSVCVTGAGGFVASWLVKLLLSKGHYAVRGTVRDPGNAKNAHLKALEGAGERLELLSADLLNYDSIASAVAGCEGVFHVASPVPSGRSTNPEEEVIAPAVTGTLNVLKACYEAKVKRVVMVSSVAAVSNNPNWPKDKLFDEDSWSDEDLCRKGEDWYFLSKTLAEREAFAYAAKTGLDIVTICPSLVIGPLMQSTVNTSSNILLNYLKGERDTVENKLRNVVDVRDVADALLLAYENPEASGRYICSSKPVKVSDMISVLKTLYPMYTYPKNFTEVEENTIYSSEKLQKLGWTFRPLEKTLGDSVESYKASGVLN

SEQ ID NO: 9677 - protein, 323 aa, Triticum aestivum
  misc_feature (1)..(323): Ceres Seq. ID no. 12617199
MAAAAAARKSVCVTGAGGFVASWLVKLLLSKGHYAVRGTVRDPGNAKNAHLKALEGAGERLELLSADLLNYDSIASAVAGCEGVFHVASPVPSGRSTNPEEEVIAPAVTGTLNVLKACYEAKVKRVVMVSSVAAVSNNPNWPKDKLFDEDSWSDEDLCRKGEDWYFLSKTLAEREAFAYAAKTGLDIVTICPSLVIGPLMQSTVNTSSNILLNYLKGERDTVENKLRNVVDVRDVADALLLAYENPEASGRYICSSKPVKVSDMISVLKTLYPMYTYPKNFTEVEENTIYSSEKLQKLGWTFRPLEKTLGDSVESYKASGVLN

SEQ ID NO: 9678 - protein, 196 aa, Triticum aestivum
  misc_feature (1)..(196): Ceres Seq. ID no. 12617200
MVSSVAAVSNNPNWPKDKLFDEDSWSDEDLCRKGEDWYFLSKTLAEREAFAYAAKTGLDIVTICPSLVIGPLMQSTVNTSSNILLNYLKGERDTVENKLRNVVDVRDVADALLLAYENPEASGRYICSSKPVKVSDMISVLKTLYPMYTYPKNFTEVEENTIYSSEKLQKLGWTFRPLEKTLGDSVESYKASGVLN

SEQ ID NO: 9679 - DNA, 880 bp, Triticum aestivum
  misc_feature (1)..(880): Ceres Seq. ID no. 12617223
acatcccatctcccaccggcgaacccacccacgcaacccccaagcacacgcagcgcccgcctcctccccaccccacccctcgctccgatcccaaggttggcggccggcggcaggatgaaggccaaggcgggctcccgcgccggcgactccaggctcgcggtgaagaagagcaaggccgagaaggaccccaacaagcccaagcgccccccgagcgccttcttcgtcttcatggacaccttcaggaaggagtacaaggagaagcaccccgacgtcaagcaggtctccgtggttggcaaggccggtggcgagaagtggaagtccctgagtgatgctgagaaggctccctacactgccaaggccgagaagctcaaggccgagtacaccaagaagatcaacgcctacaacaacccgcaggcaggagaggcgtccggcgactctgacaagtccaagtccgaggtgaacgatgaggacagcgagggcgacgagtgatacggcacaccgagcagctgcagcagggggagggggtctcttgaacgtggccgctgccgctcattgctggtgtcaccgatcgatgatggatgttcgctgttagtttagccccttggtagtccctccctctctttcaggttgctgctgctgatggcgatgatagaaatggtagctctagtccatgtagtcgttgtcctggaccggagtggtgaagttgctagcctagtttcctttctgcagggtcctctgctcggaccgccctctgttgcttcgtttttagtatgttttaattcagtctctgtcggatgtacctagtgtcgtgcccgtggctgttttaagaatcctgccccagatctcaatatatatggtgttgaaaggaagaaaatcatct

SEQ ID NO: 9680 - protein, 162 aa, Triticum aestivum
  misc_feature (1)..(162): Ceres Seq. ID no. 12617224
TSHLPPANPPTQPPSTRSARLLPTPPLAPIPRLAAGGRMKAKAGSRAGDSRLAVKKSKAEKDPNKPKRPPSAFFVFMDTFRKEYKEKHPDVKQVSVVGKAGGEKWKSLSDAEKAPYTAKAEKLKAEYTKKINAYNNPQAGEASGDSDKSKSEVNDEDSEGDE

SEQ ID NO: 9681 - protein, 124 aa, Triticum aestivum
  misc_feature (1)..(124): Ceres Seq. ID no. 12617225
MKAKAGSRAGDSRLAVKKSKAEKDPNKPKRPPSAFFVFMDTFRKEYKEKHPDVKQVSVVGKAGGEKWKSLSDAEKAPYTAKAEKLKAEYTKKINAYNNPQAGEASGDSDKSKSEVNDEDSEGDE

SEQ ID NO: 9682 - protein, 108 aa, Triticum aestivum
  misc_feature (1)..(108): Ceres Seq. ID no. 12617226
IPSPTGEPTHATPKHTQRPPPPHPTPRSDPKVGGRRQDEGQGGLPRRRLQARGEEEQGREGPQQAQAPPERLLRLHGHLQEGVQGEAPRRQAGLRGWQGRWREVEVPE

SEQ ID NO: 9683 - DNA, 704 bp, Triticum aestivum
  misc_feature (1)..(704): Ceres Seq. ID no. 12617227
tgccctcccaaaagccgcccccttcccaaagaaatcaccacacgcgcagcaggcacaaccaacccacacccgccgccgcctcctcctcctccgatcccccaaggagccgtcgcgtcgcagcagatccgtccatggcggcgctggggtccaagctggcgcagctgcaggccaaggcctgcgaggcgacgcggttcgtgaccaggaacgggtgcgcctaccacaagaccctcatcgagaagaacaagcagttcgtcgtgcagccccccaccgtcgagaagtgccaggagctctccaagcagctcttctacacccgcatcgccagcctccccgtccgctacgaggcattctggaaggaggcggaccaagtgaagcagctgtggagaaacaggaaagatctgaacgtggagcacgcgggcatcatcgctctgttcggcctcgagctctacgggtggttctgcatcggcgagatcgccggccggggtttcaccttcacgggctacagcgtctgagcgccttccttccatgagtacctccacgcgatcggcgtcgattaagagctgaagactctgttagccaatcagtttctcgtgatgcgcggtgcgaagttttggttttctgaaatactattcttgatgctggtgaaaaaagtacacccggctcggtgaattcgactcgtcgatgaggtctaataatttgtcgcacgc

SEQ ID NO: 9684 - protein, 174 aa, Triticum aestivum
  misc_feature (1)..(174): Ceres Seq. ID no. 12617228
ALPKAAPFPKKSPHAQQAQPTHTRRRLLLLRSPKEPSRRSRSVHGGAGVQAGAAAGQGLRGDAVRDQERVRLPQDPHREEQAVRRAAPHRREVPGALQAALLHPHRQPPRPLRGILEGGGPSEAAVEKQERSERGARGHHRSVRPRALRVVLHRRDRRPGFHLHGLQRLSAFLP

SEQ ID NO: 9685 - protein, 168 aa, Triticum aestivum
  misc_feature (1)..(168): Ceres Seq. ID no. 12617229
PSQKPPPSQRNHHTRSRHNQPTPAAASSSSDPPRSRRVAADPSMAALGSKLAQLQAKACEATRFVTRNGCAYHKTLIEKNKQFVVQPPTVEKCQELSKQLFYTRIASLPVRYEAFWKEADQVKQLWRNRKDLNVEHAGIIALFGLELYGWFCIGEIAGRGFTFTGYSV

SEQ ID NO: 9686 - protein, 125 aa, Triticum aestivum
  misc_feature (1)..(125): Ceres Seq. ID no. 12617230
MAALGSKLAQLQAKACEATRFVTRNGCAYHKTLIEKNKQFVVQPPTVEKCQELSKQLFYTRIASLPVRYEAFWKEADQVKQLWRNRKDLNVEHAGIIALFGLELYGWFCIGEIAGRGFTFTGYSV

SEQ ID NO: 9687 - DNA, 1157 bp, Triticum aestivum
  misc_feature (1)..(1157): Ceres Seq. ID no. 12617447
tccctaaaatcttccccaaaacccccattgctccgcgatgagacccgcagcaacagcggtagcagccaccgccgccgcgctccgagccgcgttcctcgcccctcccgctgccgccttccgcctcctccctccccgccgtgtcttcctcctccccctgcaccgcctctcctcctcctcgtccccggtcgcccctccttgcgccgcttcctccgactcccagccgccgccgttgcctgccttcatggacgcgcagttcgagtccttccgggcgcagctcgatggctcctccgccctccgcgaccgcatccgcgccgtcgtctccgaggtcgagtcagcctcccgggccgcctccgctgcgctcctcctcatccaccagcccgtccccctatctgatgtgctcggcaaggcgaaggcgcaggtggaggtgatcaaggggctgtactctcagctcgcggagatcctcaaagagtgccccggtcagtactacaggtaccatggggactggaagagtgagacacagtctgtggtgtcgatgctagcgttcacgcactggctcgagactggtggcctgctcacgcacgccgaggcccaggaaaagctaggattgggttctggggagtttggcctggacgttgaagactacctgactggattgtgcttcatgtccaatgattttcctagatatgtagtgaatcgggtcacggcgggtgactacgactgcccacggaaggtgctaagctttttgactgatctgcatgcttcatttaggatgctgaatctgcgcaatgacttcttgcgtaagaaatttgatgggatgaagtatgatttgagaagggtggaggaagtattttatgatgtgaagatacgcggacttgtccctggggagtcaaagcaggaggttgctcagtcatagacggtgagcggtgccgtaccatttacttgcaatcgacagctgtcatgtgttgtcgtcgttaccgatgatgtttatgttggaccgatggttcctagaaaaagctcatgctgtgaggatctctttttttgactgtagcatcgctttaagttcggcactttttcggacccacctagaggttggaaaatgacatgagaattattctgttgcaaaaaaaaaaaaaaaaaagcttatcgataccgtcgac

SEQ ID NO: 9688 - protein, 291 aa, Triticum aestivum
  misc_feature (1)..(291): Ceres Seq. ID no. 12617448
MRPAATAVAATAAALRAAFLAPPAAAFRLLPPRRVFLLPLHRLSSSSSPVAPPCAASSDSQPPPLPAFMDAQFESFRAQLDGSSALRDRIRAVVSEVESASRAASAALLLIHQPVPLSDVLGKAKAQVEVIKGLYSQLAEILKECPGQYYRYHGDWKSETQSVVSMLAFTHWLETGGLLTHAEAQEKLGLGSGEFGLDVEDYLTGLCFMSNDFPRYVVNRVTAGDYDCPRKVLSFLTDLHASFRMLNLRNDFLRKKFDGMKYDLRRVEEVFYDVKIRGLVPGESKQEVAQS

SEQ ID NO: 9689 - protein, 223 aa, Triticum aestivum
  misc_feature (1)..(223): Ceres Seq. ID no. 12617449
MDAQFESFRAQLDGSSALRDRIRAVVSEVESASRAASAALLLIHQPVPLSDVLGKAKAQVEVIKGLYSQLAEILKECPGQYYRYHGDWKSETQSVVSMLAFTHWLETGGLLTHAEAQEKLGLGSGEFGLDVEDYLTGLCFMSNDFPRYVVNRVTAGDYDCPRKVLSFLTDLHASFRMLNLRNDFLRKKFDGMKYDLRRVEEVFYDVKIRGLVPGESKQEVAQS

SEQ ID NO: 9690 - DNA, 690 bp, Triticum aestivum
  misc_feature (1)..(690): Ceres Seq. ID no. 12617479
cgattctccgctcgcctgctctgctccgccgcctctctggaaaaaaacacacaggtggcactgaataatagacaaggatggcttctactggcgtgaaagatttctaccggcagaagaagaaaggaggtgttggcaaaacttcagcatcttctaagaagaaaacacagaattacactggaggggcctctgttggggcctcaaataaggctcagacagcagcactaatttctcacggatccttagacctcagagatgatttcagtgagcaagaggagcagctgcggcagtttgacatggacatgaagtttggcccgtgcatcggtgtcaaccggcttcagcgctgggagcgtgcttccgccatgggcctccagccaccgccccaccttcgtgatctcctagcgcgcgcctcctccggaaacaaccgcaacaacggcggcccctcccctgaatgcctctgggagggtaagatctagaatcaaatttcttccgccgcaagtgctccttggcaacctagcatggcttgcctactgtagtctgaaactctgagcccgttttaccacgcggaactcctgctgttgcaccgtatccttggttgtttgcttatcagatgttgctacctcaactcctgcgagtgtcatcttcagtttgccgaaaaaaaaaaaaaaaaaagcttatcgataccgtcgacct

SEQ ID NO: 9691 - protein, 131 aa, Triticum aestivum
  misc_feature (1)..(131): Ceres Seq. ID no. 12617480
MASTGVKDFYRQKKKGGVGKTSASSKKKTQNYTGGASVGASNKAQTAALISHGSLDLRDDFSEQEEQLRQFDMDMKFGPCIGVNRLQRWERASAMGLQPPPHLRDLLARASSGNNRNNGGPSPECLWEGKI

SEQ ID NO: 9692 - DNA, 1353 bp, Triticum aestivum
  misc_feature (1)..(1353): Ceres Seq. ID no. 12617639
aaaagtacgcctgaagccctacaggctcccgccgcccccctccccctcccgcccccaaaccctaacccctccgccaccatcgccgccaccgcggctcccctctcttcctcctcgccgcgacaccccgtccccgccctctccaccacgtccacaatcttcctccattagatttcgaggggtctcgggaggatggcgttcctgcagaaggtcgggaatgccctcaagcggtccgcgggctccggctcggcgatgctccaggcggtccggtccatgtcctcctccaaggtcttcgtcggaggcatctcgtacggcaccgatgaccagagcctcgcggatgcgttttccaactacggccaagtcgtggaatccaaggtgatcatggaccgtgaatctgggaggtcaagggggtttggtttcgtgacctacacttcggcggaggaggctggagctgccatcaccggaatggatgggaaggatctgcagggtcggatagtgagggtgagctatgctcatgaccgtggtagtcgtccaagttttggcggtggtggcggctatggcggcggtggtggcggctatggcggcggtgacggtggttacggtggagctggtggtgcctatggtggtggtggaggctacagcggaggtggtggatatgggggtggaggcagaggtggtggatacaatagtggtggcaattataattcaggatacaacagtgggggaaactatggtgcccctcaaggcgagcaaggtggctatgggggtgatgctggtttcacaggggttggtggtggtggatacgatgctgctcctgccaacaactatggcggcgatagcctgaatcaagggggtggagcacctcctgcatttggaggtggaaactatggcgtaggcaacgacagctacgcggacgatgcccctgttgatctgccccctggtaagctcaatgacctgctgaaggatctcaaatttgatgttggtggcaaggaggatggtgctggggaggacgccggcttggttgacgcggacatcaagagaagcgagggacaggatgactttcttgacgacgacttcagcaaggatgaagatgactacgccaacaagagaagctgaatgttggtccagcaagaagcatcagccgaataatttcccgtcgatatgttctccatgactgccttgtttttggtattgtcctgtgatgaagataataatgtagtgcttgcaaacaagttatgttcggtctcttagctacgttctgtacgtctgctttgtgtactgtgttctggattcatagtatggtgcgaacttgaacctgaactctgcatgtattgcacgctgtgaaattgcactttc

SEQ ID NO: 9693 - protein, 307 aa, Triticum aestivum
  misc_feature (1)..(307): Ceres Seq. ID no. 12617640
MAFLQKVGNALKRSAGSGSAMLQAVRSMSSSKVFVGGISYGTDDQSLADAFSNYGQVVESKVIMDRESGRSRGFGFVTYTSAEEAGAAITGMDGKDLQGRIVRVSYAHDRGSRPSFGGGGGYGGGGGGYGGGDGGYGGAGGAYGGGGGYSGGGGYGGGGRGGGYNSGGNYNSGYNSGGNYGAPQGEQGGYGGDAGFTGVGGGGYDAAPANNYGGDSLNQGGGAPPAFGGGNYGVGNDSYADDAPVDLPPGKLNDLLKDLKFDVGGKEDGAGEDAGLVDADIKRSEGQDDFLDDDFSKDEDDYANKRS

SEQ ID NO: 9694 - protein, 287 aa, Triticum aestivum
  misc_feature (1)..(287): Ceres Seq. ID no. 12617641
MLQAVRSMSSSKVFVGGISYGTDDQSLADAFSNYGQVVESKVIMDRESGRSRGFGFVTYTSAEEAGAAITGMDGKDLQGRIVRVSYAHDRGSRPSFGGGGGYGGGGGGYGGGDGGYGGAGGAYGGGGGYSGGGGYGGGGRGGGYNSGGNYNSGYNSGGNYGAPQGEQGGYGGDAGFTGVGGGGYDAAPANNYGGDSLNQGGGAPPAFGGGNYGVGNDSYADDAPVDLPPGKLNDLLKDLKFDVGGKEDGAGEDAGLVDADIKRSEGQDDFLDDDFSKDEDDYANKRS

SEQ ID NO: 9695 - protein, 280 aa, Triticum aestivum
  misc_feature (1)..(280): Ceres Seq. ID no. 12617642
MSSSKVFVGGISYGTDDQSLADAFSNYGQVVESKVIMDRESGRSRGFGFVTYTSAEEAGAAITGMDGKDLQGRIVRVSYAHDRGSRPSFGGGGGYGGGGGGYGGGDGGYGGAGGAYGGGGGYSGGGGYGGGGRGGGYNSGGNYNSGYNSGGNYGAPQGEQGGYGGDAGFTGVGGGGYDAAPANNYGGDSLNQGGGAPPAFGGGNYGVGNDSYADDAPVDLPPGKLNDLLKDLKFDVGGKEDGAGEDAGLVDADIKRSEGQDDFLDDDFSKDEDDYANKRS

SEQ ID NO: 9696 - DNA, 587 bp, Triticum aestivum
  misc_feature (1)..(587): Ceres Seq. ID no. 12617643
gacgccataagcgcttcgaatctgacgacgacgacgaacggcgacggcgcgacagatagatggatgcggccgaagccagtgcgagatggtgtgtggtcactggcggccgcggcttcgcggcgagacatctggtgctgatgcttctccgctccggcgagtggcgcgtgcgcgtggccgacctggcccaagtcatctctctcgaccgagacgaggagcagggtatcctcggggccgccatccgcgaaggacaagccgtttacgcgtccgccgacctccgcgacaaggcccagctggccaaagcttttgagggggcagaagtagtttttcatatggctgctccagactcatccatcaacaacttccatcttcattattcggtgaatgttgaaggaacaaagaatgtcattgatgcgtgtatctattgcaaggtgaagcgacttatctacactagttcaccaagtgtagtttttgatggtgttcatggaatttttaatgcagatgaatcaatgccttacccagataagtttaatgattcgtattcagaaacaaaagcagacgcagnaaaattggtgatgagagctaatggt

SEQ ID NO: 9697 - protein, 176 aa, Triticum aestivum
  misc_feature (1)..(176): Ceres Seq. ID no. 13655856
  misc_feature (168)..(168): Xaa is any aa, unknown or other
MDAAEASARWCVVTGGRGFAARHLVLMLLRSGEWRVRVADLAQVISLDRDEEQGILGAAIREGQAVYASADLRDKAQLAKAFEGAEVVFHMAAPDSSINNFHLHYSVNVEGTKNVIDACIYCKVKRLIYTSSPSVVFDGVHGIFNADESMPYPDKFNDSYSETKADAXKLVMRANG

SEQ ID NO: 9698 - protein, 150 aa, Triticum aestivum
  misc_feature (1)..(150): Ceres Seq. ID no. 13655857
  misc_feature (142)..(142): Xaa is any aa, unknown or other
MLLRSGEWRVRVADLAQVISLDRDEEQGILGAAIREGQAVYASADLRDKAQLAKAFEGAEVVFHMAAPDSSINNFHLHYSVNVEGTKNVIDACIYCKVKRLIYTSSPSVVFDGVHGIFNADESMPYPDKFNDSYSETKADAXKLVMRANG

SEQ ID NO: 9699 - DNA, 1410 bp, Triticum aestivum
  misc_feature (1)..(1410): Ceres Seq. ID no. 12617729
atccataacccggctgcccctcgcccgtctccgccgcaccccccaaaaccctagctcccctccccaccccgccccccaccgccgccgccgcccgcgaagatgccgccgaacctcgagtgccggatgtacgagccgcggttcccggaggtggacgcggcggtgatgatccaggtgaagcacatcgccgacatgggcgcctacgtctcgctcctcgagtacaacaacatcgagggcatgatcctcttctccgagctctcccgccgccgcatccgctccatctcctccctcatcaaggtcggccgccaggagccctccatggtgctccgcgtcgaccgcgacaagggctacatcgacctctccaagcgccgggtctcggaggaggaggccgccacctgcgaggaccgctacaacaagtccaagctcgtccactccatcatgcgccacgccgccgacaccctcggcgtcgacctcgagcccctctaccagcgcatcggctggccgctctaccgcaggtacggccacgcctttgaggccttcaagctcatcgtcaccgaccccgacggggtgctcgacgtcctcacctacgaggagaccgtcgtcggacccgatggcgaggaggtgactaaagttgtgccggcggtcacccctgaggttaaggatgccctggtcaagaacataaggaggagaatgacaccacagcctcttaagattcgtgctgatgttgagatgaaatgcttccagtttgacggtgttctccacattaaggaagccatgaggaaagctgaagctgctggaaacgctgattgccctgtgaagattaagctagttgctcctccgctttatgttctgaccacacagacacttgacaaagaccaggggatagcagttctgacaaatgcaaccaaaatttgtgccgaggcaattgaaaagcacaaggggaaattggtggtgaaggaagcagctagagctgtgagcgagagagacgacaagctgtttgcggacacgattgagaagctcaagctagcaggtgaggaggtcgacggcgacgacgatagcgaggaggaggactctggcatgggagacgtagacttcacaaaggctggcgctggcgcggactgagcgggtctcctcccaggtgggatgagattgcttgtacagcgccagcaatgaaggggaagaatgtttggctcctcctgtttgtttgaggaggcacgttggatggatggacgagtgtttactctgttattagatattgatgatcagttgtaggctacccgtagtcttacagattgatttgcttttcgctgagcactgattctgaatactgttaattgcgcttttgctacctgttttcatcagcatttatacatggattttgcttatcgttgctcactaagtggaatttggtgc

SEQ ID NO: 9700 - protein, 339 aa, Triticum aestivum
  misc_feature (1)..(339): Ceres Seq. ID no. 12617730
MPPNLECRMYEPRFPEVDAAVMIQVKHIADMGAYVSLLEYNNIEGMILFSELSRRRIRSISSLIKVGRQEPSMVLRVDRDKGYIDLSKRRVSEEEAATCEDRYNKSKLVHSIMRHAADTLGVDLEPLYQRIGWPLYRRYGHAFEAFKLIVTDPDGVLDVLTYEETVVGPDGEEVTKVVPAVTPEVKDALVKNIRRRMTPQPLKIRADVEMKCFQFDGVLHIKEAMRKAEAAGNADCPVKIKLVAPPLYVLTTQTLDKDQGIAVLTNATKICAEAIEKHKGKLVVKEAARAVSERDDKLFADTIEKLKLAGEEVDGDDDSEEEDSGMGDVDFTKAGAGAD

SEQ ID NO: 9701 - protein, 331 aa, Triticum aestivum
  misc_feature (1)..(331): Ceres Seq. ID no. 12617731
MYEPRFPEVDAAVMIQVKHIADMGAYVSLLEYNNIEGMILFSELSRRRIRSISSLIKVGRQEPSMVLRVDRDKGYIDLSKRRVSEEEAATCEDRYNKSKLVHSIMRHAADTLGVDLEPLYQRIGWPLYRRYGHAFEAFKLIVTDPDGVLDVLTYEETVVGPDGEEVTKVVPAVTPEVKDALVKNIRRRMTPQPLKIRADVEMKCFQFDGVLHIKEAMRKAEAAGNADCPVKIKLVAPPLYVLTTQTLDKDQGIAVLTNATKICAEAIEKHKGKLVVKEAARAVSERDDKLFADTIEKLKLAGEEVDGDDDSEEEDSGMGDVDFTKAGAGAD

SEQ ID NO: 9702 - protein, 318 aa, Triticum aestivum
  misc_feature (1)..(318): Ceres Seq. ID no. 12617732
MIQVKHIADMGAYVSLLEYNNIEGMILFSELSRRRIRSISSLIKVGRQEPSMVLRVDRDKGYIDLSKRRVSEEEAATCEDRYNKSKLVHSIMRHAADTLGVDLEPLYQRIGWPLYRRYGHAFEAFKLIVTDPDGVLDVLTYEETVVGPDGEEVTKVVPAVTPEVKDALVKNIRRRMTPQPLKIRADVEMKCFQFDGVLHIKEAMRKAEAAGNADCPVKIKLVAPPLYVLTTQTLDKDQGIAVLTNATKICAEAIEKHKGKLVVKEAARAVSERDDKLFADTIEKLKLAGEEVDGDDDSEEEDSGMGDVDFTKAGAGAD

SEQ ID NO: 9703 - DNA, 1368 bp, Triticum aestivum
  misc_feature (1)..(1368): Ceres Seq. ID no. 12617911
cccccgagcgcgccccgcctcgccgaccggtcgccggagatgtcccgcacgctggtgcagccggtggggcagaagcggctgaccaacgtggccgtggtgcggctgcgcaagggcggccagcggttcgagatcgcctgcttccccaacaaggtggtcaactggcgcgaccgcgtcgagaaggacctcgacgaggtgctccagtcccacaacgtctactccaacgtctccaagggcgtcctcgccaagtccaaggacctcatcaggatcttcggcaccgacgacctcgtcgaaatctgcgtcgagattttggagaaaggggagctccaggtttctggcaaggagagggaggcgcagctgtccgcgcagttcagggacatcgccaccatcgtgatggagaagactatcagtactgagacccggcgcccctacaccatgaacatgatcgagcgcatcatgcacgagatacactttgccgtcgatccaaaccttacctccaaggaacaggcactgagagttattaagaagctaatcgagaaccctaaatacaagataaagcgtgcaccattgacagtgcggttcattgcacctaagtccaatcttgctggccttatggagaagcttgatgggtggaatgcaattgttctttcaaaggatgagtctgccgatcagtcttccgttgtatgtgagattgagccatctattctgcactcgtgtgaagagaaactgaaggacgtgcaagggagggtggaagtactctcggtgtcggcacacacagaaggtggctcttctacagaccaatatgacaatgtcgaggacaatgtggagaaggcacagcccgtgcctgcgaaggagtctggtgctgttgctcagctaagtgaaaccatgcagaaacagagcctttcaagtgaagtggaaagccagggtcaggcaccaggcaagccgcagaaaagatgcagagaatgtgacgtattcatggaggacaagctgtacagagaccactgcaagtccgggtggcacaagcacaactacacacgccacaagaatgggcttcccccactcagccaagaggagtgcttgatggaaatggagatggcagattcccagaggggtctgaaggactacgatttctgaggtgggttttgtctagcactccctctcaccacgccttcaaggccgagagatggtatgcacaaggcatgaattttgcagtcttgttgtttccgtggacatagtcatcatttggtaaatgctggtatgaagtggggaactagttttgcggtacgctagcaagtttataaaatgtaatcaggttacgttgtgtgaatgtgaactgtgtgtagttggctgagtaaacttgtggcagtactc

SEQ ID NO: 9704 - protein, 376 aa, Triticum aestivum
  misc_feature (1)..(376): Ceres Seq. ID no. 12617912
PPSAPRLADRSPEMSRTLVQPVGQKRLTNVAVVRLRKGGQRFEIACFPNKVVNWRDRVEKDLDEVLQSHNVYSNVSKGVLAKSKDLIRIFGTDDLVEICVEILEKGELQVSGKEREAQLSAQFRDIATIVMEKTISTETRRPYTMNMIERIMHEIHFAVDPNLTSKEQALRVIKKLIENPKYKIKRAPLTVRFIAPKSNLAGLMEKLDGWNAIVLSKDESADQSSVVCEIEPSILHSCEEKLKDVQGRVEVLSVSAHTEGGSSTDQYDNVEDNVEKAQPVPAKESGAVAQLSETMQKQSLSSEVESQGQAPGKPQKRCRECDVFMEDKLYRDHCKSGWHKHNYTRHKNGLPPLSQEECLMEMEMADSQRGLKDYDF

SEQ ID NO: 9705 - protein, 363 aa, Triticum aestivum
  misc_feature (1)..(363): Ceres Seq. ID no. 12617913
MSRTLVQPVGQKRLTNVAVVRLRKGGQRFEIACFPNKVVNWRDRVEKDLDEVLQSHNVYSNVSKGVLAKSKDLIRIFGTDDLVEICVEILEKGELQVSGKEREAQLSAQFRDIATIVMEKTISTETRRPYTMNMIERIMHEIHFAVDPNLTSKEQALRVIKKLIENPKYKIKRAPLTVRFIAPKSNLAGLMEKLDGWNAIVLSKDESADQSSVVCEIEPSILHSCEEKLKDVQGRVEVLSVSAHTEGGSSTDQYDNVEDNVEKAQPVPAKESGAVAQLSETMQKQSLSSEVESQGQAPGKPQKRCRECDVFMEDKLYRDHCKSGWHKHNYTRHKNGLPPLSQEECLMEMEMADSQRGLKDYDF

SEQ ID NO: 9706 - protein, 246 aa, Triticum aestivum
  misc_feature (1)..(246): Ceres Seq. ID no. 12617914
MEKTISTETRRPYTMNMIERIMHEIHFAVDPNLTSKEQALRVIKKLIENPKYKIKRAPLTVRFIAPKSNLAGLMEKLDGWNAIVLSKDESADQSSVVCEIEPSILHSCEEKLKDVQGRVEVLSVSAHTEGGSSTDQYDNVEDNVEKAQPVPAKESGAVAQLSETMQKQSLSSEVESQGQAPGKPQKRCRECDVFMEDKLYRDHCKSGWHKHNYTRHKNGLPPLSQEECLMEMEMADSQRGLKDYDF

SEQ ID NO: 9707 - DNA, 1148 bp, Triticum aestivum
  misc_feature (1)..(1148): Ceres Seq. ID no. 12617960
ggagatctttgcgtgaccgcgcagccaagggggaaaagaaagaaaaggaaaaccaaccagaagaaaagctcgggaggagagcgtggggggactagggagcatggcggagcacaaggaggagccggtggcggagtccatgatggacaagatctccgacaagttccacggtggggactcgtcgtcgtcgtcctcggactcggacgacgagaagaaggggtcggcggcgggcgtcaaggccaagatctaccgcctcttcggccgcgagaagcccgtccacgccgtcctcggcggcggcaagcctgctgatcttgttctatggaggaacaagaaggtctccggaggggtgcttgctggcgctactgccatctggctgctgttcgaggtcatggagtaccatctgctcaccttggtgggccactgcctcatcctctccctggcaaccctcttcctctattccaatgtctgcattttcatccacaagtctcccccgaacatccctgaggtgaaaatcccggaggacatgactgtaaacattgcactatcactgcggcatgagatcaaccggggcttctttaccttgagagagactggtcatggtcgtgatctgaagaaattcctcattgtgattggagggctctggcttctttctgttcttgggagctactgcaactttttgacactgtcatatatagtctttgtggtgctgtacactgtgccagttctgtatgagaagtacgatgacaaggtggatgcttttggtgagaaggccatgatcgaattgaagaagtattatgccatctttgaagagaaggtcctgtcgaagatcccgaagaacaagaagcactagatcacaagagttaccctgccgcgtattgccatctgtgttaatctcaacttgttgcctcattttgaaggatggttctgtgtcattgcgtctgtctttagttaatactacttgatactagtacatatagatgtggtgtgctaatccttttgtgaagtggagtcatgccagctgaagattgttgatcttcttttttttgtttatttttcaactttcagcatggttactctatntgggagccggaaatgttatggcattacctgttntagtgcctagtgatatactactgcgtagtgatttatcc

SEQ ID NO: 9708 - protein, 248 aa, Triticum aestivum
  misc_feature (1)..(248): Ceres Seq. ID no. 12617961
MAEHKEEPVAESMMDKISDKFHGGDSSSSSSDSDDEKKGSAAGVKAKIYRLFGREKPVHAVLGGGKPADLVLWRNKKVSGGVLAGATAIWLLFEVMEYHLLTLVGHCLILSLATLFLYSNVCIFIHKSPPNIPEVKIPEDMTVNIALSLRHEINRGFFTLRETGHGRDLKKFLIVIGGLWLLSVLGSYCNFLTLSYIVFVVLYTVPVLYEKYDDKVDAFGEKAMIELKKYYAIFEEKVLSKIPKNKKH

SEQ ID NO: 9709 - protein, 236 aa, Triticum aestivum
  misc_feature (1)..(236): Ceres Seq. ID no. 12617962
MMDKISDKFHGGDSSSSSSDSDDEKKGSAAGVKAKIYRLFGREKPVHAVLGGGKPADLVLWRNKKVSGGVLAGATAIWLLFEVMEYHLLTLVGHCLILSLATLFLYSNVCIFIHKSPPNIPEVKIPEDMTVNIALSLRHEINRGFFTLRETGHGRDLKKFLIVIGGLWLLSVLGSYCNFLTLSYIVFVVLYTVPVLYEKYDDKVDAFGEKAMIELKKYYAIFEEKVLSKIPKNKKH

SEQ ID NO: 9710 - protein, 235 aa, Triticum aestivum
  misc_feature (1)..(235): Ceres Seq. ID no. 12617963
MDKISDKFHGGDSSSSSSDSDDEKKGSAAGVKAKIYRLFGREKPVHAVLGGGKPADLVLWRNKKVSGGVLAGATAIWLLFEVMEYHLLTLVGHCLILSLATLFLYSNVCIFIHKSPPNIPEVKIPEDMTVNIALSLRHEINRGFFTLRETGHGRDLKKFLIVIGGLWLLSVLGSYCNFLTLSYIVFVVLYTVPVLYEKYDDKVDAFGEKAMIELKKYYAIFEEKVLSKIPKNKKH

SEQ ID NO: 9711 - DNA, 1133 bp, Triticum aestivum
  misc_feature (1)..(1133): Ceres Seq. ID no. 12618069
agatcacgcgccgctcctcccggtcgccctagcgccgccaccgaacgatcccccgaccccccagaccacgagaccacccgcggcggttggccggcgcagggatgggcgacgaggcgaagtacctggagactgcgcgggcggaccgctccgtgtggctcatgaagtgcccccccgtcgtctcccaggcctggcagggcgcctcctcctcctccggcgatgctaaccctaacccggtcgtcgccaaggtcgtgctgtccctcgaccccctcagctccgccgagccctccctccagttcaagatggagatgtctcaaactagtgtagccagcacttgcaatctaccaaagagttactccttgaatatgttcaaggattttgtacccatgtgtgttttctctgagactaatcagggaaaactctcatgtgaaggaaaagtcgagcataaattcgacatggaacctcacaaggataacttattaaactacgcgaagttatgccgtgaaagaacacaaaagtcgatggttaaaactagaaaagtgcaggtacttgataatgaccatggaatgagcatgagacccatgcctggcatggttggtctgatatcttctagttccaaggagaagaggaagccaacgccaaccaaaccatccgatgtcaaaaggacacgtagggaccgtcgggaactggaaaacattatcttcaagcttttcgaaaagcagcctaactgggcactgaaggctctagtgcaagagactgaccagccagagcaattcctcaaggagatattgaacgacctctgtatgtacaacaaacgaggtccgaaccagggcacgcacgagctcaagcccgagtacaagaagtcgtcggaggacgccgccggtgctgctccgtgaagacgatttgcgtatccgactgctgttgtataaccgagtacctgttggctttgatgtgcggaacgatgagttgtctatctgaagcctccgatcatgcctgggctgcatttgtttgctttttattaagaaggcactgttgtaactgtatgggtataagatgatacatatactgatatacaacacatgtcacagaagggaacgaatctactgataaaccacatgaaaagatcgtttgatttc

SEQ ID NO: 9712 - protein, 263 aa, Triticum aestivum
  misc_feature (1)..(263): Ceres Seq. ID no. 12618070
MGDEAKYLETARADRSVWLMKCPPVVSQAWQGASSSSGDANPNPVVAKVVLSLDPLSSAEPSLQFKMEMSQTSVASTCNLPKSYSLNMFKDFVPMCVFSETNQGKLSCEGKVEHKFDMEPHKDNLLNYAKLCRERTQKSMVKTRKVQVLDNDHGMSMRPMPGMVGLISSSSKEKRKPTPTKPSDVKRTRRDRRELENIIFKLFEKQPNWALKALVQETDQPEQFLKEILNDLCMYNKRGPNQGTHELKPEYKKSSEDAAGAAP

SEQ ID NO: 9713 - protein, 244 aa, Triticum aestivum
  misc_feature (1)..(244): Ceres Seq. ID no. 12618071
MKCPPVVSQAWQGASSSSGDANPNPVVAKVVLSLDPLSSAEPSLQFKMEMSQTSVASTCNLPKSYSLNMFKDFVPMCVFSETNQGKLSCEGKVEHKFDMEPHKDNLLNYAKLCRERTQKSMVKTRKVQVLDNDHGMSMRPMPGMVGLISSSSKEKRKPTPTKPSDVKRTRRDRRELENIIFKLFEKQPNWALKALVQETDQPEQFLKEILNDLCMYNKRGPNQGTHELKPEYKKSSEDAAGAAP

SEQ ID NO: 9714 - protein, 197 aa, Triticum aestivum
  misc_feature (1)..(197): Ceres Seq. ID no. 12618072
MEMSQTSVASTCNLPKSYSLNMFKDFVPMCVFSETNQGKLSCEGKVEHKFDMEPHKDNLLNYAKLCRERTQKSMVKTRKVQVLDNDHGMSMRPMPGMVGLISSSSKEKRKPTPTKPSDVKRTRRDRRELENIIFKLFEKQPNWALKALVQETDQPEQFLKEILNDLCMYNKRGPNQGTHELKPEYKKSSEDAAGAAP

SEQ ID NO: 9715 - DNA, 757 bp, Triticum aestivum
  misc_feature (1)..(757): Ceres Seq. ID no. 12618180
attttggatactagtgttggtctcagagtcctccaccccggacctctctgttcaccgcacacgatcagcagaggcagcggcaaggaagatgacgacgacgacaaggaggagacccttgaaggtccctgagatggcgctgagggtgtgcgtgatccccctcgccttggcctccctgtgggagatggccaccaacaagcaagctaatgacacctacggagagatcagcttctccaacctctccggcttcaagtatttagttttcattaacgctgtcactgccgcctattccgtggtctccatcctgatgtcatccttcaagtccctcgctcgctatgattggctcattttcctcctggatcaggcggcggcgtacctgctggtgacatcgtgctcggcggcggcggagctggtgtacctggcgatggagggcgaccgggaggtgtcgtggggcgaggtgtgctcctacttcggtcggttctgcggcagggccaccgtgtccgtggcgctgcaggccgccgcgctgctctgcttcgtcgcgctctccctcgtctccgccttccgggtcttccgcgagttcgacgcccctggtgctcatgttgattgctcgggggactctgactccaagcaggaaggtagaggatgatccatcatgaacaatcgctgatatttggaccatcttttatgtgtcaatggttgacgatggcgatgcgtccttggttttctttacgaatgctgatttcggggggagaaatgttgt

SEQ ID NO: 9716 - protein, 213 aa, Triticum aestivum
  misc_feature (1)..(213): Ceres Seq. ID no. 12618181
FWILVLVSESSTPDLSVHRTRSAEAAARKMTTTTRRRPLKVPEMALRVCVIPLALASLWEMATNKQANDTYGEISFSNLSGFKYLVFINAVTAAYSVVSILMSSFKSLARYDWLIFLLDQAAAYLLVTSCSAAAELVYLAMEGDREVSWGEVCSYFGRFCGRATVSVALQAAALLCFVALSLVSAFRVFREFDAPGAHVDCSGDSDSKQEGRG

SEQ ID NO: 9717 - protein, 184 aa, Triticum aestivum
  misc_feature (1)..(184): Ceres Seq. ID no. 12618182
MTTTTRRRPLKVPEMALRVCVIPLALASLWEMATNKQANDTYGEISFSNLSGFKYLVFINAVTAAYSVVSILMSSFKSLARYDWLIFLLDQAAAYLLVTSCSAAAELVYLAMEGDREVSWGEVCSYFGRFCGRATVSVALQAAALLCFVALSLVSAFRVFREFDAPGAHVDCSGDSDSKQEGRG

SEQ ID NO: 9718 - protein, 170 aa, Triticum aestivum
  misc_feature (1)..(170): Ceres Seq. ID no. 12618183
MALRVCVIPLALASLWEMATNKQANDTYGEISFSNLSGFKYLVFINAVTAAYSVVSILMSSFKSLARYDWLIFLLDQAAAYLLVTSCSAAAELVYLAMEGDREVSWGEVCSYFGRFCGRATVSVALQAAALLCFVALSLVSAFRVFREFDAPGAHVDCSGDSDSKQEGRG

SEQ ID NO: 9719 - DNA, 1451 bp, Triticum aestivum
  misc_feature (1)..(1451): Ceres Seq. ID no. 12618197
aaaaagaaaaaatcaagctcccgtcgaaaagaagaaaggaaaaaacacagctctcacaccccgcctcggccgcgtctaaaaccctagcccccgccgccggcgagcgacgagatgatggaccagcggtggcgcccgacggtgaacgagcgggagttcatcgagcaggccctccagtcggacctccgcgtcgacggccgccgccccttcgacttccaccccttcgacttccgcaagctcacaatctccttcggcagggaggacggctccgcggaggtgctgctcggcgagacgtgcgtgatgggctatgtgaccgcccaattggtcccgccgtacaaggacaggccgaacgagggcacgctcgccatattcaccgagttctcgcccatggctgatcccgcctttgagccggggcggcccggggaagcggcgattgagctgggtcgtgtcatcgatcgtggcctaagggagagcagagccgtggatatggaatccttgtgtgttgttgcggggaagcatgtctgggcggtgcgcgttgaccttcacattctggacaatggggggaatctcatcgatgcagctaacatcgctgcattggcagctttgtctacattccggaggcctgaatgcacggttggtggggatgatggtcagcaagtcacagtacatgaccctgaggtcatggatccacttcccctaacaattcatcatctccccatagctgtaacctttgcatattttggtgacggtaatatcatggttatcgatccaacatacaaggaagaagctgttatgggaggaaggatgacagctacggttaactcgaatggtgatgtctgtgccattcagaaagctggtggagagggtgtcatgtcaagtgttatcatgcagtgtttaaggattgcttcggttaaagctgctgatatcacaagcaaaataaagaccaaggtcgataagtacactactgataaggcattgcagaaagtaaagcgtactccagcaatagttgctaaagaagttaacgttcctgatgtcgctatgaaggagagcatgcatagtgcaatggaaaaccaaacctcgaaggcacccaatgatgatcagcagataagtgaagattcaccagctgtagcaaatgacaaaaagcatgaggatgtcgagccagtgttgattgaatctaatccagaggtgaaaagtgtgtcaaattctggaagtgctggagagtcagatgaggtcaaggaaagcagatcaccggagagtctagtagatgctgtcaaaccaaaacataaaaggaagaagaaacaacatggcaagagttagattgactgtagccttaaagtcttaactgcatgatggttgcagacacagttagttagctttcttattctcttgatgtgcacatgctacagtggtacattattaaattttaagcaacgagtaatagtgctatcctttgc

SEQ ID NO: 9720 - protein, 400 aa, Triticum aestivum
  misc_feature (1)..(400): Ceres Seq. ID no. 12618198
MMDQRWRPTVNEREFIEQALQSDLRVDGRRPFDFHPFDFRKLTISFGREDGSAEVLLGETCVMGYVTAQLVPPYKDRPNEGTLAIFTEFSPMADPAFEPGRPGEAAIELGRVIDRGLRESRAVDMESLCVVAGKHVWAVRVDLHILDNGGNLIDAANIAALAALSTFRRPECTVGGDDGQQVTVHDPEVMDPLPLTIHHLPIAVTFAYFGDGNIMVIDPTYKEEAVMGGRMTATVNSNGDVCAIQKAGGEGVMSSVIMQCLRIASVKAADITSKIKTKVDKYTTDKALQKVKRTPAIVAKEVNVPDVAMKESMHSAMENQTSKAPNDDQQISEDSPAVANDKKHEDVEPVLIESNPEVKSVSNSGSAGESDEVKESRSPESLVDAVKPKHKRKKKQHGKS

SEQ ID NO: 9721 - protein, 399 aa, Triticum aestivum
  misc_feature (1)..(399): Ceres Seq. ID no. 12618199
MDQRWRPTVNEREFIEQALQSDLRVDGRRPFDFHPFDFRKLTISFGREDGSAEVLLGETCVMGYVTAQLVPPYKDRPNEGTLAIFTEFSPMADPAFEPGRPGEAAIELGRVIDRGLRESRAVDMESLCVVAGKHVWAVRVDLHILDNGGNLIDAANIAALAALSTFRRPECTVGGDDGQQVTVHDPEVMDPLPLTIHHLPIAVTFAYFGDGNIMVIDPTYKEEAVMGGRMTATVNSNGDVCAIQKAGGEGVMSSVIMQCLRIASVKAADITSKIKTKVDKYTTDKALQKVKRTPAIVAKEVNVPDVAMKESMHSAMENQTSKAPNDDQQISEDSPAVANDKKHEDVEPVLIESNPEVKSVSNSGSAGESDEVKESRSPESLVDAVKPKHKRKKKQHGKS

SEQ ID NO: 9722 - protein, 338 aa, Triticum aestivum
  misc_feature (1)..(338): Ceres Seq. ID no. 12618200
MGYVTAQLVPPYKDRPNEGTLAIFTEFSPMADPAFEPGRPGEAAIELGRVIDRGLRESRAVDMESLCVVAGKHVWAVRVDLHILDNGGNLIDAANIAALAALSTFRRPECTVGGDDGQQVTVHDPEVMDPLPLTIHHLPIAVTFAYFGDGNIMVIDPTYKEEAVMGGRMTATVNSNGDVCAIQKAGGEGVMSSVIMQCLRIASVKAADITSKIKTKVDKYTTDKALQKVKRTPAIVAKEVNVPDVAMKESMHSAMENQTSKAPNDDQQISEDSPAVANDKKHEDVEPVLIESNPEVKSVSNSGSAGESDEVKESRSPESLVDAVKPKHKRKKKQHGKS

SEQ ID NO: 9723 - DNA, 1470 bp, Triticum aestivum
  misc_feature (1)..(1470): Ceres Seq. ID no. 12618306
tccgtccccagatccgaccacccccctcgcctcgccgccggccccccctccacgcaaccgtactctccggggcccgcgcgccggaatggaggcggcgcgcgccaaggacaccaaggagcgcctggccggggtggagcgcctgcacgaggcgctcgacgcggcggcgcgccgcggcctctccccggccgaggtcacctcgctggtggacacctgcgtggatctgacgcgggacgccaacttccgcgtcgcgcagggggggctgcaggcgctctccgccgccgccgtgctcgccggggaccacttcaagatccacctcaacgcgctcgtccccgccgccgtcgagcgcctcggcgacggcaagcagcccgtccgcgaggccgcgcgccagctcctcgtcacgctcatggaggtttcttcaccaacaatcattctcgaaagggccggaaattatgcatggactcataagagttggagggttcgggaagagtttgtacttacagtggcaactgcagttgggcttttcgcttctacggagcttctcatgcaacgagttttactctcacccgtcctacagttgatgaatgattcgaaccaaagtgtcagagaagctgctatatcttgtattgaggaaatgtacaagaacatgggatctcagttccacgaagagttgcagcgccataatctgcctacatacatgctaaaagaaataaattcaagattgaatagaattgaaccaaaggttcccgcatctgatggtactgcaacacagcataaagttgcagcatctagatccgttagtgttaacccaaaaagaggcagcccacggacaaaaaacacaccgagggaaagcacattatttggaggtaatctgattggtgaagtgcaggattcactggcaaaggaagctgagaaagataaacaaattgcttcggaggaggaggaggaagaagagtatgtcttgctagagttagatgatgttcattattcctgcatacaaccaaatgccccttatatactctctggtttggatacattgactcctaccttggtagtaggtgatagcctgaagatgattggagaatatgaagaaacggttggcccatgctatttattttcagaaagtgatgctccaccaaagcccgttcatgaagagccggcacctcccaaagaaaacaaggacaagcaaggcagaaacatcaaggaggtgaaacatgtgacgagcgttcacaagatgctcaaattccggtcgaccggtgagggtcgtcaggagcacagagcataccgttacagggacaaggagttttgaaacacaatgctttgtctgatgcttgtgatgcacacacacagcatgcaatcctttgacccttcaaatggaatgcaaggatggtagtacttgttaaatcttaattacccactagctagcattctctatctcgaggtgaattttgtgtcctctctttctgaattatc

SEQ ID NO: 9724 - protein, 434 aa, Triticum aestivum
  misc_feature (1)..(434): Ceres Seq. ID no. 12618307
PSPDPTTPLASPPAPPPRNRTLRGPRAGMEAARAKDTKERLAGVERLHEALDAAARRGLSPAEVTSLVDTCVDLTRDANFRVAQGGLQALSAAAVLAGDHFKIHLNALVPAAVERLGDGKQPVREAARQLLVTLMEVSSPTIILERAGNYAWTHKSWRVREEFVLTVATAVGLFASTELLMQRVLLSPVLQLMNDSNQSVREAAISCIEEMYKNMGSQFHEELQRHNLPTYMLKEINSRLNRIEPKVPASDGTATQHKVAASRSVSVNPKRGSPRTKNTPRESTLFGGNLIGEVQDSLAKEAEKDKQIASEEEEEEEYVLLELDDVHYSCIQPNAPYILSGLDTLTPTLVVGDSLKMIGEYEETVGPCYLFSESDAPPKPVHEEPAPPKENKDKQGRNIKEVKHVTSVHKMLKFRSTGEGRQEHRAYRYRDKEF

SEQ ID NO: 9725 - protein, 406 aa, Triticum aestivum
  misc_feature (1)..(406): Ceres Seq. ID no. 12618308
MEAARAKDTKERLAGVERLHEALDAAARRGLSPAEVTSLVDTCVDLTRDANFRVAQGGLQALSAAAVLAGDHFKIHLNALVPAAVERLGDGKQPVREAARQLLVTLMEVSSPTIILERAGNYAWTHKSWRVREEFVLTVATAVGLFASTELLMQRVLLSPVLQLMNDSNQSVREAAISCIEEMYKNMGSQFHEELQRHNLPTYMLKEINSRLNRIEPKVPASDGTATQHKVAASRSVSVNPKRGSPRTKNTPRESTLFGGNLIGEVQDSLAKEAEKDKQIASEEEEEEEYVLLELDDVHYSCIQPNAPYILSGLDTLTPTLVVGDSLKMIGEYEETVGPCYLFSESDAPPKPVHEEPAPPKENKDKQGRNIKEVKHVTSVHKMLKFRSTGEGRQEHRAYRYRDKEF

SEQ ID NO: 9726 - protein, 300 aa, Triticum aestivum
  misc_feature (1)..(300): Ceres Seq. ID no. 12618309
MEVSSPTIILERAGNYAWTHKSWRVREEFVLTVATAVGLFASTELLMQRVLLSPVLQLMNDSNQSVREAAISCIEEMYKNMGSQFHEELQRHNLPTYMLKEINSRLNRIEPKVPASDGTATQHKVAASRSVSVNPKRGSPRTKNTPRESTLFGGNLIGEVQDSLAKEAEKDKQIASEEEEEEEYVLLELDDVHYSCIQPNAPYILSGLDTLTPTLVVGDSLKMIGEYEETVGPCYLFSESDAPPKPVHEEPAPPKENKDKQGRNIKEVKHVTSVHKMLKFRSTGEGRQEHRAYRYRDKEF

SEQ ID NO: 9727 - DNA, 1036 bp, Triticum aestivum
  misc_feature (1)..(1036): Ceres Seq. ID no. 12618436
gaacatcctaaccggaaaattaatcgatgctacacagcaataacgcggcagaagaaagatccagcagaaggcaacaacagccaaagactgaaggagaggggatccggcttccggcgaaatggctgcgctgccgccacctccgccgtcgctggagccggagatcggccccgacggcctcgcccgagactcccccgtcctggcctacactgagaaggtcattgcggaggagcagctgcaactgaagaaatatattcaggaaaattattccaaaattcgggatgttgagaaggagctagagaatctgactctagaagttaaactgacagctggaccaaagaaagcagcactcgagcatttgaggaaaaagattgagatgtcaactgagagaatacgtttggctaaggtgaaagaggacgaggcaaaaaaggcctgggaagctgctgcacaagttgttaaagaggaagaggaggctaagcagaggctatgtgatgatctgaaccggttggttcaagagagcgcggcttcacaatattcgaggttagaagagttaaagaagcgtttagaatgtctaaatcccatcagggcttctgtcgatgtttctggtatcaacattgtacagcaggctgccacaaattcggtacctcagcaacccacttcacaaaatctagcgaatgcaattgcccctgcaagcaatatccacaagcccgccaccagcggatcacagcaacaaagaaccgctgaggcggaaaggaagcagagatcatcaaactcgggaggaagagggagaggcggtgtgatggtcctccccaagggaaggggaagctctggatcaggatggacaggtgctgggtttgagacatgatgctgggatccgtagttatatatacttgaaagaattggcatggttgtcttggtataaaacgatggcttggttgtcttggtataaaacgatggcttggttggaactggaaggttgaaagtgtaatggaatgtcgatcctttttggatgtgttagaagcgtgagagggatttggcg

SEQ ID NO: 9728 - protein, 247 aa, Triticum aestivum
  misc_feature (1)..(247): Ceres Seq. ID no. 12618437
MAALPPPPPSLEPEIGPDGLARDSPVLAYTEKVIAEEQLQLKKYIQENYSKIRDVEKELENLTLEVKLTAGPKKAALEHLRKKIEMSTERIRLAKVKEDEAKKAWEAAAQVVKEEEEAKQRLCDDLNRLVQESAASQYSRLEELKKRLECLNPIRASVDVSGINIVQQAATNSVPQQPTSQNLANAIAPASNIHKPATSGSQQQRTAEAERKQRSSNSGGRGRGGVMVLPKGRGSSGSGWTGAGFET

SEQ ID NO: 9729 - protein, 162 aa, Triticum aestivum
  misc_feature (1)..(162): Ceres Seq. ID no. 12618438
MSTERIRLAKVKEDEAKKAWEAAAQVVKEEEEAKQRLCDDLNRLVQESAASQYSRLEELKKRLECLNPIRASVDVSGINIVQQAATNSVPQQPTSQNLANAIAPASNIHKPATSGSQQQRTAEAERKQRSSNSGGRGRGGVMVLPKGRGSSGSGWTGAGFET

SEQ ID NO: 9730 - DNA, 898 bp, Triticum aestivum
  misc_feature (1)..(898): Ceres Seq. ID no. 12618474
ccgctcccatctattctcccccctcctcccctgaaaccccagctttgcatgggcaggcgcttcccagccgccgccctagccgccgctgtccgcccctacgtccgcttctcccccgccgctagcaaggcagcgaagcccccgaccgctccgctggatactcccaggaacgccggccccggcgccgccgccggggctagctctggacgggccgaggtgcgggatgtggcggcggcatgcgggatgcaggaggacgaccgggtgccgctcgcggaggtggttttggactgcacgaagcggtggttccaggacacgctcaaggaggcgcgcgccggcgacgccgccatgcaggtcctcgtcggccagatgtaccgcagcggctacggcgtcaacaagaacgagcacaagtctagaatttggatggagaaagcatcaagatatcggtctacagtctggaaagttagccataaacgcccaggatacaatgctagtgactcagattcagatgatgttaaggaaacaggcaaataatggatatttccgagttatgggattgttggcaggggcctgcagtgactacaaagccagcaaggcggcacaaactattcaaatatgcagttgtttcaggaagaattatctgtgtccccatttgttagcccgaacggtgttctgttttcatttcctttttaaagtgtgttaaatctgcttgtcatcacaaatgtaaaatttctcggtgtttcaactggacatataacagcatcaacaggatattcatttacacaggtattcgtcatgcattctaattctgggaatgttatgtttcccgagccctcacagaaagttcttctgtcctctgaatgaatatttggctagatgggaaccaagtgatttagtatggctc

SEQ ID NO: 9731 - protein, 175 aa, Triticum aestivum
  misc_feature (1)..(175): Ceres Seq. ID no. 12618475
PLPSILPPPPLKPQLCMGRRFPAAALAAAVRPYVRFSPAASKAAKPPTAPLDTPRNAGPGAAAGASSGRAEVRDVAAACGMQEDDRVPLAEVVLDCTKRWFQDTLKEARAGDAAMQVLVGQMYRSGYGVNKNEHKSRIWMEKASRYRSTVWKVSHKRPGYNASDSDSDDVKETGK

SEQ ID NO: 9732 - protein, 159 aa, Triticum aestivum
  misc_feature (1)..(159): Ceres Seq. ID no. 12618476
MGRRFPAAALAAAVRPYVRFSPAASKAAKPPTAPLDTPRNAGPGAAAGASSGRAEVRDVAAACGMQEDDRVPLAEVVLDCTKRWFQDTLKEARAGDAAMQVLVGQMYRSGYGVNKNEHKSRIWMEKASRYRSTVWKVSHKRPGYNASDSDSDDVKETGK

SEQ ID NO: 9733 - protein, 158 aa, Triticum aestivum
  misc_feature (1)..(158): Ceres Seq. ID no. 12618477
MWRRHAGCRRTTGCRSRRWFWTARSGGSRTRSRRRAPATPPCRSSSARCTAAATASTRTSTSLEFGWRKHQDIGLQSGKLAINAQDTMLVTQIQMMLRKQANNGYFRVMGLLAGACSDYKASKAAQTIQICSCFRKNYLCPHLLARTVFCFHFLFKVC

SEQ ID NO: 9734 - DNA, 963 bp, Triticum aestivum
  misc_feature (1)..(963): Ceres Seq. ID no. 12618538
gcaaccaccgcagagcacgccatcgatcgaatcgagcgaaccgaagccaagaagagtttcctcgttgctagcgccgctaagtagacgtcgacggcgatgggcaagatgaagatgccggccctgttccgccgccgctcctcctccaagtcgcgctccgcgtcgccgccgacgactcctccccgggaggagcagcaggaggagagccggcaggccatcgggtccccggcgcggtcggcggaggaggagatggagcgggtcttccgcaagttcgacgccaacggcgacggccggatctcgcggccggagctggccgccctcttcgagagcctgggccacgcggccaccgaggacgagctgacccgcatgatgttcgaggcggacgcggacggcgacggcttcatcagcctggaggagttcgcggcgctcaacgccacggcgcccggcgacgacgaggaggacctgcggctcgccttcaaggtgttcgacgcggacggcagcggcgacatctcggccgcggagctggcgcacgtgctccacggcctcggcgagaaggccacggtccagcagtgccggcgcatgatcgagggcgtcgacaagaacggcgacggcctcatctccttcgacgagttcaaggtcatgatggccgccggcttcgctgccaagatggcctgatccgtcctccctcttcttggattcaatccgttgtcgtccgcggacagattgatttcgtccacgccttcctcgctccttcctctcgcgtgcggtgcagattaagtgggaattaagtgtacataattcaaggattaaagggcgggcattagagcgtacgtgcgttagtagattctttgtttctttgtcttcttggtggtgccgagtacgtaataaccagaaatctctcgcgaataattgtctcgcgattatctaaagatctgagatataatggaattggtgaggttgccggtt

SEQ ID NO: 9735 - protein, 191 aa, Triticum aestivum
  misc_feature (1)..(191): Ceres Seq. ID no. 12618539
MGKMKMPALFRRRSSSKSRSASPPTTPPREEQQEESRQAIGSPARSAEEEMERVFRKFDANGDGRISRPELAALFESLGHAATEDELTRMMFEADADGDGFISLEEFAALNATAPGDDEEDLRLAFKVFDADGSGDISAAELAHVLHGLGEKATVQQCRRMIEGVDKNGDGLISFDEFKVMMAAGFAAKMA

SEQ ID NO: 9736 - protein, 188 aa, Triticum aestivum
  misc_feature (1)..(188): Ceres Seq. ID no. 12618540
MKMPALFRRRSSSKSRSASPPTTPPREEQQEESRQAIGSPARSAEEEMERVFRKFDANGDGRISRPELAALFESLGHAATEDELTRMMFEADADGDGFISLEEFAALNATAPGDDEEDLRLAFKVFDADGSGDISAAELAHVLHGLGEKATVQQCRRMIEGVDKNGDGLISFDEFKVMMAAGFAAKMA

SEQ ID NO: 9737 - protein, 186 aa, Triticum aestivum
  misc_feature (1)..(186): Ceres Seq. ID no. 12618541
MPALFRRRSSSKSRSASPPTTPPREEQQEESRQAIGSPARSAEEEMERVFRKFDANGDGRISRPELAALFESLGHAATEDELTRMMFEADADGDGFISLEEFAALNATAPGDDEEDLRLAFKVFDADGSGDISAAELAHVLHGLGEKATVQQCRRMIEGVDKNGDGLISFDEFKVMMAAGFAAKMA

SEQ ID NO: 9738 - DNA, 765 bp, Triticum aestivum
  misc_feature (1)..(765): Ceres Seq. ID no. 12618702
ctgtagctcctctgctccatcccgtctactgtctacaccacaccacagtgcgcacaccacacgggggaagcggggcgtagatagggatgtcgtgggaggagcccggcatcccgcagctgagcctgagcggcttcagctccctcgcctccatctccagcaccgccgctccgcccgcccgcctgccctccctctccctcagcatcggcaccggcggggaggaccagcagccgggcgtcagcagcgacgacggccacaagagcgtccgggcgatgaagaaccgggagtcggcgctgcggtccagggccaggaagagagcctacacgcaggagctcgagaaggaggtccgccggctcgtcgaggacaacctcaagctcaagcgacagtgcaaacagcttcagtcggagattgccgcgctcaccgcccagcaggcaagcagcaagcagagcagcccgcaccggagaacttcgtccactcagttctagcaacgctacatcaggacgcacgagggcttaatttccgtcgctagctagcaattgattagtatcaataagatctaaggtgcactggtagttggattttggcttcaattgactcaactgcccgatcgatatgccagcgcgtgggctttacttgcgttggctgatccgttcatctcgtgtgcatttctctgcatgtattgctgcgtgcactggttggcctggatgcccggaccggagcacacgcgacctgcctatgattaattgtgctgcagaataccttcattaa

SEQ ID NO: 9739 - protein, 174 aa, Triticum aestivum
  misc_feature (1)..(174): Ceres Seq. ID no. 12618703
CSSSAPSRLLSTPHHSAHTTRGKRGVDRDVVGGARHPAAEPERLQLPRLHLQHRRSARPPALPLPQHRHRRGGPAAGRQQRRRPQERPGDEEPGVGAAVQGQEESLHAGAREGGPPARRGQPQAQATVQTASVGDCRAHRPAGKQQAEQPAPENFVHSVLATLHQDARGLNFRR

SEQ ID NO: 9740 - protein, 131 aa, Triticum aestivum
  misc_feature (1)..(131): Ceres Seq. ID no. 12618704
MSWEEPGIPQLSLSGFSSLASISSTAAPPARLPSLSLSIGTGGEDQQPGVSSDDGHKSVRAMKNRESALRSRARKRAYTQELEKEVRRLVEDNLKLKRQCKQLQSEIAALTAQQASSKQSSPHRRTSSTQF

SEQ ID NO: 9741 - DNA, 702 bp, Triticum aestivum
  misc_feature (1)..(702): Ceres Seq. ID no. 12619044
aattctatcttcccatccatcttgcggctcgtgccatggcagatcggccgggaagctcgttgccggtcgttcctcgtccggcccggctccggagcggccaagcgtcctactcgtcccgccggcgcgtccatccatccaacgcccagctcctcgtctacctagccctcgccgtcaccttggccgccctcctggtcctcaccggcgtcacgctcaccgtcgcgtcagtcgtgctcgtcgtcctcgtcgtcctcgccccgctcttgctcctcaccagccctctctgggcgccggtggcagtggtggccatcgtctcggggggcgccttgctgtttggctgtagcctcacggtgttcgcgctgagagcgagcacgtgggcgcaccggcgcctgacggggcggcacccggtgggcgcgcgtcgggtgggctacgcccgtgggcgtggccggttcgccggcgcgggtggccacgcgacgggctaccacgggcagggacaagggtacgatcggatgaaggacgccgtgcccggggcctagctggcggcgaacaagcttctccttccgcgcattccgtttggtttggatacgttttacacgctgtgttttagttggaactggttcgttggcgaggtatatactgtgctgatacacgttttcatgtgtgttttgaatgcatttcttgatcctgcgggaatcaactctgctc

SEQ ID NO: 9742 - protein, 176 aa, Triticum aestivum
  misc_feature (1)..(176): Ceres Seq. ID no. 12619045
FYLPIHLAARAMADRPGSSLPVVPRPARLRSGQASYSSRRRVHPSNAQLLVYLALAVTLAALLVLTGVTLTVASVVLVVLVVLAPLLLLTSPLWAPVAVVAIVSGGALLFGCSLTVFALRASTWAHRRLTGRHPVGARRVGYARGRGRFAGAGGHATGYHGQGQGYDRMKDAVPGA

SEQ ID NO: 9743 - protein, 165 aa, Triticum aestivum
  misc_feature (1)..(165): Ceres Seq. ID no. 12619046
MADRPGSSLPVVPRPARLRSGQASYSSRRRVHPSNAQLLVYLALAVTLAALLVLTGVTLTVASVVLVVLVVLAPLLLLTSPLWAPVAVVAIVSGGALLFGCSLTVFALRASTWAHRRLTGRHPVGARRVGYARGRGRFAGAGGHATGYHGQGQGYDRMKDAVPGA

SEQ ID NO: 9744 - protein, 112 aa, Triticum aestivum
  misc_feature (1)..(112): Ceres Seq. ID no. 12619047
ILSSHPSCGSCHGRSAGKLVAGRSSSGPAPERPSVLLVPPARPSIQRPAPRLPSPRRHLGRPPGPHRRHAHRRVSRARRPRRPRPALAPHQPSLGAGGSGGHRLGGRLAVWL

SEQ ID NO: 9745 - DNA, 588 bp, Triticum aestivum
  misc_feature (1)..(588): Ceres Seq. ID no. 12619227
tgattcttctgtcctgcaaagccctcacaatattctcctcgaggctcatgcaccttggtgtgttgactgtgaagccatcagtaaaaacattgagaagttggccaagcatttcagtggtttggacaatcttaaatttgcacgcattgatgcttcggtgaatgaacatccaaaattgcaggtaaacaattaccccacactcttgctttatcctgctgaagacaagaccaacccgatcaaactttcaaagaaattaagcctgaaagacatggcgagattcctcaaggagaagctgcagatttcggacgtcgaaattaaggagaagctccaaactcctaacattgaaacagtagctgccgctgacaatgtcaaggatgagctatagttgattgctcgttcaagcatgctggccgcgttgaaggaaaatgaccatggagcatggccttatagagaaggaaatagagtaggggttggtcacgtttacgcagtagacatctaaaatcaaacatatatgatgatgtaccacatgttgatgtaccacatagcttgttcatgtattatataatgaaaataataaagtcagtaactctg

SEQ ID NO: 9746 - protein, 126 aa, Triticum aestivum
  misc_feature (1)..(126): Ceres Seq. ID no. 12619228
DSSVLQSPHNILLEAHAPWCVDCEAISKNIEKLAKHFSGLDNLKFARIDASVNEHPKLQVNNYPTLLLYPAEDKTNPIKLSKKLSLKDMARFLKEKLQISDVEIKEKLQTPNIETVAAADNVKDEL

SEQ ID NO: 9747 - protein, 38 aa, Triticum aestivum
  misc_feature (1)..(38): Ceres Seq. ID no. 12619229
MARFLKEKLQISDVEIKEKLQTPNIETVAAADNVKDEL

SEQ ID NO: 9748 - DNA, 1016 bp, Triticum aestivum
  misc_feature (1)..(1016): Ceres Seq. ID no. 12619453
ctcccatctcccacttctccgccccctcgccccctccgccgttgacctcgtcggccgccgccgacgaggcctcctgtcgccggatgcccatcctctagacacccgctccgtcacaacctgaaccccgctcctctcccagacgagccgtgtcagcatccgactccaccgatcctccgaaccctagatcccctggcggaaccgaggtccatcccttcgaaatcaatgtatccaacatttgatgttggtgaccggattctcgccgagagggtttcatatattttccgggagccgcaagttttggacattgtgatcttccgtgcacccctagtccttcaggcattgggctacagctcaagtgatgtgttcatcaagagggttgtggccaagggcggggacatcgttgaagtgactgatggtcaattattagttaatggagtcgtccaagatgaggactttgtgctcgagccacccgattatgaaatggacccggtgagtgtgcctgaaggctacgtgtttgtgctgggggacaacagaaacaacagcttcgattcccataactggggaccgctacccgtgaagaacattcttgggagatctgtgcttcgatactggccaccatcgaaaataacagacacaatttatgatcacattgaccatgatgtggttcatggcatggcaggcatctcctgagatgcacagttgattcggcaatgctaaaccaacccaatttttttttgctgatgatctctgctgcattttttttctcctctagctatttatttgattgatgtcgccttgcacgtaatgcctggctgactcagtttttcccctgccctaccagcagatgcttgtttagaggcaacaattcttgtactgtaaccaaaggtctggctcgcctgtcgaatgagcatccatggcagcgcatggaaattttgttatgtttggcacaaggagagttggttgatctgtttcagatcttaatgtataagaagcagaaagcatatgccatattgtcc

SEQ ID NO: 9749 - protein, 155 aa, Triticum aestivum
  misc_feature (1)..(155): Ceres Seq. ID no. 12619454
MYPTFDVGDRILAERVSYIFREPQVLDIVIFRAPLVLQALGYSSSDVFIKRVVAKGGDIVEVTDGQLLVNGVVQDEDFVLEPPDYEMDPVSVPEGYVFVLGDNRNNSFDSHNWGPLPVKNILGRSVLRYWPPSKITDTIYDHIDHDVVHGMAGIS

SEQ ID NO: 9750 - DNA, 874 bp, Triticum aestivum
  misc_feature (1)..(874): Ceres Seq. ID no. 12619532
tgacatacaagaggtggaggaggtgaagagtcagtacacttcctttgaaatagcaagaggaagagacctagggatcaacaggctcgagatatcaacagcaaccctggagcctcagcagttatggaccaaaaatgtccttgagaagctcgccaccgatgctcagggtctgctaatcatccaagcaagcatcgaggaagtgaagcagaaaatcgagggaacttccaagggcaaatctcccatgagctcagagtacagcagcatcagggctcagctgcaggagatcgagggctctgtcttggaacagataggtttcaacagcagtttgacaaagaaggccgagaattatcctgcattcgaggtgaatgccgacctagagggctattccagcagaaggaagatctccgagcaggtgcagaaagggtcggagaaggtggcgaggctggacctcgagctccagaagatacagtacgtgctgctgaagctcgaggaagagcatgagttcaagagggtcaaggtctccgagaagcggtcgcggctgctcttgagggactacgtgtacgcaaagaaggacaagaatgacgccgggcagaagaagaagagtagggtgcccttctgcggctgtgtgcgccccaaaacagtgactgagtcttgattcggagtccgcagcaagcaatgtctttagtatctcttctgtaatgggttgcatgataatgttaacaaggagctcatgcattcggagttttgtccttgttcagaaatgccccctagtttaactagttaatcctactgatacttttatgaatcgaagcattttgtaattccgttgcccttcgctgtttctctgtgtctgcaatgaagatatatgagaatcttc

SEQ ID NO: 9751 - protein, 216 aa, Triticum aestivum
  misc_feature (1)..(216): Ceres Seq. ID no. 12619533
DIQEVEEVKSQYTSFEIARGRDLGINRLEISTATLEPQQLWTKNVLEKLATDAQGLLIIQASIEEVKQKIEGTSKGKSPMSSEYSSIRAQLQEIEGSVLEQIGFNSSLTKKAENYPAFEVNADLEGYSSRRKISEQVQKGSEKVARLDLELQKIQYVLLKLEEEHEFKRVKVSEKRSRLLLRDYVYAKKDKNDAGQKKKSRVPFCGCVRPKTVTES

SEQ ID NO: 9752 - protein, 137 aa, Triticum aestivum
  misc_feature (1)..(137): Ceres Seq. ID no. 12619534
MSSEYSSIRAQLQEIEGSVLEQIGFNSSLTKKAENYPAFEVNADLEGYSSRRKISEQVQKGSEKVARLDLELQKIQYVLLKLEEEHEFKRVKVSEKRSRLLLRDYVYAKKDKNDAGQKKKSRVPFCGCVRPKTVTES

SEQ ID NO: 9753 - DNA, 698 bp, Triticum aestivum
  misc_feature (1)..(698): Ceres Seq. ID no. 12621228
tttttttcagcgtccacaccgttccctttgtccggtggagtgccgcggcgaggggctgtgggaggagatggccttcgcgtcgtggctagtggcgccgcctcctgccgcgagggcagggtggaggcccgcgagggcggcccctcgccggctcgtcctggcggcatccagccgaggcggcggcccggccccggccccgccgacgttcgacaggctgcgggagcagctcctccaactccacgccgaagccgacctcacccagtccaaagcaaacagtgctcgggtgaggcttatgcggttgaccgaggccgctgagaatcttaagaagagagccgtagtcagtgtccggatgggcagagagaatgaggcagtggaattacttgtgcagaagaagaagttgaccaatgctttggagaacataaaggagcgcattgagctgcttgacaagctttccgcaaagattagtgagctatggagaccgcttagcaagcggcgcgatcgggacgtcattgacaacatcatcacgggtctccgctcctcggcctcagcacttgctcctccgccaccaccaccccctcctgagcccgattagacgtacttttcttttctttggggcttgtcttgctgtgcccccagcgatgatttgagacttgtttgtactttgaacatgacttgttggatgcttggtgttggtgctttat

SEQ ID NO: 9754 - protein, 195 aa, Triticum aestivum
  misc_feature (1)..(195): Ceres Seq. ID no. 12621229
FFQRPHRSLCPVECRGEGLWEEMAFASWLVAPPPAARAGWRPARAAPRRLVLAASSRGGGPAPAPPTFDRLREQLLQLHAEADLTQSKANSARVRLMRLTEAAENLKKRAVVSVRMGRENEAVELLVQKKKLTNALENIKERIELLDKLSAKISELWRPLSKRRDRDVIDNIITGLRSSASALAPPPPPPPPEPD

SEQ ID NO: 9755 - protein, 173 aa, Triticum aestivum
  misc_feature (1)..(173): Ceres Seq. ID no. 12621230
MAFASWLVAPPPAARAGWRPARAAPRRLVLAASSRGGGPAPAPPTFDRLREQLLQLHAEADLTQSKANSARVRLMRLTEAAENLKKRAVVSVRMGRENEAVELLVQKKKLTNALENIKERIELLDKLSAKISELWRPLSKRRDRDVIDNIITGLRSSASALAPPPPPPPPEPD

SEQ ID NO: 9756 - protein, 103 aa, Triticum aestivum
  misc_feature (1)..(103): Ceres Seq. ID no. 12621231
FFSASTPFPLSGGVPRRGAVGGDGLRVVASGAASCREGRVEAREGGPSPARPGGIQPRRRPGPGPADVRQAAGAAPPTPRRSRPHPVQSKQCSGEAYAVDRGR

SEQ ID NO: 9757 - DNA, 837 bp, Triticum aestivum
  misc_feature (1)..(837): Ceres Seq. ID no. 12621257
cattgccctccacgagccacaggttgacgctggcccggattctgttcggtggcgcctagagccgtcgggacaattctccaccaagttcctctaccgggctatcgccccctcctccgccccacctcccctcacggcggtttggcatgtccgccttcccctgaagatctgaatcttcatgtggcaatggatccgcggacggattccgtctggcgtagaggtccgcaagcgcaatggccccggtaccggcctttacccgctttgtggcgtccctgaagactcgaatcacatcttcttcacttgcttttccgcccaatttctttggggctgttttcgtgaggtggttggtggcaactggtgccacaccaatttccccgacatgttcgctgaactccaggcctcctccccgcattctcgccacattaggtggttggagattgggactcttgcttggaccctctggacgatccgcaatagatttgtgatctagcgcattccgcttcagcgtgctactgacgctctcttcaaactgtctggttacttgcagctctggcagccgcttagccgccccaggatcgggacgccatctctgccttcatcgccgacctccgctcgatggtcgtccacttatcgccgccgctccctccgccacctcccgagccggattaggggtcgggtccctccccggccccattttgtgtttattttgggcttgttgaggtgtgccctcagcaaaaccttttgtactctgtcttgtgagacttgtgtgtgtgtggtgtgaaccttcttgtgtactggtgctatgtggcggtttgctttatttataaagcagggcgaaag

SEQ ID NO: 9758 - protein, 103 aa, Triticum aestivum
  misc_feature (1)..(103): Ceres Seq. ID no. 12621258
MWQWIRGRIPSGVEVRKRNGPGTGLYPLCGVPEDSNHIFFTCFSAQFLWGCFREVVGGNWCHTNFPDMFAELQASSPHSRHIRWLEIGTLAWTLWTIRNRFVI

SEQ ID NO: 9759 - protein, 83 aa, Triticum aestivum
  misc_feature (1)..(83): Ceres Seq. ID no. 12621259
MAPVPAFTRFVASLKTRITSSSLAFPPNFFGAVFVRWLVATGATPISPTCSLNSRPPPRILATLGGWRLGLLLGPSGRSAIDL

SEQ ID NO: 9760 - protein, 55 aa, Triticum aestivum
  misc_feature (1)..(55): Ceres Seq. ID no. 12621260
IALHEPQVDAGPDSVRWRLEPSGQFSTKFLYRAIAPSSAPPPLTAVWHVRLPLKI

SEQ ID NO: 9761 - DNA, 765 bp, Triticum aestivum
  misc_feature (1)..(765): Ceres Seq. ID no. 12621445
atggacatgagagccgtgtatggaggttttgctgcagcactgagggaccaaaaagtctgggttatgaatatcgtgccaatcgattcacctgacacactgccaattgtttatgagcgtggcttgtttggaatgtatcatgactggtgcgaatctttcagcacttacccgagaacatatgatctcctacatgcagaccatctgttctcaaagctcaaaaagagatgtaaattgttgggagtgtttgccgaggttgaccggatattgcggccagaaggcaaactgatcgtgagggacaacgcggagacaataagcgagctcgaaggcatggcgaagtccctgcagtgggaggtgcgcatgacctacgccaaggacaaggaagggctgctctgcgtccaaaagaccacgtggcggcccaaggagatcgaagcaagcatgtagtgaaatatacattcgacgcaaaactgttcccggttagtgggcacgtattacactagactgaattttggctctagatataagcatatgattcttgttgatgctgaaaaaggcaaaagcattgtgcagctgtagaatcatgtatgtgtttttttttccgcgccaagcgagggcggccttgcattctttcttttgcttggacaacatttgttgtaaaatgaatgtaatgctgtactggaagccaataggtagaaccacggcacggagggtggtatctgttcttaaggaaaacctcacttctggtaatgctatagcagtcgagtatccttg

SEQ ID NO: 9762 - protein, 145 aa, Triticum aestivum
  misc_feature (1)..(145): Ceres Seq. ID no. 12621446
MDMRAVYGGFAAALRDQKVWVMNIVPIDSPDTLPIVYERGLFGMYHDWCESFSTYPRTYDLLHADHLFSKLKKRCKLLGVFAEVDRILRPEGKLIVRDNAETISELEGMAKSLQWEVRMTYAKDKEGLLCVQKTTWRPKEIEASM

SEQ ID NO: 9763 - protein, 143 aa, Triticum aestivum
  misc_feature (1)..(143): Ceres Seq. ID no. 12621447
MRAVYGGFAAALRDQKVWVMNIVPIDSPDTLPIVYERGLFGMYHDWCESFSTYPRTYDLLHADHLFSKLKKRCKLLGVFAEVDRILRPEGKLIVRDNAETISELEGMAKSLQWEVRMTYAKDKEGLLCVQKTTWRPKEIEASM

SEQ ID NO: 9764 - protein, 124 aa, Triticum aestivum
  misc_feature (1)..(124): Ceres Seq. ID no. 12621448
MNIVPIDSPDTLPIVYERGLFGMYHDWCESFSTYPRTYDLLHADHLFSKLKKRCKLLGVFAEVDRILRPEGKLIVRDNAETISELEGMAKSLQWEVRMTYAKDKEGLLCVQKTTWRPKEIEASM

SEQ ID NO: 9765 - DNA, 422 bp, Triticum aestivum
  misc_feature (1)..(422): Ceres Seq. ID no. 12621836
agaaattagggttcatatctcatttcctctgatttcatctcagatttcgccttcgttcgtatcgaagaagaagaagatggggaaacagattgtgccggtgaaatcagtgatctacgcgctctcccctttccagcagaagataatgccgggtctctggaaggacttgcccacaaagattcaccacaaggtctccgagaattggatcagcgccactctcttgcttggtcccctcgtcggaacctacacgtatgttcagaactacctggaaaaggagaagctgtctcacaggtactgaactcatgcaagagctgattggataaccttctagtttgttgccttgatcttgtttagccacccaataatgtgacactgttgaaacttgctctaccgtttggttttgagatgtctgagtttgagctttt

SEQ ID NO: 9766 - protein, 97 aa, Triticum aestivum
  misc_feature (1)..(97): Ceres Seq. ID no. 12621837
EIRVHISFPLISSQISPSFVSKKKKMGKQIVPVKSVIYALSPFQQKIMPGLWKDLPTKIHHKVSENWISATLLLGPLVGTYTYVQNYLEKEKLSHRY

SEQ ID NO: 9767 - protein, 72 aa, Triticum aestivum
  misc_feature (1)..(72): Ceres Seq. ID no. 12621838
MGKQIVPVKSVIYALSPFQQKIMPGLWKDLPTKIHHKVSENWISATLLLGPLVGTYTYVQNYLEKEKLSHRY

SEQ ID NO: 9768 - protein, 50 aa, Triticum aestivum
  misc_feature (1)..(50): Ceres Seq. ID no. 12621839
MPGLWKDLPTKIHHKVSENWISATLLLGPLVGTYTYVQNYLEKEKLSHRY

SEQ ID NO: 9769 - DNA, 652 bp, Triticum aestivum
  misc_feature (1)..(652): Ceres Seq. ID no. 12622319
atccatcatcacctcctctacccagccagacctgtcccgagccaatcatacagtgcggcgcgtgcgactgcgagcagagcttctagcagagaagggagggagtgagcgggatgctggaagggaaggcgacggtggaggacaccgacatgccggccaagatgcagctgcaggccacctcggcggcgtccagggcgctcgaccgcttcgacgtcctcgactgccggagcatcgcggcgcacatcaagaaggagttcgacacgatctatggcccggggtggcagtgcgtggtgggctgcagcttcggctgctacttcacgcacagcaaggggagcttcatatacttcaagctcgagtcgctcaggttcctcgtgttcaaaggcatggcggatgagcagccactgccgtgctgatctgctgcgcccctgttttaacggccgtgtggactactcgatgattacggggcggcagttactgcctactagtctgaaacagttccgtgaaatgcaccaatatgatatgctgtaacttgattcagcttttgcaccgcaattcgcgagtgtggtctgaaactctgaatgcgttgaatggtgtggaaatgatcttcaaacatgatgttccactttgattcagatgaatacagataggttaattc

SEQ ID NO: 9770 - protein, 129 aa, Triticum aestivum
  misc_feature (1)..(129): Ceres Seq. ID no. 12622320
SIITSSTQPDLSRANHTVRRVRLRAELLAEKGGSERDAGREGDGGGHRHAGQDAAAGHLGGVQGARPLRRPRLPEHRGAHQEGVRHDLWPGVAVRGGLQLRLLLHAQQGELHILQARVAQVPRVQRHGG

SEQ ID NO: 9771 - protein, 99 aa, Triticum aestivum
  misc_feature (1)..(99): Ceres Seq. ID no. 12622321
MLEGKATVEDTDMPAKMQLQATSAASRALDRFDVLDCRSIAAHIKKEFDTIYGPGWQCVVGCSFGCYFTHSKGSFIYFKLESLRFLVFKGMADEQPLPC

SEQ ID NO: 9772 - protein, 87 aa, Triticum aestivum
  misc_feature (1)..(87): Ceres Seq. ID no. 12622322
MPAKMQLQATSAASRALDRFDVLDCRSIAAHIKKEFDTIYGPGWQCVVGCSFGCYFTHSKGSFIYFKLESLRFLVFKGMADEQPLPC

SEQ ID NO: 9773 - DNA, 738 bp, Triticum aestivum
  misc_feature (1)..(738): Ceres Seq. ID no. 12622778
gatttttcattatgtagtttattctttttcgtgctaatggggcatgttttaatttctatgcagttacaggcgcattgtagaatacaaaacagcttactattcattctatttgccggtcggttgtgcactgctgttgtccggtgggagtttggatgattatgttcaagtgaagcatatcctagttgaaatgggtatttacttccaaattcaggacgattatcttgactgttttggtgatccagaagttatgggcaagattggaactgatatcgaagacttcaagtgctcttggctgtttgttcaagcactagtgcgtgtcgatgagaggcaaaaagacatcttatttgaaaattacgggaaatcagatcctgcttgtgttgcaaaagtgaaggcgctgtataaagagctcaatctggaggcggtgttctctgagtacgaaagggagatttacgaaaagctgatctcagacatcgaagcgcagccgaatgaagctgtgcaggcagtgttgaaatcgtttttgcataaaatctacagaaggatgaagtaggaatgttcttgcgtacaaagagattgttgggtggaatgagttctttggtgtcggcgcatgcaagatgaatagtagtattaaatacttatgaataagcagtatgactgatcatattgaatagtcagagtttttgctttatattcgcgaacaacaaagcatttccatgcaaaagaacagaatataagaaattt

SEQ ID NO: 9774 - protein, 119 aa, Triticum aestivum
  misc_feature (1)..(119): Ceres Seq. ID no. 12622779
MGIYFQIQDDYLDCFGDPEVMGKIGTDIEDFKCSWLFVQALVRVDERQKDILFENYGKSDPACVAKVKALYKELNLEAVFSEYEREIYEKLISDIEAQPNEAVQAVLKSFLHKIYRRMK

SEQ ID NO: 9775 - protein, 99 aa, Triticum aestivum
  misc_feature (1)..(99): Ceres Seq. ID no. 12622780
MGKIGTDIEDFKCSWLFVQALVRVDERQKDILFENYGKSDPACVAKVKALYKELNLEAVFSEYEREIYEKLISDIEAQPNEAVQAVLKSFLHKIYRRMK

SEQ ID NO: 9776 - DNA, 627 bp, Triticum aestivum
  misc_feature (1)..(627): Ceres Seq. ID no. 12623242
acaaaaccatcacagctagtactagacaccgagacagcccttggaagatcgatcagtagctaccaaaaccaatttcgattttagcctcgcttgaacgcggacattttccgagtttctatttctcattgatagggagcatctgccaaaccagcagcacgcaaaatgaagcaaagattgtcatccaattgagcatgtcgtgcgacaaacgccggtcgaaagcactgacgctggcctccagagcagccggggtgacgtcgatgggcataaccggcgacgccagggaccagctggaggtggtcggtgacggcgtcgacccggtgtgcctcgtcagctgcctccgcaagaaactcggccacgcccacatcatcaaggtagaggaagtgaagaagccggaggagaagaagaagccggtgaaccccccgcagtactactactcgccggcgccggccggctactaccaccaccaatacccgccgcacatggtcgtctgcgaggaacagcctagcaactgccggaccatgtaactgccagagaacgattttgacgtagtactttaattttgtcagcaactatagttgcatacatgtacttgtaaattaattggaggaagaaataaaaaggagaaag

SEQ ID NO: 9777 - protein, 110 aa, Triticum aestivum
  misc_feature (1)..(110): Ceres Seq. ID no. 12623243
MSCDKRRSKALTLASRAAGVTSMGITGDARDQLEVVGDGVDPVCLVSCLRKKLGHAHIIKVEEVKKPEEKKKPVNPPQYYYSPAPAGYYHHQYPPHMVVCEEQPSNCRTM

SEQ ID NO: 9778 - protein, 88 aa, Triticum aestivum
  misc_feature (1)..(88): Ceres Seq. ID no. 12623244
MGITGDARDQLEVVGDGVDPVCLVSCLRKKLGHAHIIKVEEVKKPEEKKKPVNPPQYYYSPAPAGYYHHQYPPHMVVCEEQPSNCRTM

SEQ ID NO: 9779 - DNA, 1028 bp, Triticum aestivum
  misc_feature (1)..(1028): Ceres Seq. ID no. 12623490
gcaggccgtcgctagctatcatccaaagaccaacgagtacgccaacatgtgaagtgcaccgagctgagcagtgagtgagcggccggggacgcggtcgacgagccaagaatggcgacgcaccatcgtgctctcctcctcctgctcgccgtgctgctccccgcggccgccttcgccgacccggacgccgtgcaggacttctgcgtgccggaccccgggcgcggccggccggtggagctcaacctcatccgctcctacccgtgcaggaaccccgcgaacctcaccgcgggcgacttcgccttctcaggcgtgcgcgcggcgggcaacttctcggcggacacggggttcgcgggggtgtccgtcacgccggcgcagttcccgggcctgcacaccctcggcatgtccttcgcgcgcgccgacctctcggcggccggcggcgtcaacccgccccactaccacccgcgcgccaccgagacggcgctagtgctcgccggccgcgtctacgccggcttcgtcgacaccgccggccgcctcttcgccaaggtgctcgtggagggggaggtcatggtgttcccccgcggcatggtgcacttccagctcaacgtcggcgaccagcccgccaccgtctacggcaccttcaacagcgagaaccccgggatcgtgcgcgtcccggccaccgtgttcgggtccgggatcagggacgccgtcctcgagagggccttcgggctctcccccgaggagctccggcggatcgagaagaggttcggcgtgcccaagaaggccgagctggaggactagttaattagtttattactacttcgttcgttgctggccggccatggccgcatgcgcatgattagttgacaggtagacttgtgggttgggagtatgggcaatacttatctctttccatttgattaatataatatacttgtggatttatagtggtggttggtagggctcatccgcgtaatgatacgaaaagtgtaaggtatacaaatgattgcgagtatattatactctctgttttt

SEQ ID NO: 9780 - protein, 228 aa, Triticum aestivum
  misc_feature (1)..(228): Ceres Seq. ID no. 12623491
MATHHRALLLLLAVLLPAAAFADPDAVQDFCVPDPGRGRPVELNLIRSYPCRNPANLTAGDFAFSGVRAAGNFSADTGFAGVSVTPAQFPGLHTLGMSFARADLSAAGGVNPPHYHPRATETALVLAGRVYAGFVDTAGRLFAKVLVEGEVMVFPRGMVHFQLNVGDQPATVYGTFNSENPGIVRVPATVFGSGIRDAVLERAFGLSPEELRRIEKRFGVPKKAELED

SEQ ID NO: 9781 - protein, 132 aa, Triticum aestivum
  misc_feature (1)..(132): Ceres Seq. ID no. 12623492
MSFARADLSAAGGVNPPHYHPRATETALVLAGRVYAGFVDTAGRLFAKVLVEGEVMVFPRGMVHFQLNVGDQPATVYGTFNSENPGIVRVPATVFGSGIRDAVLERAFGLSPEELRRIEKRFGVPKKAELED

SEQ ID NO: 9782 - DNA, 810 bp, Triticum aestivum
  misc_feature (1)..(810): Ceres Seq. ID no. 12623629
cgaaaaatcacactccttccactgtccccaggtcctacaatcacagagcaggcgaacgaaccagagggtgagcccagctgcaaccgtgggggcgaggagagatcagaccggcgagtcctgtagcagggagctaaggggcatggcggactgggcgccggtgttcatcggcctggtgctcttcatcctcctctcgccggggctgctcttccagatccccggcaagggcaggatggtggagttcggcaacttccagaccagcggcatctccatactcgtccacgccgtcatctacttcgccctcatcgccatcctcatcctcgccgtcaacgtccacgtcttcctcggctgaccagcagacgccgctacctgctacctcctcatcgctcaacagttaggtatcgtggtcgtggaggatcgagaggaatacccagtcactgtcgcgttcatcttcaggcttcctgatggtttagcttctaggagcgcagggagaggcgcagtatgatgtccattgggcaatttagttgatgatttgatattttatcaggaatgtatagctccaacttctatgtgcgctgtttcgtctgatggtaactgagaatcaattgcaacctgannaaaaaaaaaaaaaaaaaaaaaaaaaaaaaaaaaaaaaaaaaaaaaaaaaaaaaaaaaaaaaaaaaaaaaaaaaaaaatttaaaaaaaaaaaaaaaaggttttcccacccccccccccccgggggggggcccggacccccatccccccaaaggggggcccaaaaccccccccccccgggcccgcgtttaaccaccc

SEQ ID NO: 9783 - protein, 115 aa, Triticum aestivum
  misc_feature (1)..(115): Ceres Seq. ID no. 12623630
EKSHSFHCPQVLQSQSRRTNQRVSPAATVGARRDQTGESCSRELRGMADWAPVFIGLVLFILLSPGLLFQIPGKGRMVEFGNFQTSGISILVHAVIYFALIAILILAVNVHVFLG

SEQ ID NO: 9784 - protein, 75 aa, Triticum aestivum
  misc_feature (1)..(75): Ceres Seq. ID no. 12623631
  misc_feature (10)..(10): Xaa is any aa, unknown or other
  misc_feature (11)..(11): Xaa is any aa, unknown or other
MVTENQLQPXXKKKKKKKKKKKKKKKKKKKKKKKKKFKKKKKRFSHPPPPGGGPGPPSPQRGAQNPPPPGPRLTT

SEQ ID NO: 9785 - protein, 69 aa, Triticum aestivum
  misc_feature (1)..(69): Ceres Seq. ID no. 12623632
MADWAPVFIGLVLFILLSPGLLFQIPGKGRMVEFGNFQTSGISILVHAVIYFALIAILILAVNVHVFLG

SEQ ID NO: 9786 - DNA, 984 bp, Triticum aestivum
  misc_feature (1)..(984): Ceres Seq. ID no. 12623915
aatcaaaaaaaaaactttcaaatccctagaaagatgtcgacggaggaagaaaccaaggtggttgtcgagtcaggagacgccgaagcgacggtgacggagaagaagcctgctgcgaaaggcggcgctaaagctaagaagacgccggcgaagaagaagcctgctgctgctccgaggaagagaaccacttcgtctcaccctccttacgaagagatgatcaaagacgcgatcgtgacgctgaaggagagaaccggatctagccaatacgcgattcagaagttcatcgaggagaagcagaagtcgcttcctccaactttcaggaagcttctcctcgtcaatctcaggagactcgtcgcttccgggaagctagtcaaagtcaaagcctctttcaagattccgtctgcggctaaaccggcggctacgactaaaccggttaacaagaaaccagctgctgctgttactaaaccgaagggtaaagctcctgctaaggccaaaccggctgctaaaggagccaagaaacctgctgctgctgctaagcctaaggcaaagacaacagcaacaactaaagccgctgcgaagcccaaacctaagacgaagagtgtagctgctgtttcgaagaccaaggcggttgctgcgaagcctaaggcgaaggagagacctgctaaagcgtcgaggacttcgactaggacgtctccagggaagaaggcagcagctccggctaagaaagctgctgctgctgcgactaagaaggctccggctaagagtgtgaaggttaaatctccagcgaagagggcttcgacgaggaagaagtgattggttttagcttctcttagggttaaagtctttgtataattgaatcgtctatgaagggggcttgttttttcttcttccaaagtttatctttgtcttggtttcttctcgaaacccttttatcttgtaatttttggtttgtttgaaaattcaatagctatatgtgatggggtttgc

SEQ ID NO: 9787 - protein, 269 aa, Triticum aestivum
  misc_feature (1)..(269): Ceres Seq. ID no. 12623916
NQKKNFQIPRKMSTEEETKVVVESGDAEATVTEKKPAAKGGAKAKKTPAKKKPAAAPRKRTTSSHPPYEEMIKDAIVTLKERTGSSQYAIQKFIEEKQKSLPPTFRKLLLVNLRRLVASGKLVKVKASFKIPSAAKPAATTKPVNKKPAAAVTKPKGKAPAKAKPAAKGAKKPAAAAKPKAKTTATTKAAAKPKPKTKSVAAVSKTKAVAAKPKAKERPAKASRTSTRTSPGKKAAAPAKKAAAAATKKAPAKSVKVKSPAKRASTRKK

SEQ ID NO: 9788 - protein, 258 aa, Triticum aestivum
  misc_feature (1)..(258): Ceres Seq. ID no. 12623917
MSTEEETKVVVESGDAEATVTEKKPAAKGGAKAKKTPAKKKPAAAPRKRTTSSHPPYEEMIKDAIVTLKERTGSSQYAIQKFIEEKQKSLPPTFRKLLLVNLRRLVASGKLVKVKASFKIPSAAKPAATTKPVNKKPAAAVTKPKGKAPAKAKPAAKGAKKPAAAAKPKAKTTATTKAAAKPKPKTKSVAAVSKTKAVAAKPKAKERPAKASRTSTRTSPGKKAAAPAKKAAAAATKKAPAKSVKVKSPAKRASTRKK

SEQ ID NO: 9789 - protein, 199 aa, Triticum aestivum
  misc_feature (1)..(199): Ceres Seq. ID no. 12623918
MIKDAIVTLKERTGSSQYAIQKFIEEKQKSLPPTFRKLLLVNLRRLVASGKLVKVKASFKIPSAAKPAATTKPVNKKPAAAVTKPKGKAPAKAKPAAKGAKKPAAAAKPKAKTTATTKAAAKPKPKTKSVAAVSKTKAVAAKPKAKERPAKASRTSTRTSPGKKAAAPAKKAAAAATKKAPAKSVKVKSPAKRASTRKK

SEQ ID NO: 9790 - DNA, 569 bp, Triticum aestivum
  misc_feature (1)..(569): Ceres Seq. ID no. 12623930
atcaccactccccactgcctttgccgagaagaagagatcattggccagagcgagagttcaccgttcaacaacaccccttcactaaaccttgctcgcttccaacgatcatccatcgccacgccacgcacagggagagagagtgcgtgtgttgaagagaagatgaagcttgccgggagccagaggagtggaggcggcttgagcaggaccttgaaggagcacagggccaggctctacatcatcaagcgctgcgtcgtcatgctcctgcggtggcacgactgactgactccctccctccttccgttccatggatggtgtctgaactctgaagcgaagatttcttttctgattttgggtctgtgattcgatcgtgccgtgccagaatggcgtcggccggcacagattgtactgtacatacgaaaaaggcctaattgtagaagtagaagtagcagcaaagcaataggattaggatatatgtagtgttcgttgattcaccgctttctgtcccagcattgtactgttcttgcatcactgcagaatactggaggaatccaacatcagctgaaattaag

SEQ ID NO: 9791 - protein, 92 aa, Triticum aestivum
  misc_feature (1)..(92): Ceres Seq. ID no. 12623931
ITTPHCLCREEEIIGQSESSPFNNTPSLNLARFQRSSIATPRTGRESACVEEKMKLAGSQRSGGGLSRTLKEHRARLYIIKRCVVMLLRWHD

SEQ ID NO: 9792 - protein, 49 aa, Triticum aestivum
  misc_feature (1)..(49): Ceres Seq. ID no. 12623932
HHSPLPLPRRRDHWPEREFTVQQHPFTKPCSLPTIIHRHATHRERECVC

SEQ ID NO: 9793 - protein, 39 aa, Triticum aestivum
  misc_feature (1)..(39): Ceres Seq. ID no. 12623933
MKLAGSQRSGGGLSRTLKEHRARLYIIKRCVVMLLRWHD

SEQ ID NO: 9794 - DNA, 647 bp, Triticum aestivum
  misc_feature (1)..(647): Ceres Seq. ID no. 12624098
ctcagttaatgacacgtgtcattcggtccgtggcttgtcactttgcttcctcaatcgtcaagctacaacgtaaagagaccggcgaggccacccacaacttgtgaatctgaaaatggaatcaaaagctttcgtatctgttacgttcttgatcgtaaccctcctcctctgtcgaacaattcaatcaagaagttgcagatcagatgagaaaaccacggagaagacgatgattttaggaggcgttcatgatctccgaggaaaccaaaacagtggagagatcgagaatctcgctcgattcgctattcaacaacataacaaccgaaagaacaaggttcttgagttcaagaagattgtaaaggcaagagaacaggtagttgctggaaccatgtactacttaactcttgaagcaaacgaaggtggccaggccaagaacttcgaagccaaagtttgggtgaagccatggatgaacttcaagcagttacaagagtttaaagaatcttcttcttgaacatttcacttgttcaaaagggtaatctaaatgtttctgctaaattatatgaaataaataaggctgagatagctttgtttcagaccagtgtgtgtaatactaaaccagaagttaatgtaatcaaggaacctgttatggcttt

SEQ ID NO: 9795 - protein, 130 aa, Triticum aestivum
  misc_feature (1)..(130): Ceres Seq. ID no. 12624099
MESKAFVSVTFLIVTLLLCRTIQSRSCRSDEKTTEKTMILGGVHDLRGNQNSGEIENLARFAIQQHNNRKNKVLEFKKIVKAREQVVAGTMYYLTLEANEGGQAKNFEAKVWVKPWMNFKQLQEFKESSS

SEQ ID NO: 9796 - protein, 93 aa, Triticum aestivum
  misc_feature (1)..(93): Ceres Seq. ID no. 12624100
MILGGVHDLRGNQNSGEIENLARFAIQQHNNRKNKVLEFKKIVKAREQVVAGTMYYLTLEANEGGQAKNFEAKVWVKPWMNFKQLQEFKESSS

SEQ ID NO: 9797 - DNA, 604 bp, Triticum aestivum
  misc_feature (1)..(604): Ceres Seq. ID no. 12624112
aatcaaggctcatagaacgaactctctcatacacttgaatcttctttataaattttgcttctttggataattaaccatgtcacaacaagcattcaatgctggccaaaccaagggccaagctcgcgagaaggccgagcagtggactgagtctgccaagcagactgcacaatcagcacgtgataagactgcagaggtggcacaatcagcacatgacaaggcaattgatgttacacattcggcacaaaacaagtctgctgataaatctcattccaccagagaatccgcccaacatggccaagaacaaaccactggttttctcggccagacaggagaatctgtgaagaacatggctcaaggtgctttagatggtgttaagaacagtcttggcatgaatgagaagaaatgaatattttacgtttcaactattatatttatttacatatttaaatgttatttctgatgtttagcaatttctattttctctaaattatgtttgtaataattattctgtttttgaaagattttgtgatcataaaaactgagatgtaataatgtggtgtaacatacacactataattttcattttaaaggaatgaaacaaatt

SEQ ID NO: 9798 - protein, 109 aa, Triticum aestivum
  misc_feature (1)..(109): Ceres Seq. ID no. 12624113
MSQQAFNAGQTKGQAREKAEQWTESAKQTAQSARDKTAEVAQSAHDKAIDVTHSAQNKSADKSHSTRESAQHGQEQTTGFLGQTGESVKNMAQGALDGVKNSLGMNEKK

SEQ ID NO: 9799 - protein, 81 aa, Triticum aestivum
  misc_feature (1)..(81): Ceres Seq. ID no. 12624114
MLAKPRAKLARRPSSGLSLPSRLHNQHVIRLQRWHNQHMTRQLMLHIRHKTSLLINLIPPENPPNMAKNKPLVFSARQENL

SEQ ID NO: 9800 - DNA, 851 bp, Triticum aestivum
  misc_feature (1)..(851): Ceres Seq. ID no. 12624185
acaggcaagcttagtaaccagccatgaagaccatgaagagatgcattattcctagcatcctgctgatgcattcactcgaggccgtcctcctcgtcgccgccggccgcccttccacggccaccggcgccgacgatgtgggcaccattctcctgccgagccaaggcaaaggtgaccatgccatcattttcttttcctagttcacttcagttcagttagctagctggtgcatgaggaaactggtcacagcttgggtcgttaactgaggacttgcaggcgaagcaggagtggtggcggcagcgaagaagaagggggaagaggaagagaggccatggaaatgctgcgactttgctctgtgcaccaggtcattcccaccgctgtgccgctgcatggacaaggtcgagcagtgtgctgcgacctgcgagaaatgcgagccggccacgtcggactcatcccgccgcgtctgcaacgactggtaccatggcttcccggggcccatgtgcacggaggctgttgcaacagcgaagaaggagaaggcggaagaagaagagaggccgtggaaatgctgtgacttggctctgtgcaccaggtcgttcccgccgatgtgccgctgcctggacaaggtcgagcagtgtgccgcaaactgcaagagctgcgatccggccgcgtcggactcgtcccgccgcgtctgcaacgactggtaccatggcttccccggcgccaagtgcaccgccgacggtaactagcatgcgcgttgatcacctgatcaacgccgtccagcctgagctttagtagctgcagcagcctgcagtgtctgtaagcaacaaaataaaatggaaagtcaggcaatcacg

SEQ ID NO: 9801 - protein, 118 aa, Triticum aestivum
  misc_feature (1)..(118): Ceres Seq. ID no. 12624186
MDKVEQCAATCEKCEPATSDSSRRVCNDWYHGFPGPMCTEAVATAKKEKAEEEERPWKCCDLALCTRSFPPMCRCLDKVEQCAANCKSCDPAASDSSRRVCNDWYHGFPGAKCTADGN

SEQ ID NO: 9802 - protein, 103 aa, Triticum aestivum
  misc_feature (1)..(103): Ceres Seq. ID no. 12624187
MASRGPCARRLLQQRRRRRRKKKRGRGNAVTWLCAPGRSRRCAAAWTRSSSVPQTARAAIRPRRTRPAASATTGTMASPAPSAPPTVTSMRVDHLINAVQPEL

SEQ ID NO: 9803 - protein, 82 aa, Triticum aestivum
  misc_feature (1)..(82): Ceres Seq. ID no. 12624188
MCTEAVATAKKEKAEEEERPWKCCDLALCTRSFPPMCRCLDKVEQCAANCKSCDPAASDSSRRVCNDWYHGFPGAKCTADGN

SEQ ID NO: 9804 - DNA, 622 bp, Triticum aestivum
  misc_feature (1)..(622): Ceres Seq. ID no. 12624291
accacaaatactagaacacacttccataaacactcagaacaaacaaaagaagaagaagaaaaatggtgatgatcaaggccacatgggtttccatcttcgccatcgtggcggttctcctagtgattctagccccggcggcagaagcagtgacgtgctcgccaatgcagctaagcccatgtgcgcaggcgataacgtcgtcttctccaccgtcagcgttgtgctgcgcgaagctgaaggagcagaagccatgcctatgtgggtacatgagaaaccctagcctccgtcgctttgtcagctctcccaacgctcgtaaagtctctaaccgctgcaagctccccatcccaaggtgttgaaaactcaaaaagccaaacagcgtttactatttgcgatcatcctttacgtgtttcaatcctacttttggtgtgtgtgtctaagattgttcattatgatcatgaagtagtagtttaagtaagtgctaccctggagaataacaatgtgtgatgatgcttgtatgcatcttatttcaaccttttgtttttgctgtcttattctggtttattatcaatgtagagacgtgtaatcattgagatggtatgatataagaaaaaatattttcataaac

SEQ ID NO: 9805 - protein, 96 aa, Triticum aestivum
  misc_feature (1)..(96): Ceres Seq. ID no. 12624292
MVMIKATWVSIFAIVAVLLVILAPAAEAVTCSPMQLSPCAQAITSSSPPSALCCAKLKEQKPCLCGYMRNPSLRRFVSSPNARKVSNRCKLPIPRC

SEQ ID NO: 9806 - protein, 94 aa, Triticum aestivum
  misc_feature (1)..(94): Ceres Seq. ID no. 12624293
MIKATWVSIFAIVAVLLVILAPAAEAVTCSPMQLSPCAQAITSSSPPSALCCAKLKEQKPCLCGYMRNPSLRRFVSSPNARKVSNRCKLPIPRC

SEQ ID NO: 9807 - protein, 91 aa, Triticum aestivum
  misc_feature (1)..(91): Ceres Seq. ID no. 12624294
PQILEHTSINTQNKQKKKKKNGDDQGHMGFHLRHRGGSPSDSSPGGRSSDVLANAAKPMCAGDNVVFSTVSVVLREAEGAEAMPMWVHEKP

SEQ ID NO: 9808 - DNA, 527 bp, Triticum aestivum
  misc_feature (1)..(527): Ceres Seq. ID no. 12624554
agtatctctctctcaaagccaaataaacattttagattttttcttcagtttcttagagaagatgtcttgctgtggaggaaactgtagctgcggagctgactgcaagtgtgatggctgcaaaggttgcaagatgtacccagacttgggcttctcaggggagactaccaccacccagactcttgtcctcggcgttgctccgtcgatgaactctcagtatgaggcttctggcgagactttcttcgccgagaatgatggatgcaagtgcggatctgactgcaagtgcgacaacccttgcacttgtaaatgaacaaccccaataaacccaaaccccaagtatttaaagtaaaacctgatgttatgtttgctagtatgtaataatgacttatttcgccggttgtttggctggctatgtgagtcctgttgtttttcgtcttcttctgtgtgtgtgtttaaggtttggtcataagatatctctgcatgttgtatctgtgtgactatatatgattcgaaagtgttatgtggtttgt

SEQ ID NO: 9809 - protein, 101 aa, Triticum aestivum
  misc_feature (1)..(101): Ceres Seq. ID no. 12624555
VSLSQSQINILDFFFSFLEKMSCCGGNCSCGADCKCDGCKGCKMYPDLGFSGETTTTQTLVLGVAPSMNSQYEASGETFFAENDGCKCGSDCKCDNPCTCK

SEQ ID NO: 9810 - protein, 81 aa, Triticum aestivum
  misc_feature (1)..(81): Ceres Seq. ID no. 12624556
MSCCGGNCSCGADCKCDGCKGCKMYPDLGFSGETTTTQTLVLGVAPSMNSQYEASGETFFAENDGCKCGSDCKCDNPCTCK

SEQ ID NO: 9811 - protein, 58 aa, Triticum aestivum
  misc_feature (1)..(58): Ceres Seq. ID no. 12624557
MYPDLGFSGETTTTQTLVLGVAPSMNSQYEASGETFFAENDGCKCGSDCKCDNPCTCK

SEQ ID NO: 9812 - DNA, 637 bp, Triticum aestivum
  misc_feature (1)..(637): Ceres Seq. ID no. 12624594
atttagggcgaacgcgaaatctaaaattagagagcgatggcgagtacagcagctgcgacgggaacgacgacggcgaagagaaaacctgtgtttgtgaaggttgagcagctgaagcctggaacgaccggtcacacattgactgtcaaggtcgttgacgccaatcctgtggttccggctgcgaggaaggctcgtccggggggttctatgggtcgtccgtctcagccgagtcgaatcgctgagtgtctcatcggagacgaaaccgggtgtattctcttcactgctcgtaacgatcaagttgatcttatgaagccgggggaaacagtgatagtgcgcaattcgaggatagacatgttcaagggtacaatgaggctaggggttgataaatggggacgcatcgaagccactgagcctgcttctttcacagtcaaagaggataacaatctgtctcttgttgaatacgaactgattaacgttactgatcagtgaatgtcgtttagtatctttacaatgaggctagtatttggttctgattcttctatcgttaatgtcttttgatttagatgatgaagcttttgtattactggttcagatatgctttcttttttttaccttaaaacatgatcccagaatctcgctt

SEQ ID NO: 9813 - protein, 149 aa, Triticum aestivum
  misc_feature (1)..(149): Ceres Seq. ID no. 12624595
MASTAAATGTTTAKRKPVFVKVEQLKPGTTGHTLTVKVVDANPVVPAARKARPGGSMGRPSQPSRIAECLIGDETGCILFTARNDQVDLMKPGETVIVRNSRIDMFKGTMRLGVDKWGRIEATEPASFTVKEDNNLSLVEYELINVTDQ

SEQ ID NO: 9814 - protein, 93 aa, Triticum aestivum
  misc_feature (1)..(93): Ceres Seq. ID no. 12624596
MGRPSQPSRIAECLIGDETGCILFTARNDQVDLMKPGETVIVRNSRIDMFKGTMRLGVDKWGRIEATEPASFTVKEDNNLSLVEYELINVTDQ

SEQ ID NO: 9815 - DNA, 1005 bp, Triticum aestivum
  misc_feature (1)..(1005): Ceres Seq. ID no. 12624943
ctccctccccgcagccaaatcgagatctctctcccccgtccctctcccacccccaccccacccccgccggccggccgtccgcggcgacgagcccaccagaggaaacatggcgtcggcgctctcctccctccgctacggcgacagcctgtcggtggtggccatctcgggcgccacggcggtgctctgcgaggccatctcctggctcctcatctaccgcaccgccacctacaactccctccgcgcctccatcgagcgccactcccgcaagctcgactccatgaagtccatctcctcgggcgccggcggcgccgcgccctcctcccagccggcctcctcgcgggccaagaagatggaccgcgtcgagtccagcctcaaggacgcctcgcgggagctctccctcgccaagctcaagtccggtgccgtcgtcgccgccgtgctcttcgtcgtcttcggcctcctcaactcgctcttcgagggccgcgccgtcgccaagctgcccttcgcgcccgtcccgctcgtgcagcgcatgagccaccgcggcctgcccgggaacgaccccaccgactgcgccatggtcttcctctacttcctctgctccatgagcatacggacaaacctccagaagctgctcggcttcacgccgccccgcgcggccgcgggggccggcggtggcctcttcgccatgcccgatcccaaagccaattgagcttgatgatcccctcttctatacatacatgtgatgcacctggtctgaagcaaagcatctgagttggtctcccggaaagagttgctgccctgaaaggaagataaataacctacctagtcgctcagaggagaaacactgcaagacactgtaacgacacaattcattttttccacccatgataagcaggcgtgaaccgtgcgtaggctggctgtatcgatcatgaacattctcgagttcacccgaagcaatctgttgccgggtttgtcgtagggttgtactttatcatcagtcgttctagt

SEQ ID NO: 9816 - protein, 255 aa, Triticum aestivum
  misc_feature (1)..(255): Ceres Seq. ID no. 12624944
LPPRSQIEISLPRPSPTPTPPPPAGRPRRRAHQRKHGVGALLPPLRRQPVGGGHLGRHGGALRGHLLAPHLPHRHLQLPPRLHRAPLPQARLHEVHLLGRRRRRALLPAGLLAGQEDGPRRVQPQGRLAGALPRQAQVRCRRRRRALRRLRPPQLALRGPRRRQAALRARPARAAHEPPRPARERPHRLRHGLPLLPLLHEHTDKPPEAARLHAAPRGRGGRRWPLRHARSQSQLSLMIPSSIHTCDAPGLKQSI

SEQ ID NO: 9817 - protein, 234 aa, Triticum aestivum
  misc_feature (1)..(234): Ceres Seq. ID no. 12624945
SLPAAKSRSLSPVPLPPPPHPRRPAVRGDEPTRGNMASALSSLRYGDSLSVVAISGATAVLCEAISWLLIYRTATYNSLRASIERHSRKLDSMKSISSGAGGAAPSSQPASSRAKKMDRVESSLKDASRELSLAKLKSGAVVAAVLFVVFGLLNSLFEGRAVAKLPFAPVPLVQRMSHRGLPGNDPTDCAMVFLYFLCSMSIRTNLQKLLGFTPPRAAAGAGGGLFAMPDPKAN

SEQ ID NO: 9818 - protein, 199 aa, Triticum aestivum
  misc_feature (1)..(199): Ceres Seq. ID no. 12624946
MASALSSLRYGDSLSVVAISGATAVLCEAISWLLIYRTATYNSLRASIERHSRKLDSMKSISSGAGGAAPSSQPASSRAKKMDRVESSLKDASRELSLAKLKSGAVVAAVLFVVFGLLNSLFEGRAVAKLPFAPVPLVQRMSHRGLPGNDPTDCAMVFLYFLCSMSIRTNLQKLLGFTPPRAAAGAGGGLFAMPDPKAN

SEQ ID NO: 9819 - DNA, 588 bp, Triticum aestivum
  misc_feature (1)..(588): Ceres Seq. ID no. 12624963
agttcactcaaacacagccacgcaacactatcactcaaacacagccgcacaagctagacttacctcctcagtagtataccggagcctcccagctagcaatatggcaaagtgcatcgccgtcgcgctcctgctactggtggcgctcgcgtactgcgacgggagggagctgaaccagaaggaccaggcactggcaacggcacgcggtgccggtgccgccggtggcggcgttggcgaggagaagattttggggttgcctgacctgccgcctgtgggaaccgttaccggtaccagcaccactaacggcccgctggtggcgcttcctgccattcccgggatccctgctcacccatgatcacctctagttcatgttctggcttacaagatgaagctcacctcgtgactttagacttcaaggctgtagcttaacatcgcccggaaggcaaacaccggcgtttcgctgatgtccatgttccttttaatgggcgtctgtatcaactatcctcgtctgtaattcttttcggtccgctttcctgtatttttcgatccttgatgtgctacatgtataaatgctactttcttcgcagtgtt

SEQ ID NO: 9820 - protein, 116 aa, Triticum aestivum
  misc_feature (1)..(116): Ceres Seq. ID no. 12624964
VHSNTATQHYHSNTAAQARLTSSVVYRSLPASNMAKCIAVALLLLVALAYCDGRELNQKDQALATARGAGAAGGGVGEEKILGLPDLPPVGTVTGTSTTNGPLVALPAIPGIPAHP

SEQ ID NO: 9821 - protein, 83 aa, Triticum aestivum
  misc_feature (1)..(83): Ceres Seq. ID no. 12624965
MAKCIAVALLLLVALAYCDGRELNQKDQALATARGAGAAGGGVGEEKILGLPDLPPVGTVTGTSTTNGPLVALPAIPGIPAHP

SEQ ID NO: 9822 - DNA, 1417 bp, Triticum aestivum
  misc_feature (1)..(1417): Ceres Seq. ID no. 12625092
gaataagtatatctcgagaaagaaaataaaaatatcacaccactagtatggcgctgctgagcccgcgtgttccgcggctgcccctcgccgcccactccgccggcgccggcgccggatccctccggtgctgcgtccgggttgctgcctccgctgcgcgatgccaagtgacggcgtcgggaagcgtggcggcgggctcctcgtcgtcgtcggagctggaggccatccggtggggcagcgccaagctgcagggagctcgcgaggagatggaggacgaggtcgtcctccgccctgactccctcctccacggcttctccttcgccgccgtcctcgacggccacgccggtttctccaccgtccagttcctgagggacgagttgttcaaggaatgcgcagccgcgttggacgggggcgcggtgcttaacaccaagaatctcgaggccatcacggactcgatcaggcgtgcctttgccaccatggacgccaacctctccacctggcttcagcaaatggataaggaagacgactctggtgccacggccacggccttgtttctgaggaacgatgtccttgttgtctcgcacattggcgactcctgcttggtcatatcgcgtggtggaagacctcagtctctgacaaattttcatcgaccatacgggaacaacaaaacatcccttgaagaggtcaagcggattagggcagcaggtggatggattcgtgatggacgcgtatgtggagacatttctgtatctcgtgcttttggagacataagatttaaaacacggaagaatgagatgctagtaaaaggagttaaagaaggaagatggactgaaaaattcgtttcacgaataaattttaaaggggatctaataatctcttcacctgacgtatctctggtggagcttggaccggatgtggaatttgttttggtagcaaccgatggtctttgggattacattaaaagcactgaagctgtagcttttgtcagagatcaactatgtcaacatggagatgtccagcgggcctgtgaggcgcttggggagaaagctctggatcggcggtcacaagacaatattagcatagtcatagctgacttggggaggacaaactggcaggagttgcccgttccaaggccaaacgtgttgttggagctaagtcaagcagttgcgactgtaggggctgtatcagtaggaatttggatttcatcgcttctcactttgcaataggcctagttaaggtcgggggtgacattttcacatcttcggctccagctgcaaatatatatgtatatccttataggtaattagtttcctgattaaactgttcagtggtatctggactgatgaaaagaagaagaaaaacttgtgctccagctgctatctggcagcgtactaccatagggacctgtgagacgcccgtc

SEQ ID NO: 9823 - protein, 391 aa, Triticum aestivum
  misc_feature (1)..(391): Ceres Seq. ID no. 12625093
MALLSPRVPRLPLAAHSAGAGAGSLRCCVRVAASAARCQVTASGSVAAGSSSSSELEAIRWGSAKLQGAREEMEDEVVLRPDSLLHGFSFAAVLDGHAGFSTVQFLRDELFKECAAALDGGAVLNTKNLEAITDSIRRAFATMDANLSTWLQQMDKEDDSGATATALFLRNDVLVVSHIGDSCLVISRGGRPQSLTNFHRPYGNNKTSLEEVKRIRAAGGWIRDGRVCGDISVSRAFGDIRFKTRKNEMLVKGVKEGRWTEKFVSRINFKGDLIISSPDVSLVELGPDVEFVLVATDGLWDYIKSTEAVAFVRDQLCQHGDVQRACEALGEKALDRRSQDNISIVIADLGRTNWQELPVPRPNVLLELSQAVATVGAVSVGIWISSLLTLQ

SEQ ID NO: 9824 - protein, 319 aa, Triticum aestivum
  misc_feature (1)..(319): Ceres Seq. ID no. 12625094
MEDEVVLRPDSLLHGFSFAAVLDGHAGFSTVQFLRDELFKECAAALDGGAVLNTKNLEAITDSIRRAFATMDANLSTWLQQMDKEDDSGATATALFLRNDVLVVSHIGDSCLVISRGGRPQSLTNFHRPYGNNKTSLEEVKRIRAAGGWIRDGRVCGDISVSRAFGDIRFKTRKNEMLVKGVKEGRWTEKFVSRINFKGDLIISSPDVSLVELGPDVEFVLVATDGLWDYIKSTEAVAFVRDQLCQHGDVQRACEALGEKALDRRSQDNISIVIADLGRTNWQELPVPRPNVLLELSQAVATVGAVSVGIWISSLLTLQ

SEQ ID NO: 9825 - protein, 249 aa, Triticum aestivum
  misc_feature (1)..(249): Ceres Seq. ID no. 12625095
MDANLSTWLQQMDKEDDSGATATALFLRNDVLVVSHIGDSCLVISRGGRPQSLTNFHRPYGNNKTSLEEVKRIRAAGGWIRDGRVCGDISVSRAFGDIRFKTRKNEMLVKGVKEGRWTEKFVSRINFKGDLIISSPDVSLVELGPDVEFVLVATDGLWDYIKSTEAVAFVRDQLCQHGDVQRACEALGEKALDRRSQDNISIVIADLGRTNWQELPVPRPNVLLELSQAVATVGAVSVGIWISSLLTLQ

SEQ ID NO: 9826 - DNA, 856 bp, Triticum aestivum
  misc_feature (1)..(856): Ceres Seq. ID no. 12625251
ctccgcagatcagcagcccccaaatcggcgacccctcgctctctctccgatctccaatcctccacctcgcacacgcgcaccaaccgggcacgatgcgggcgatctcgtcggcggcgggagggatgctgcgggcgcggctgcgcgcggcggtgcgcctccgcggcgggcacggcgacggcgggggccgctggacgacgcccggccacgaggtgcggcccaaggggtacccgatgaaccgcacgccgccgccgccgggcgagtcgcgcaagtgggaggactgggagctcccctgctacgtcacctccttcctcaccgtcgtcatcctcggcgtcgggctcaacgccaagcccgacctcaccctcgagacctgggcgcaccacaaggcgctcgagcgcctccagcagcaggagctcgccgccgcctccgcctcggccgacgccctgtccgagtgatccgcgcgcgcgcgccccaggtcttcctccaagcctaggtcgcttctgttctgttttgcttccaataagggttggttgtgaacttgtgatgtaccaatctgatattgatgggacctgggcggaacactatatttctgtttctgttttgttgttgaaatttatctgatgatgatggcagataccgtatgcatttcgaaatgccctgtggtgtcccaaacattttgaaatgcctctgcattgtattgtcttgtgtatcccttatttatttccttgggcatgatttgctacatgcttttgcgagcgtaattaggaccgattgtacctgtctctctttgcctgaaatgacttgttgcagaaaataaataaatcagttgtcgcattgaacagcttgatgccgaaaaact

SEQ ID NO: 9827 - protein, 162 aa, Triticum aestivum
  misc_feature (1)..(162): Ceres Seq. ID no. 12625252
SADQQPPNRRPLALSPISNPPPRTRAPTGHDAGDLVGGGRDAAGAAARGGAPPRRARRRRGPLDDARPRGAAQGVPDEPHAAAAGRVAQVGGLGAPLLRHLLPHRRHPRRRAQRQARPHPRDLGAPQGARAPPAAGARRRLRLGRRPVRVIRARAPQVFLQA

SEQ ID NO: 9828 - protein, 149 aa, Triticum aestivum
  misc_feature (1)..(149): Ceres Seq. ID no. 12625253
PQISSPQIGDPSLSLRSPILHLAHAHQPGTMRAISSAAGGMLRARLRAAVRLRGGHGDGGGRWTTPGHEVRPKGYPMNRTPPPPGESRKWEDWELPCYVTSFLTVVILGVGLNAKPDLTLETWAHHKALERLQQQELAAASASADALSE

SEQ ID NO: 9829 - protein, 119 aa, Triticum aestivum
  misc_feature (1)..(119): Ceres Seq. ID no. 12625254
MRAISSAAGGMLRARLRAAVRLRGGHGDGGGRWTTPGHEVRPKGYPMNRTPPPPGESRKWEDWELPCYVTSFLTVVILGVGLNAKPDLTLETWAHHKALERLQQQELAAASASADALSE

SEQ ID NO: 9830 - DNA, 1286 bp, Triticum aestivum
  misc_feature (1)..(1286): Ceres Seq. ID no. 12625255
ggtccgtagttcacagccgaggtccgtaaacccttggatttcctccatctccacaccagtgcggctccagtccgtccgagaccggcatggccaccacggccgccgccgccgccgcggtcccagacgctattccagccgcggcgcccgcggccccgtccgcgcaaccgcatcccgttccagacaaatgtacgaattataaaaaccatttgcaagagtggactcaaaggaatgatcagaagttgccagcttataatactgagtcgaaacgtgaccatcatcgacttgagttcagaagcaccgttgaggtgggtggcgagcggtttcaatcagctcgcaatcatagccgccgcaaggatgcggagcaggatgctgccagagtggcatatgaaatcttggtgacaaagacagtaaatgatgatgatcatacagatgcgcttgggctgattgatcagggcgtgctgttctgcaaatcaattctccatgaatttgctgttaagacaaaagctgaacagcccacttactccgcagatcatccagaaggggtatcacccatgcccctgtttgtttcatctgtgttgtttgctgggaacacttatactggtgaagctgcaacatgtaagaaggacgcagagcagaaggctgctcgtgttgcagtcaaatctattttagctacaaagaacacttgtatgcatcaaattgtcagatcaaagaaagagcttatcattgccatcacatcttctgggttcaacaaagaaagaggagttgtaagccaggaaaactgcaatgctccaacaaatgcaattactcctataaaatttgtgcctgctggtgaagctgctggtctaactgcggatcaaggagcgaccaacgttcctgaagatgatccatgtgcacaagctgtatctggctcggaaaagcgcaagaagcacagaaaggtttgatgagaagactctcacccatcgtaacatgagattttgtcgtctatggtggtggaagtgaaggggctgctggttatgtggcgctgtgtatgacatgtttttggatcattgctaggatgcttgttggaatgacgttgactaaggcatccactgtccgtatgtttccgtgattagcttagcttggtatcaggaactcaggtttctatcgaagtggcttcgctctgtcgggaactctggatctctgtgatgtaacttgtcgttcgtcgtaccgtttccaacctgtgtttgtgtcagatcagatctcttgaggacgtgtttggttcaagcaatattacccatcattgccgt

SEQ ID NO: 9831 - protein, 284 aa, Triticum aestivum
  misc_feature (1)..(284): Ceres Seq. ID no. 12625256
MATTAAAAAAVPDAIPAAAPAAPSAQPHPVPDKCTNYKNHLQEWTQRNDQKLPAYNTESKRDHHRLEFRSTVEVGGERFQSARNHSRRKDAEQDAARVAYEILVTKTVNDDDHTDALGLIDQGVLFCKSILHEFAVKTKAEQPTYSADHPEGVSPMPLFVSSVLFAGNTYTGEAATCKKDAEQKAARVAVKSILATKNTCMHQIVRSKKELIIAITSSGFNKERGVVSQENCNAPTNAITPIKFVPAGEAAGLTADQGATNVPEDDPCAQAVSGSEKRKKHRKV

SEQ ID NO: 9832 - DNA, 1126 bp, Triticum aestivum
  misc_feature (1)..(1126): Ceres Seq. ID no. 12625302
acactcgcacccgcactcccatccgccggccgcgccatggcgtcgggggtgtccacgagcatggtgctcacgctgctcggcttctgcgtcagcgtcctcttcatagtcttcgtctgctccaggctcgtctgcgcgctcgtgcgccgccgccgccgccgctcccgcgcctcggcgctcccgccgggcttcccgcccctcgccgccaactacttcttcgccgtccaggtcgacggcctgggagctcaggccgcggctggcccctgtgccggggggctggacctggccgccgtcgcctccttccccacccgcgccttcgcagctgctgcctcctccgactccgactcctcagacgcggccccgcagtgtgttgtctgtcttgcagaatacgaggacaaagatgtgctccgcactcttccttactgtggccacaatttccatatggtgtgcatagatgcttggctaaagcagcactcaacatgcccagtctgtagaatttcactgtctgactatcctgatagcaagcaaattgcgcctcctttaccaagtgcagtggtgatacctatacctatacctccttattcccctgaagcatcaatatcggatccgtgccattgcctgtttgtcggcacgggccattcgtcaagggcatcagaggttcttcagaacgaacccgaccaggcgaatcggacagtacccggtccatccttggatgggccagacgacttgacgttgtctgaggttacctctcctggcgaaataacaagcaaacagtaaaacagcacatggagagtcctcgtgtactcagcaggtcgtgatctccccagctaagctccggcaagtagctgtttggagtttcttttgtgaacaacctgtaaacttggaaacatctgcccatgtgggtgaacggatgtctgttatagattagatttccgcgggtccgatgtaaatatgagaaatctttgggtttcttgtcgaaaagccacatttgctcgataatttgactgaaaacagtccattgtatccatctatggtagcccacagagaattgttgtaggaacatcatcatcagtgcatgtaccaattcaaacagctacaaacatattgattgagatgactgttttaatgc

SEQ ID NO: 9833 - protein, 257 aa, Triticum aestivum
  misc_feature (1)..(257): Ceres Seq. ID no. 12625303
TLAPALPSAGRAMASGVSTSMVLTLLGFCVSVLFIVFVCSRLVCALVRRRRRRSRASALPPGFPPLAANYFFAVQVDGLGAQAAAGPCAGGLDLAAVASFPTRAFAAAASSDSDSSDAAPQCVVCLAEYEDKDVLRTLPYCGHNFHMVCIDAWLKQHSTCPVCRISLSDYPDSKQIAPPLPSAVVIPIPIPPYSPEASISDPCHCLFVGTGHSSRASEVLQNEPDQANRTVPGPSLDGPDDLTLSEVTSPGEITSKQ

SEQ ID NO: 9834 - protein, 245 aa, Triticum aestivum
  misc_feature (1)..(245): Ceres Seq. ID no. 12625304
MASGVSTSMVLTLLGFCVSVLFIVFVCSRLVCALVRRRRRRSRASALPPGFPPLAANYFFAVQVDGLGAQAAAGPCAGGLDLAAVASFPTRAFAAAASSDSDSSDAAPQCVVCLAEYEDKDVLRTLPYCGHNFHMVCIDAWLKQHSTCPVCRISLSDYPDSKQIAPPLPSAVVIPIPIPPYSPEASISDPCHCLFVGTGHSSRASEVLQNEPDQANRTVPGPSLDGPDDLTLSEVTSPGEITSKQ

SEQ ID NO: 9835 - protein, 237 aa, Triticum aestivum
  misc_feature (1)..(237): Ceres Seq. ID no. 12625305
MVLTLLGFCVSVLFIVFVCSRLVCALVRRRRRRSRASALPPGFPPLAANYFFAVQVDGLGAQAAAGPCAGGLDLAAVASFPTRAFAAAASSDSDSSDAAPQCVVCLAEYEDKDVLRTLPYCGHNFHMVCIDAWLKQHSTCPVCRISLSDYPDSKQIAPPLPSAVVIPIPIPPYSPEASISDPCHCLFVGTGHSSRASEVLQNEPDQANRTVPGPSLDGPDDLTLSEVTSPGEITSKQ

SEQ ID NO: 9836 - DNA, 1227 bp, Triticum aestivum
  misc_feature (1)..(1227): Ceres Seq. ID no. 12625368
aacacgctcagactcagctagctaacatacaggcaggccatcaggaggagccacgaggaagaaacaaccagcgcatatatccccctcgccccctccctcccgccggcagagctgagctgagctgagccaccgttcgaccaactcgcctctagaacacagagccccccgccgcccggatcccttcttcatccccctctccgctctttgtatcgctcaccaccgccatggctaagcagcagaagaacgcgcacgtcccgaagttcggcaactgggacaacgacggcaacgtcccctacacgctctacttcgacaacgcgcgcaagggcaagggcggcaagcccatcaaccccaacgaccccgtcgagaaccccgaggccttctcctcctctgtcgtcgcgccgtcgccgaaccgctccttcgaccagggcaggccggctctccctcctgcctccccgcctcccgctcaccaccacgagcgccggcccagcgacgcgccggcggtcgccccgccgctgtccccgtaccaccgcaacgccggtggcgagccgccgagaagaggccctggcggcggacgggcaggcggaggcgggtatagcgtggagcagtcgccggggccgtccccgctgcacccgtacggacagtcgagggccgagtactccgatggcagcggctacggcctcgtggccaactccgtggaccggtcccgtgccaggggcgcctcgcggggcaacgaaacgccgacgagggggtcagcggtgcccaagttcggcgactgggactccaacccggcgtcggcggacggctacacgcacatcttcaacaaggtgagggaggagaagagcacccaggccaaggcaccggggttcggcaaggacaacgtcgcctatggcaacggccgcaggcagcacgacgacggctacgtctcctcgagtcgctggtgctttgggtggtgcaagtaggggtggttcgacagatgatgatggggaaaagtaagcgaggatctttgggaatgtaaattgtgtgaaattaagaaggtttttgccattgattcaacttcgaacttctgtaatcccattttttgggacattatttggcattgggcactcagcagagttcatattcttttgattgtgaaatatactcctactatttctttctgatgtggaatgtagagttcagccatggttgttgttaaaaaaaaaaaaaaaaaagcttatcgataccgtc

SEQ ID NO: 9837 - protein, 244 aa, Triticum aestivum
  misc_feature (1)..(244): Ceres Seq. ID no. 12625369
MAKQQKNAHVPKFGNWDNDGNVPYTLYFDNARKGKGGKPINPNDPVENPEAFSSSVVAPSPNRSFDQGRPALPPASPPPAHHHERRPSDAPAVAPPLSPYHRNAGGEPPRRGPGGGRAGGGGYSVEQSPGPSPLHPYGQSRAEYSDGSGYGLVANSVDRSRARGASRGNETPTRGSAVPKFGDWDSNPASADGYTHIFNKVREEKSTQAKAPGFGKDNVAYGNGRRQHDDGYVSSSRWCFGWCK

SEQ ID NO: 9838 - DNA, 724 bp, Triticum aestivum
  misc_feature (1)..(724): Ceres Seq. ID no. 12625405
caccgcgcatttggctatcgcatttctcaggtgaggctcaggttccggagtagcgaagcttcaagtgcgcatctgggtaccggcatggctggagagcaggcgttccaccggggaggcgtgcacggaggcggcagcgccatcgggccggactacatgcgggccatccgcggcgacgacgactactacggcgggcacggccagggccacagccagccggcggccgtcaccctcgcgaagggggtggccgcggcggcggcggcggggtcgatgctgctcctgtcggccctgacgctgacgggcacggtgctggcgctgatcgtggcgacgccgctgctggtgctcttcagccccgtgctggtgcccgcggccatcgccgccacgatgctgacgaccgggttcgtctcgtcgggggcgttcggcgcggcggcggtgggggtgctggcgtggatgtacaagtacctgtcgcacggggcgtcctcgccgccgggggccgacacggtggaccacgcgggcgcgaagctggactccaaggcgcacgaggtgaagaactgggcgcagcatcgcctcgaccaggcacgaacgccgtagacgtgtcgtcatttgccctcctatgcgtcaccagtgtgtgtggatcgacgcctctatatgtacggacgtgcccgcgagcggtgctacttaccaccgatgaataataagctgcatatctcctctggaagagggagtt

SEQ ID NO: 9839 - protein, 195 aa, Triticum aestivum
  misc_feature (1)..(195): Ceres Seq. ID no. 12625406
HRAFGYRISQVRLRFRSSEASSAHLGTGMAGEQAFHRGGVHGGGSAIGPDYMRAIRGDDDYYGGHGQGHSQPAAVTLAKGVAAAAAAGSMLLLSALTLTGTVLALIVATPLLVLFSPVLVPAAIAATMLTTGFVSSGAFGAAAVGVLAWMYKYLSHGASSPPGADTVDHAGAKLDSKAHEVKNWAQHRLDQARTP

SEQ ID NO: 9840 - protein, 167 aa, Triticum aestivum
  misc_feature (1)..(167): Ceres Seq. ID no. 12625407
MAGEQAFHRGGVHGGGSAIGPDYMRAIRGDDDYYGGHGQGHSQPAAVTLAKGVAAAAAAGSMLLLSALTLTGTVLALIVATPLLVLFSPVLVPAAIAATMLTTGFVSSGAFGAAAVGVLAWMYKYLSHGASSPPGADTVDHAGAKLDSKAHEVKNWAQHRLDQARTP

SEQ ID NO: 9841 - protein, 144 aa, Triticum aestivum
  misc_feature (1)..(144): Ceres Seq. ID no. 12625408
MRAIRGDDDYYGGHGQGHSQPAAVTLAKGVAAAAAAGSMLLLSALTLTGTVLALIVATPLLVLFSPVLVPAAIAATMLTTGFVSSGAFGAAAVGVLAWMYKYLSHGASSPPGADTVDHAGAKLDSKAHEVKNWAQHRLDQARTP

SEQ ID NO: 9842 - DNA, 1520 bp, Triticum aestivum
  misc_feature (1)..(1520): Ceres Seq. ID no. 12625474
cggtcgatcacacatttcctccgcccacctacccatcccgtccgccggccggcctcgaaccttccaagttaagcagctagctagctagctagcacggcggcgaggaatggagcgtgtctcgccgtggctgctgctgctggtacttctggtggccgcgtcagggccgggtgcacgcgccgatccgcaggtgccgtgctacttcgtgttcggggactcgctggtggacaacgggaacaacaacgacatcgcgtcgctggcgcgggccaactacccgccctacggcatcgacttccccggcggagccaccgggcgcttcagcaacggcctcaccaccgtcgacgccatctctcggcttctgggcttcgacgactacatcccagcgtacgcgggcgcaaacaatgatcaactcctctccggcgtcaacttcgcctcagctgcggccggaatcagagacgagaccggccagcaactgggccagcgcataagcttcggcgggcagctccagaactaccaggcggcggtgcagcagctggtgagcatcctgggggacgaggactccgcggcgaaccacctgagccagtgcatcttcacggtgggcatgggcagcaacgactacctcaacaactacttcatgcccgccgtctacgccaccagccggcagtacaccccggagcagtacgccgacgtgctcgtcagccagtacacgcagcagctcaggatcctgtacaacaacggggcgaggaaggtggcgctgatgggggtggggcaggtggggtgcagcccgaacgagctggcgcagcagagctccgacggggtcacctgcgtggcgcggatcaacggcgccatcgagatcttcaaccagaagctggtagagctggtggaccagttcaacacgctgccgggggcgcacttcacctacatcaacgcctacgggatcttccaggacatcatcaggtcgccgggagccaacggcctgacggtgctggacaaggggtgctgcggggtggggaggaacaacgggcaggtgacgtgcctgcccttccagacgccgtgcgccaacaggaacgagtacctcttctgggacgccttccacccaacggaggccgccaacattctcgtcgggaggcgggcctacagcgccgcccagccctccgacgtccaccccgtcgacctgcagacgcttgcgcgcctctagttatgcaacaacctgcttttccaaagagaaaaagaagttatacaggtcgcatgcatcatcagcatcagaaccatatgtgatggctatattttgttggggtgtgtggagtggtccgtgggaatgaaaggtgagtgttttgttacttcagtgcactgcatacgacaagcaagatgtatgtatgtgtgcatctgaacaacgtacgtacttggaaggaggagtatatgctatagttacattttttcggttttgttattgtgaagattcatccatcattgtgcttcgttgtgaaacagcacagttccaagaaaactatcattgtttttgc

SEQ ID NO: 9843 - protein, 362 aa, Triticum aestivum
  misc_feature (1)..(362): Ceres Seq. ID no. 12625475
MERVSPWLLLLVLLVAASGPGARADPQVPCYFVFGDSLVDNGNNNDIASLARANYPPYGIDFPGGATGRFSNGLTTVDAISRLLGFDDYIPAYAGANNDQLLSGVNFASAAAGIRDETGQQLGQRISFGGQLQNYQAAVQQLVSILGDEDSAANHLSQCIFTVGMGSNDYLNNYFMPAVYATSRQYTPEQYADVLVSQYTQQLRILYNNGARKVALMGVGQVGCSPNELAQQSSDGVTCVARINGAIEIFNQKLVELVDQFNTLPGAHFTYINAYGIFQDIIRSPGANGLTVLDKGCCGVGRNNGQVTCLPFQTPCANRNEYLFWDAFHPTEAANILVGRRAYSAAQPSDVHPVDLQTLARL

SEQ ID NO: 9844 - protein, 198 aa, Triticum aestivum
  misc_feature (1)..(198): Ceres Seq. ID no. 12625476
MGSNDYLNNYFMPAVYATSRQYTPEQYADVLVSQYTQQLRILYNNGARKVALMGVGQVGCSPNELAQQSSDGVTCVARINGAIEIFNQKLVELVDQFNTLPGAHFTYINAYGIFQDIIRSPGANGLTVLDKGCCGVGRNNGQVTCLPFQTPCANRNEYLFWDAFHPTEAANILVGRRAYSAAQPSDVHPVDLQTLARL

SEQ ID NO: 9845 - protein, 187 aa, Triticum aestivum
  misc_feature (1)..(187): Ceres Seq. ID no. 12625477
MPAVYATSRQYTPEQYADVLVSQYTQQLRILYNNGARKVALMGVGQVGCSPNELAQQSSDGVTCVARINGAIEIFNQKLVELVDQFNTLPGAHFTYINAYGIFQDIIRSPGANGLTVLDKGCCGVGRNNGQVTCLPFQTPCANRNEYLFWDAFHPTEAANILVGRRAYSAAQPSDVHPVDLQTLARL

SEQ ID NO: 9846 - DNA, 818 bp, Triticum aestivum
  misc_feature (1)..(818): Ceres Seq. ID no. 12625567
agttgcttcatcgtgacgagcagcccggacagcaattagggcaatcaatcagtccatttctttccctctccctccagcagctcggctctctctggtctctgcccgccatggcggccaagctgacccaggagcaggcggacgagtgcaaggaggtgttcgacctgttcgacggcgacgaggacggccgcatcgccgccggcgagctggtcacggcgctccactcgctgggccagaacgtggacgaggccgaggcgcggggcttcctcgaggacgccggcgcgggcggcgccggcgccgtcgccatcgacctccccacgttcctggccgtggccgcgcgcaaggccaacgccggcgtatcggccaagggactggcccagtgcctcgacgcgttcgacgacgacgggagcggcgtcatccccgcggagcagctgcggcaggtgatgctcacccacggcgaccggctcacggaggaggaggccgacgagctggtccgcaaggccgacccccgcggcgagggccgcgtccagtgcaaggagctcgtcaaggtgctcatgaacaacaagtgatcggcgagcttctctgatctgatgcgtcgatcgatcggccgatctggggaccggtgaagtgttgtcctccggtgaggaaatggtgccatgtttcttgatttggtgatgtactcctactggttttgctgtaatattggattggatgcgaatgctctgcatacgcgaagtcctggctgcaatatgtatgctgcgtttgtttcgttgtatgtatgtattgtatgcatacacaaattgctttaacgacgattttgc

SEQ ID NO: 9847 - protein, 187 aa, Triticum aestivum
  misc_feature (1)..(187): Ceres Seq. ID no. 12625568
LLHRDEQPGQQLGQSISPFLSLSLQQLGSLWSLPAMAAKLTQEQADECKEVFDLFDGDEDGRIAAGELVTALHSLGQNVDEAEARGFLEDAGAGGAGAVAIDLPTFLAVAARKANAGVSAKGLAQCLDAFDDDGSGVIPAEQLRQVMLTHGDRLTEEEADELVRKADPRGEGRVQCKELVKVLMNNK

SEQ ID NO: 9848 - protein, 152 aa, Triticum aestivum
  misc_feature (1)..(152): Ceres Seq. ID no. 12625569
MAAKLTQEQADECKEVFDLFDGDEDGRIAAGELVTALHSLGQNVDEAEARGFLEDAGAGGAGAVAIDLPTFLAVAARKANAGVSAKGLAQCLDAFDDDGSGVIPAEQLRQVMLTHGDRLTEEEADELVRKADPRGEGRVQCKELVKVLMNNK

SEQ ID NO: 9849 - DNA, 789 bp, Triticum aestivum
  misc_feature (1)..(789): Ceres Seq. ID no. 12625648
tactttgtagctagccatgtcgagccatagatcttgtggcctggtggtggtgctcgcctgcgccgctctcatggcggcggtggccggcacggcgcagtacaacgtcggcggcgacaacgggtggggcgtgcccggcgccggcgccgagtcctacaacacctgggccgagaagaccaccttccaggtcggcgaccagctcgtgttcgtgtaccccaaggacaaggactcggtgctgctggtggcgccggccgactacaacgcctgcaacaccaacacctacgacaagcagttcagcgacggcaacaccgtcttcgacctcgaccgcgccggcgccttcttcttcatcagcggcgtcgacgccaactgccgcgccaacgagaagctcatcgtcatggtcgccgccgccgccaagggcgctcccacgcccagccaggggtcgcctgcagcaacagcaacgaccccgccgtctgctccctcaggtggcgccccgccaaactccccagcaaccccaaatgctccggcgggtgaggcgagtaactcaacgccggccaagggcgcacctcctggagccgccagcggcgccggtctcacggtggcaggcctcgccggctcgttcgtggcattgtttggatacgccatgcttgctttctagtactgctttccaaagctatcttttactgctccttttcaaagccggaagactatttgctccttttcagagggcaacgtgtctctgctcagattcttttccgttatgatcaatgacaaatgcaatatgatggttcctgg

SEQ ID NO: 9850 - protein, 211 aa, Triticum aestivum
  misc_feature (1)..(211): Ceres Seq. ID no. 12625649
MSSHRSCGLVVVLACAALMAAVAGTAQYNVGGDNGWGVPGAGAESYNTWAEKTTFQVGDQLVFVYPKDKDSVLLVAPADYNACNTNTYDKQFSDGNTVFDLDRAGAFFFISGVDANCRANEKLIVMVAAAAKGAPTPSQGSPAATATTPPSAPSGGAPPNSPATPNAPAGEASNSTPAKGAPPGAASGAGLTVAGLAGSFVALFGYAMLAF

SEQ ID NO: 9851 - protein, 193 aa, Triticum aestivum
  misc_feature (1)..(193): Ceres Seq. ID no. 12625650
MAAVAGTAQYNVGGDNGWGVPGAGAESYNTWAEKTTFQVGDQLVFVYPKDKDSVLLVAPADYNACNTNTYDKQFSDGNTVFDLDRAGAFFFISGVDANCRANEKLIVMVAAAAKGAPTPSQGSPAATATTPPSAPSGGAPPNSPATPNAPAGEASNSTPAKGAPPGAASGAGLTVAGLAGSFVALFGYAMLAF

SEQ ID NO: 9852 - DNA, 1097 bp, Triticum aestivum
  misc_feature (1)..(1097): Ceres Seq. ID no. 12625805
gatatccggcatcgccgcgtctctcacataaacgcacgcttccatcgggacaagacagcggcgcgtagcaaagggaacacggcgaggccggcgatggatgtcaagtgccggcgtctggaggggaaggtggccgtcgtgacggcttccacgcagggcatcggcctcgccatcgccgagcgcctcggccgggagggcgccgcggtcgtcatctcctcccgcaagcagaaaaacgtggacgatgcggtggagggcctcagggcaaaggggatcaccgtggtcggggccgtctgccacgtctccaacgccgagcagcgcaagcaccttgttgacacggccgtcaagaatttcggacatattgatattgttgtctccaatgccgctgcaaatccttctgtggatagcatactagagatgaaagagtcagttcttgacaagctatgggacattaatgtcaaagcttctattcttctacttcaggacgccgcaccacatttgaggaagggatcatctgtgatactaatttcttcaattgctggctataatcctgatgcagctttaacgatgtatggtgttacaaagactgccctttttggtctcacgaaggctcttgctactgagatgggcccaaatacccgtgttaactgtatagctcctgggtttgttcctacacgttttgctggtttcctcacaactaatgagaccattagaaatgaacttatcgagaggagcataattaagagattgggtagcgtggaagacatggcttcagccgccgctttcctggcatccgacgatgcatccttcattacagctgaaacaattgttgttgctggaggaacacaatcaagactatagagaagttttgagggtcaatcagccacagtgtcctgatcaataaatatagtgatactagtaggtctagtatacaacatttcaagtgcgcttagatataaacaagatgcagtgtaataaatttgatgttggggtgccatacaatcttgcaaggacgaatgatagtctatcggcattgtggtccgaacatgtattgttgtataacctgtgttcatgtataggaattgcgatgaagtgacagagtg

SEQ ID NO: 9853 - protein, 284 aa, Triticum aestivum
  misc_feature (1)..(284): Ceres Seq. ID no. 12625806
DIRHRRVSHINARFHRDKTAARSKGNTARPAMDVKCRRLEGKVAVVTASTQGIGLAIAERLGREGAAVVISSRKQKNVDDAVEGLRAKGITVVGAVCHVSNAEQRKHLVDTAVKNFGHIDIVVSNAAANPSVDSILEMKESVLDKLWDINVKASILLLQDAAPHLRKGSSVILISSIAGYNPDAALTMYGVTKTALFGLTKALATEMGPNTRVNCIAPGFVPTRFAGFLTTNETIRNELIERSIIKRLGSVEDMASAAAFLASDDASFITAETIVVAGGTQSRL

SEQ ID NO: 9854 - protein, 253 aa, Triticum aestivum
  misc_feature (1)..(253): Ceres Seq. ID no. 12625807
MDVKCRRLEGKVAVVTASTQGIGLAIAERLGREGAAVVISSRKQKNVDDAVEGLRAKGITVVGAVCHVSNAEQRKHLVDTAVKNFGHIDIVVSNAAANPSVDSILEMKESVLDKLWDINVKASILLLQDAAPHLRKGSSVILISSIAGYNPDAALTMYGVTKTALFGLTKALATEMGPNTRVNCIAPGFVPTRFAGFLTTNETIRNELIERSIIKRLGSVEDMASAAAFLASDDASFITAETIVVAGGTQSRL

SEQ ID NO: 9855 - protein, 147 aa, Triticum aestivum
  misc_feature (1)..(147): Ceres Seq. ID no. 12625808
MKESVLDKLWDINVKASILLLQDAAPHLRKGSSVILISSIAGYNPDAALTMYGVTKTALFGLTKALATEMGPNTRVNCIAPGFVPTRFAGFLTTNETIRNELIERSIIKRLGSVEDMASAAAFLASDDASFITAETIVVAGGTQSRL

SEQ ID NO: 9856 - DNA, 1698 bp, Triticum aestivum
  misc_feature (1)..(1698): Ceres Seq. ID no. 12625831
acgactgggtcgagctcggtcaagtctcgtctctccctcctgttcctactggactagatcagccgatggcgacggcgcgggccgagagcgggccggcgagatagcgcacgcttccgcactctcctcccctccccgcccctcgccgcagtccatggacgctctcgcccccacccccacccgccgccgccgcctcctcgccggcgcggccgccgccaccgcctgctacggcctctaccgcctctacctccaccaccgccgccgcatcgccgcggcgctctccctcgccgacgcgctctcgcaggccggctccgacctcgccgacttcctccgctccgactccgaccaggtgccccgcagcctgcgccagctctccaagctcgccgcctccgaccacgtctcctccgccgcctccgccctctccgagtcgctcgcctcgggggccctccgcgccttctcctcccaccgggccgcccggggcccggatccttcctccccgccgctgcaagaccggatcttggaccgcctcctctcccccgccggcgccgggttcgcctccgccgtcctcgggagcttcgccaggaacctcgtgctctcctgccgtgatcccgcggcccggccccgcgcccctggccagccggactggctcgccgcgctgtgcagcgacaggggcaaggaggccgccgcggagctcgtccgggtgttcgtcagcaccgccgtcgccgcctacctcgacaggaccgcggccgtgcgcacctccgaccaggtgctcgccggcgtcagtaaccccaagcacgacgccaagctcaaggacctgctcgtgtccgtctgcaacggggccgtcgagacctttgtcaggacctcgcggcaggtcacaaaggaggcctccatttctcgagctgaagcagcagtggcggtgcgagacgtctgcaattcaggtcctagctgtgtaatggagagagtatcgaccacgttggccatgccaagcaaccggaggtttgtgctggatgtcacgggcagggtcaccgccgagatggtccggtcattcctcgagttctccactcagcgggtgtccgctggtgcacgaaagagcattgtcgttgcccgggatgagatcgccgaaaggggtctcgtcgcggtcaagtacctgagcgccaagtctatggccatcttcaccttatgcctcacaatgtgcatgcacatttcggttggaattaggttcccgttgccggcctaggcatagcctggtgtgggcttcaaggtgacattgttccagttatcctgattgtagttggaaagtaaagtatgtagattgcaaattgattgtttgctactgctagcctttttctgtgttgttgactagcatttggaagcagaaatctgttggatttgtagttgttggtttgttgtttgtgatagtctgatagggagtatataggtcacgaatggataattttgcaattttagtgtaaggtttcatatgtattatggtgttgtatcctagtgtcttctccatcttttctgaaggaagtaggggtcagtatcttattgatgctgactagtgatgttcctcagcactctgtgtgtggataagctatttcgggcaacaatagcatgaaacttgtccacttatgttttccattccctttttgccatgatttgtggaaaagcaaatatgaattgatcagagatttgtgcctg

SEQ ID NO: 9857 - protein, 410 aa, Triticum aestivum
  misc_feature (1)..(410): Ceres Seq. ID no. 12625832
RLGRARSSLVSPSCSYWTRSADGDGAGRERAGEIAHASALSSPPRPSPQSMDALAPTPTRRRRLLAGAAAATACYGLYRLYLHHRRRIAAALSLADALSQAGSDLADFLRSDSDQVPRSLRQLSKLAASDHVSSAASALSESLASGALRAFSSHRAARGPDPSSPPLQDRILDRLLSPAGAGFASAVLGSFARNLVLSCRDPAARPRAPGQPDWLAALCSDRGKEAAAELVRVFVSTAVAAYLDRTAAVRTSDQVLAGVSNPKHDAKLKDLLVSVCNGAVETFVRTSRQVTKEASISRAEAAVAVRDVCNSGPSCVMERVSTTLAMPSNRRFVLDVTGRVTAEMVRSFLEFSTQRVSAGARKSIVVARDEIAERGLVAVKYLSAKSMAIFTLCLTMCMHISVGIRFPLPA

SEQ ID NO: 9858 - protein, 360 aa, Triticum aestivum
  misc_feature (1)..(360): Ceres Seq. ID no. 12625833
MDALAPTPTRRRRLLAGAAAATACYGLYRLYLHHRRRIAAALSLADALSQAGSDLADFLRSDSDQVPRSLRQLSKLAASDHVSSAASALSESLASGALRAFSSHRAARGPDPSSPPLQDRILDRLLSPAGAGFASAVLGSFARNLVLSCRDPAARPRAPGQPDWLAALCSDRGKEAAAELVRVFVSTAVAAYLDRTAAVRTSDQVLAGVSNPKHDAKLKDLLVSVCNGAVETFVRTSRQVTKEASISRAEAAVAVRDVCNSGPSCVMERVSTTLAMPSNRRFVLDVTGRVTAEMVRSFLEFSTQRVSAGARKSIVVARDEIAERGLVAVKYLSAKSMAIFTLCLTMCMHISVGIRFPLPA

SEQ ID NO: 9859 - DNA, 1104 bp, Triticum aestivum
  misc_feature (1)..(1104): Ceres Seq. ID no. 12625870
tcccacccctttacctcgtgcgatcactgagaaccataggtagaagaaaccctcgaagagcagctcttaggctcgcactctcgaatcctagcccccttgtccgcttcaattggagtcgcagggtgagggtaccgggtcgagcttctgggccagcatggtgcccagggacatggtgaatgcccccgccgaaaggctgcacgtccaagggtctgtcgtgaacaagaagtgtgagacgaaggtgccaaataaaatccacaagtcggagagggagaagcggaagcgaggcacgcagaatgacctctttaatgagctgggagccatgctagaaccagacaggcagaacaacgggaaggcatgtgtattgggtgacactacacggatactgaaggatttagtttcacaagtggaatctcttcggaaggagaatagcacactgaagaatgaatctcactatgttgtgttggagagaaatgaactgcgtgatgacaacagcatgcttcgcaatgaaatccaggagcttcagaacaagctgagaatgcgtctgcaaagcaaccctatttggagccaggatactactacaagatcagccgttgcagtaccttatcccacaagcggagtgttcccagtacagcattcaccacattcaccagtcatcacctcgacggcactttctctgcaacctgtaatcactgagcaatgctatgctgccccactacgagagctgcagctcttcccagaagtttcacctacatccactgaagatagcgaactgtcacaagaccagtggatttccaatagtgtaacaaggccccaggcacggtacccaacaccagcggcgatgtcgccagtaaatgagttcccaatccttccaaggatgggagaggagcaacaatatagtagtggcactagtgaggaagacggtccacacagggtttaagtacataacacaatttgcttcaccgtttgagaagtttctgtagtgtgagtggagtgtgtttctctgcaacagatacatatgcagacgtgcatgtaaactccaatctgtctccgaatcttgatcttaactggttaaataggtgataataaaaaatgctttacaccctc

SEQ ID NO: 9860 - protein, 260 aa, Triticum aestivum
  misc_feature (1)..(260): Ceres Seq. ID no. 12625871
MVPRDMVNAPAERLHVQGSVVNKKCETKVPNKIHKSEREKRKRGTQNDLFNELGAMLEPDRQNNGKACVLGDTTRILKDLVSQVESLRKENSTLKNESHYVVLERNELRDDNSMLRNEIQELQNKLRMRLQSNPIWSQDTTTRSAVAVPYPTSGVFPVQHSPHSPVITSTALSLQPVITEQCYAAPLRELQLFPEVSPTSTEDSELSQDQWISNSVTRPQARYPTPAAMSPVNEFPILPRMGEEQQYSSGTSEEDGPHRV

SEQ ID NO: 9861 - protein, 255 aa, Triticum aestivum
  misc_feature (1)..(255): Ceres Seq. ID no. 12625872
MVNAPAERLHVQGSVVNKKCETKVPNKIHKSEREKRKRGTQNDLFNELGAMLEPDRQNNGKACVLGDTTRILKDLVSQVESLRKENSTLKNESHYVVLERNELRDDNSMLRNEIQELQNKLRMRLQSNPIWSQDTTTRSAVAVPYPTSGVFPVQHSPHSPVITSTALSLQPVITEQCYAAPLRELQLFPEVSPTSTEDSELSQDQWISNSVTRPQARYPTPAAMSPVNEFPILPRMGEEQQYSSGTSEEDGPHRV

SEQ ID NO: 9862 - protein, 205 aa, Triticum aestivum
  misc_feature (1)..(205): Ceres Seq. ID no. 12625873
MLEPDRQNNGKACVLGDTTRILKDLVSQVESLRKENSTLKNESHYVVLERNELRDDNSMLRNEIQELQNKLRMRLQSNPIWSQDTTTRSAVAVPYPTSGVFPVQHSPHSPVITSTALSLQPVITEQCYAAPLRELQLFPEVSPTSTEDSELSQDQWISNSVTRPQARYPTPAAMSPVNEFPILPRMGEEQQYSSGTSEEDGPHRV

SEQ ID NO: 9863 - DNA, 1142 bp, Triticum aestivum
  misc_feature (1)..(1142): Ceres Seq. ID no. 12626108
aactccatttcccaaccaaccaaccaacagccgccaaaggccgatccatggcgtcggcgtcgccgtcgcggctgctgccgccctttccccctccagctgccccaacatcccgccacacaactctccgcgccgtccctcgcagctgcagcctcgccatcccgagcctccggtgccgcgcctccgctccagcggccgttgacgctggcgcgccgctgctgctagaggaccgcgccggcgcggtgtccatccgagagtttgtcacgctcgatgagctccacgccgccgtgcgcctccgcgttcgcaccttctacgagtacgcccgcgacactgtcggcgccgaggatcacaggaaaggtctggcagagagggaatatgaagcattacaaaatcggatttctgggaatatgattaattttcggagagtctcttgtataaatgggacagtgccactgttgccatcgttgatgtcagcagaggagctttgttcaacatgcaagtttgttgaagatggggaagagagaatagtagttggtagtttagacctgaatcagtgcctctggctaccagatgaactgactggaaagaggccaggggtaactgaatcaagccatacacgggcatatctgagcaatgtatgtgttgccaaggagctccaaagatgcggactgggctatgcattggttgacaagtctaagaagcttgctcgtcaatggggcataacggatttgtatgtccatgttgccatcaacaacgaggcggcacaaaagctgtacatcaagagtggatttgtgtacgaaagcgaggagcctgcccagcaggctaggcatcttgggcgcccccgaaggcttcttctttggcttgatatgaagaacgaaaccttgtgatcttacctgtaaatgcttctttttatagttatacagcattatctatatataattttgattttactgcccaattcaagtagtagtatttttttccttgtggaaagaaatacaattctcaaaatttaaattaaggattctccccataattttatttgttctgcacatagtactcattattcaatgtatatccagcattcccccggtggcaaacaatggtacatgataatacagtgctatcaaatctttgcattcctgctc

SEQ ID NO: 9864 - protein, 293 aa, Triticum aestivum
  misc_feature (1)..(293): Ceres Seq. ID no. 12626109
LHFPTNQPTAAKGRSMASASPSRLLPPFPPPAAPTSRHTTLRAVPRSCSLAIPSLRCRASAPAAVDAGAPLLLEDRAGAVSIREFVTLDELHAAVRLRVRTFYEYARDTVGAEDHRKGLAEREYEALQNRISGNMINFRRVSCINGTVPLLPSLMSAEELCSTCKFVEDGEERIVVGSLDLNQCLWLPDELTGKRPGVTESSHTRAYLSNVCVAKELQRCGLGYALVDKSKKLARQWGITDLYVHVAINNEAAQKLYIKSGFVYESEEPAQQARHLGRPRRLLLWLDMKNETL

SEQ ID NO: 9865 - protein, 278 aa, Triticum aestivum
  misc_feature (1)..(278): Ceres Seq. ID no. 12626110
MASASPSRLLPPFPPPAAPTSRHTTLRAVPRSCSLAIPSLRCRASAPAAVDAGAPLLLEDRAGAVSIREFVTLDELHAAVRLRVRTFYEYARDTVGAEDHRKGLAEREYEALQNRISGNMINFRRVSCINGTVPLLPSLMSAEELCSTCKFVEDGEERIVVGSLDLNQCLWLPDELTGKRPGVTESSHTRAYLSNVCVAKELQRCGLGYALVDKSKKLARQWGITDLYVHVAINNEAAQKLYIKSGFVYESEEPAQQARHLGRPRRLLLWLDMKNETL

SEQ ID NO: 9866 - protein, 159 aa, Triticum aestivum
  misc_feature (1)..(159): Ceres Seq. ID no. 12626111
MINFRRVSCINGTVPLLPSLMSAEELCSTCKFVEDGEERIVVGSLDLNQCLWLPDELTGKRPGVTESSHTRAYLSNVCVAKELQRCGLGYALVDKSKKLARQWGITDLYVHVAINNEAAQKLYIKSGFVYESEEPAQQARHLGRPRRLLLWLDMKNETL

SEQ ID NO: 9867 - DNA, 975 bp, Triticum aestivum
  misc_feature (1)..(975): Ceres Seq. ID no. 12626773
cttcaggatgttttacgcactagctttgaatcattgcttgttccagcatttgaacaatcatgtaagacaatgtttgagcaagtagacagtgcattccagaaaggaatgtctgagcatgctgttgctattcagcagcaggttgaggcagcacatactccattggcgcttactttaaaggaaactatcacttctgcgtcctcaatcacccagaatctcacatcagagttacttgatgggcatcgcaaacttttggcgctggttacatctggcaacgccaatgcgcaaaatacaaatgttctgcagcccaacaatggtcctatcactggcccaccagaggtcgaggcaccattagacccgatgaaggagctgggaagactgctagctgaacacaaatttgacgaggcttttacagtagcacttcaaagaagtgacgtgtcaattgtgtcttggttatgctctcaggttgatttgcgtggattatgtacaatggccccagtccctctgaaccagggagtcctcctagccctactccagcagctagcagttgatattggcaccgagacatcccggaaaattcagtagatgacagatgttgccatggcgatcaatccgacagaccaagtcatcgccatacatgtgaggcccatcttcgagcaagtctacgccaaattggctcaccaccggtcgctccccaccaccagtccattggataacagcaatctccgcttgctcatgcatgtcatcaactcagttctgcttagctacaagtgattctagctggctgcagaaacagtgggggagtatgatggtctattctttctttgtatagagagaaatttttgaaaagcaagggaaacctagaaggacgatgaaaactgtcaccaagaaaaattgttaagggctgatgtgcccgccccctggtgtaaattaggcttgtatcggacttaaattggagtatttccatgtggactgtct

SEQ ID NO: 9868 - protein, 193 aa, Triticum aestivum
  misc_feature (1)..(193): Ceres Seq. ID no. 12626774
LQDVLRTSFESLLVPAFEQSCKTMFEQVDSAFQKGMSEHAVAIQQQVEAAHTPLALTLKETITSASSITQNLTSELLDGHRKLLALVTSGNANAQNTNVLQPNNGPITGPPEVEAPLDPMKELGRLLAEHKFDEAFTVALQRSDVSIVSWLCSQVDLRGLCTMAPVPLNQGVLLALLQQLAVDIGTETSRKIQ

SEQ ID NO: 9869 - protein, 170 aa, Triticum aestivum
  misc_feature (1)..(170): Ceres Seq. ID no. 12626775
MFEQVDSAFQKGMSEHAVAIQQQVEAAHTPLALTLKETITSASSITQNLTSELLDGHRKLLALVTSGNANAQNTNVLQPNNGPITGPPEVEAPLDPMKELGRLLAEHKFDEAFTVALQRSDVSIVSWLCSQVDLRGLCTMAPVPLNQGVLLALLQQLAVDIGTETSRKIQ

SEQ ID NO: 9870 - protein, 158 aa, Triticum aestivum
  misc_feature (1)..(158): Ceres Seq. ID no. 12626776
MSEHAVAIQQQVEAAHTPLALTLKETITSASSITQNLTSELLDGHRKLLALVTSGNANAQNTNVLQPNNGPITGPPEVEAPLDPMKELGRLLAEHKFDEAFTVALQRSDVSIVSWLCSQVDLRGLCTMAPVPLNQGVLLALLQQLAVDIGTETSRKIQ

SEQ ID NO: 9871 - DNA, 988 bp, Triticum aestivum
  misc_feature (1)..(988): Ceres Seq. ID no. 12627129
atcaatcaatccgcggaatctatcccccccgcagcagacgccatggccgccgcaccgacgccgcagcccttgctcccggtgaccaacccctcctccgggggcggcggctctgccccgtccgccggcagcggcctcaccgactccgcgctcgccacgccggccttccggctcttcctcagcagggtctccgacacggcgcggcgctcgctcgccgaccgccgcccctggacggagctcatcgaccgctcggccatctcgcggccggactccctctccgaggccacctcgcgattgcgccgcaacctgggctacttccgcgtcaactacgccgccgtggtggccttctccctcgcggcctccctcctggcgcaccccttctcgctgctcgtcctcctcggcatcctcggcgcctggtgcttcctctacgtcttccgcgcgcccgaccagcccgtcgtgctcttcggccgcaccttcaccgaccgggagacgctgctcggcctcgtcgtctcgtcgctgctcgccttcttcctcacgtccgtcgcctcgctcatcatctccggcctgctcgtcggcggcgcgctggtggcggtgcacggcgcgttccgcatgcccgaggacctcttcctcgacgactcgagctctgtgtcaagcggcaacacttcccacaggctgctctccttcctcgcgtcgcccggatctggtgtttgagcctgcgcgagatctggtagccttcttgcatcaacgagttcatctcaagtctgagtctaatttcgcgagatctgattttggttttaatatgtatctccagttattcaaagatccgcgtgaagctgtattctctcgtatttgaccagatgttaagcattagcaaattgatcactgtgcactatgaatcgattgagcgttagcaaattgatccgcattattagctgtattcgctcgtatttaaccagattgttcatatacaggttttatggtttccactgtg

SEQ ID NO: 9872 - protein, 241 aa, Triticum aestivum
  misc_feature (1)..(241): Ceres Seq. ID no. 12627130
QSIRGIYPPRSRRHGRRTDAAALAPGDQPLLRGRRLCPVRRQRPHRLRARHAGLPALPQQGLRHGAALARRPPPLDGAHRPLGHLAAGLPLRGHLAIAPQPGLLPRQLRRRGGLLPRGLPPGAPLLAARPPRHPRRLVLPLRLPRARPARRALRPHLHRPGDAARPRRLVAARLLPHVRRLAHHLRPARRRRAGGGARRVPHARGPLPRRLELCVKRQHFPQAALLPRVARIWCLSLREIW

SEQ ID NO: 9873 - protein, 235 aa, Triticum aestivum
  misc_feature (1)..(235): Ceres Seq. ID no. 12627131
INQSAESIPPAADAMAAAPTPQPLLPVTNPSSGGGGSAPSAGSGLTDSALATPAFRLFLSRVSDTARRSLADRRPWTELIDRSAISRPDSLSEATSRLRRNLGYFRVNYAAVVAFSLAASLLAHPFSLLVLLGILGAWCFLYVFRAPDQPVVLFGRTFTDRETLLGLVVSSLLAFFLTSVASLIISGLLVGGALVAVHGAFRMPEDLFLDDSSSVSSGNTSHRLLSFLASPGSGV

SEQ ID NO: 9874 - protein, 221 aa, Triticum aestivum
  misc_feature (1)..(221): Ceres Seq. ID no. 12627132
MAAAPTPQPLLPVTNPSSGGGGSAPSAGSGLTDSALATPAFRLFLSRVSDTARRSLADRRPWTELIDRSAISRPDSLSEATSRLRRNLGYFRVNYAAVVAFSLAASLLAHPFSLLVLLGILGAWCFLYVFRAPDQPVVLFGRTFTDRETLLGLVVSSLLAFFLTSVASLIISGLLVGGALVAVHGAFRMPEDLFLDDSSSVSSGNTSHRLLSFLASPGSGV

SEQ ID NO: 9875 - DNA, 1231 bp, Triticum aestivum
  misc_feature (1)..(1231): Ceres Seq. ID no. 12627139
cggggagaggcttgcgttgcgtgctggaggagcggaggaggcaggagccggcgtcgtgtttgagtaggagtaggataagcggattgctctctcgtctcggagatttccggcgagaaggactcgagcggatcgagtgcgcccgcccgcccgccggcctcgccgatcagccgcgatgaactgcgagacgtgccacctcaacgaactggagctggagccgctggagatcaaagacgtgctgcgatgcatcttgcataccatattctttcatcgaaccctcactcttgttcggcccaaggatgttgactgcgacctctttgagatcacatatgttcaatgtggacttgcagaactagaaaaggaggtcgatgaaaagatcaaccagttcattgcttgggctgaaaagcatccaaatcggaaaagccaggtgtgcctctctttcttcgatgagaagaacaagcacccgggctggttcagcagcaagactgagagggtttactgggaacaatggttcatcaatttgcatgtcacaagccctaaaggacaaggcaaatcacgtggctccaaagcaccggcaaatactaaaggacaagcattggaagagaccagctcaagacgtgatgcgctgagcttgctgatccaagaagtcctgttccagatcattaactacgccaatgagaaaaaagaccatattcctccaatctctgacagaatattcaatcatgagattttggtccccaggtgacaccttttccttggacgtgtgttcacagctcttctgattctgtattcgggtggaacgccgacgttcttcggagggcattgagtagtggacattcgtactcactgaactgaagatctttgttagaaactgcactaaacgaagatgttggtatcgatgtgctacctttcgcagtgatgccacattgcccctttctcacctctccattgatcgtttggttataagacgttgtcagagctgctgactcatggaagcaatgttgtgtacagaataatgtagaactgctagtgaactgactctgttatccatccaatcatgtaattcccacttgtttagctgtaaatatttctcttgacagtctgtgtccaaaaattattaccatgttattatgcagatgtgaaaaatatgtgtattctggatgttatgtgcactggtgtttattcagtgtgctgacataagggagaaacctggagtgggaagctgttttgactg

SEQ ID NO: 9876 - protein, 189 aa, Triticum aestivum
  misc_feature (1)..(189): Ceres Seq. ID no. 12627140
MNCETCHLNELELEPLEIKDVLRCILHTIFFHRTLTLVRPKDVDCDLFEITYVQCGLAELEKEVDEKINQFIAWAEKHPNRKSQVCLSFFDEKNKHPGWFSSKTERVYWEQWFINLHVTSPKGQGKSRGSKAPANTKGQALEETSSRRDALSLLIQEVLFQIINYANEKKDHIPPISDRIFNHEILVPR

SEQ ID NO: 9877 - DNA, 427 bp, Triticum aestivum
  misc_feature (1)..(427): Ceres Seq. ID no. 12627458
gatcattgatgttatagtgtctcaaggaggtgcaccagaagttgacaagtaccttttcatatttctcaaattcatggcttctgtcatacccaccattgagtatgattacactatggacttcgatctgggcagtacaagcacataagtcgcccattgaagaaaagctgaaactcccaagaaggcaagctggtcgttgtcgccgaataattgctgctcttcggaaggatctgtacattgtgtccgtgtgtgtgtgtgtgttggttcgtctggaaatgaactttcaattgtaaactctgatgctctgcaggaagattgtgccgatttgtcctcttacggtgcagcgccgcactgatgacatttgtgattcttcgccaacaaatctgaattatgttgaaaaactgaaggatagtaaaatccctgcactggc

SEQ ID NO: 9878 - protein, 62 aa, Triticum aestivum
  misc_feature (1)..(62): Ceres Seq. ID no. 12627459
MITLWTSIWAVQAHKSPIEEKLKLPRRQAGRCRRIIAALRKDLYIVSVCVCVLVRLEMNFQL

SEQ ID NO: 9879 - protein, 47 aa, Triticum aestivum
  misc_feature (1)..(47): Ceres Seq. ID no. 12627460
IIDVIVSQGGAPEVDKYLFIFLKFMASVIPTIEYDYTMDFDLGSTST

SEQ ID NO: 9880 - protein, 43 aa, Triticum aestivum
  misc_feature (1)..(43): Ceres Seq. ID no. 12627461
MLCRKIVPICPLTVQRRTDDICDSSPTNLNYVEKLKDSKIPAL

SEQ ID NO: 9881 - DNA, 606 bp, Triticum aestivum
  misc_feature (1)..(606): Ceres Seq. ID no. 12777119
actcgagagcgcgagcgagacttttctttccatccgcaggagatcccgacgagaaggcgaaggcgaagccggcggcgcaaccgaagcccctcatggcccgctcgtcctcgcagtcccagtcctccgtcggcggtgccggcgccgccggatcccgcccggccaccgccgggccccgcggcacgcccgccgccacggctggcatgcgccgccgacccggccgcacctcctcctccgcgtccggtggcggaggcttctccggcggcggagggaacaacatgctgcgcttttacaccgacgaggccccggggctgcgcctctccccgaccatggtgctcgtcatgtccgtctgcttcatcggcttcgtcaccgccctccacgtcttcggcaagctctaccgctcccgcaccgccgcctccgcgtccgcctgatcaacccggttcctgctcctgtttgttcttcgtttcagatcagatcagatggttttggtgtgtaacaaagaggctgtggttgctacctgacgagttagatctgccgaagtaccctacatgtttaattatggtgccctttctgtttccatttaccttgttgttgcgatgaattgtggct

SEQ ID NO: 9882 - protein, 198 aa, Triticum aestivum
  misc_feature (1)..(198): Ceres Seq. ID no. 12777120
TRERERDFSFHPQEIPTRRRRRSRRRNRSPSWPARPRSPSPPSAVPAPPDPARPPPGPAARPPPRLACAADPAAPPPPRPVAEASPAAEGTTCCAFTPTRPRGCASPRPWCSSCPSASSASSPPSTSSASSTAPAPPPPRPPDQPGSCSCLFFVSDQIRWFWCVTKRLWLLPDELDLPKYPTCLIMVPFLFPFTLLLR

SEQ ID NO: 9883 - protein, 163 aa, Triticum aestivum
  misc_feature (1)..(163): Ceres Seq. ID no. 12777121
LESASETFLSIRRRSRREGEGEAGGATEAPHGPLVLAVPVLRRRCRRRRIPPGHRRAPRHARRHGWHAPPTRPHLLLRVRWRRLLRRRREQHAALLHRRGPGAAPLPDHGARHVRLLHRLRHRPPRLRQALPLPHRRLRVRLINPVPAPVCSSFQIRSDGFGV

SEQ ID NO: 9884 - protein, 141 aa, Triticum aestivum
  misc_feature (1)..(141): Ceres Seq. ID no. 12777122
SRARARLFFPSAGDPDEKAKAKPAAQPKPLMARSSSQSQSSVGGAGAAGSRPATAGPRGTPAATAGMRRRPGRTSSSASGGGGFSGGGGNNMLRFYTDEAPGLRLSPTMVLVMSVCFIGFVTALHVFGKLYRSRTAASASA

SEQ ID NO: 9885 - protein, 111 aa, Triticum aestivum
  misc_feature (1)..(111): Ceres Seq. ID no. 12777123
MARSSSQSQSSVGGAGAAGSRPATAGPRGTPAATAGMRRRPGRTSSSASGGGGFSGGGGNNMLRFYTDEAPGLRLSPTMVLVMSVCFIGFVTALHVFGKLYRSRTAASASA

SEQ ID NO: 9886 - DNA, 518 bp, Triticum aestivum
  misc_feature (1)..(518): Ceres Seq. ID no. 12777328
atcacacagctactagctagcacagcagcattgacttgggatttggggatcacatcacacaagaaaatattactccatgggaggccaaaagggtcctgctgcgatcatggtgggtgtgctcctcatactggggctggccactgcggcgatgagctcctcggagaaggtggccaccggcgagaagacgtcgtggccggaggtggtggggctatgcgcggaggaggccaagaagatcatcctcaaggacaagcccgatgccaacatcgtcgttctccccgccggctcgatggtcaccatggactacgatcccctgcgcgtccgcatcttcgtcgataccgtcgccgaggccccccacaccggctagctaagcttggtacctacacggttacacagaagtgactattaatgtcaagggacatggaagaataatttcatataccccccatatccatgcatggatgtcacgggcatatgtgtgctagctccttaatttgcattgtcactttagttttgcgccc

SEQ ID NO: 9887 - protein, 132 aa, Triticum aestivum
  misc_feature (1)..(132): Ceres Seq. ID no. 12777329
ITQLLASTAALTWDLGITSHKKILLHGRPKGSCCDHGGCAPHTGAGHCGDELLGEGGHRREDVVAGGGGAMRGGGQEDHPQGQARCQHRRSPRRLDGHHGLRSPARPHLRRYRRRGPPHRLAKLGTYTVTQK

SEQ ID NO: 9888 - protein, 95 aa, Triticum aestivum
  misc_feature (1)..(95): Ceres Seq. ID no. 12777330
MGGQKGPAAIMVGVLLILGLATAAMSSSEKVATGEKTSWPEVVGLCAEEAKKIILKDKPDANIVVLPAGSMVTMDYDPLRVRIFVDTVAEAPHTG

SEQ ID NO: 9889 - protein, 85 aa, Triticum aestivum
  misc_feature (1)..(85): Ceres Seq. ID no. 12777331
MVGVLLILGLATAAMSSSEKVATGEKTSWPEVVGLCAEEAKKIILKDKPDANIVVLPAGSMVTMDYDPLRVRIFVDTVAEAPHTG

SEQ ID NO: 9890 - DNA, 2223 bp, Triticum aestivum
  misc_feature (1)..(2223): Ceres Seq. ID no. 12778278
tcacttctccctccctccctccaataattctcttctctcctctccgcctccgcaccaccatcagaggaaagccagcgggaaggggggaaatccccatgcccccacccctcgccggaccagatccccggcgggccggcgcggagccttaggcggggaccggcctgaccgatgggcggggaggccccggagccgcggcggctcagccgcgcgcttagcttggacggcagcggcgtcccggaggaggcgctgcacctggtgctcggctacgtcgacgacccgcgcgaccgcgaggcggcctcgctggcgtgccgccgctggcaccacatcgacgcgctcacgcggaagcacgtcaccgtgcccttctgctacgccgtgtccccggcgcgcctgctcgcgcgcttcccgcgcctcgagtcgctcggggtcaagggcaagccccgcgccgccatgtacggcctcatccccgacgactggggcgcctacgctcggccctgggtggccgagctcgccgccccgctcgagtgcctcaaggcgctccacctgcggcgcatggtcgtcaccgacgacgacctcgccgccctcgtccgcgcccgcggccacatgctgcaggagctcaagctcgacaagtgctccggattctccaccgacgccctccgcctcgtcgcccgctcctgcagatcactgagaactttgtttctggaagagtgtacaattactgataatggcactgtatggctccatgaccttgctgccaacaatcctgttctggtgaccttgaacttctacttgacttacctcagagtggagccagctgacctcgagcttctcgccaggaattgcaagtcactaatttcattgaagattagcgactgcgacctttcagatttaattggatttttccaaatagctacatcattgcaagaatttgctggagcagaaatcagtgagcaaatgtatggaaatgttaagcttccttcaaagctttgctccttcggacttaccttcatggggacaaatgagatgcacataatctttcctttttctgctgtactcaagaagctggatttgcagtacagtttcctcaccactgaagatcattgccagctcattgcaaaatgtccgaacttactagttcttgcggtaaggaatgtgattggggatagaggactgggggttgtcggtgacacatgcaagaagctacaaaggctcagagttgagcgaggggaagatgatcctggtatgcaagaagaggaaggcggaatttctcaagtaggcctaacagctatagccgtaggttgccgtgaactggaaaatatagctgcctatgtgtctgatatcacaaatggggccctggaatccatcggaacgttctgcaaaaatctccatgactttcgccttgtcctgcttgacagacaagagacgataacagatttgccgctggacaatggtgcccgcgcgctgctgaggggctgcaccaagcttcggaggttcgctctatacctgagaccaggggggctttcagatgtaggcctcggctacattggacagcacagtggaaccatccagtacatgcttctgggtaacgttgggcaaacggatggtggattgatcagtttcgcagccgggtgccggaacctgcggaagcttgaactgaggagctgttgcttcagcgagcgggctctggcgctcgccatacggcaaatgccttccctgaggtatgtgtgggtgcagggctacagggcctctcagaccggccgtgacctcatgctcatggcgcggcccttctggaacatcgagtttacgcctcccagcacggagaccgcgggccggctgatggaagatggggagccctgcgttgataggcaagctcaggtgctggcatactactccctttctgggaagaggtccgactacccgcagtctgttgttcctctgtatcctgcgtgactgtaaatacattaagccggtatggtgtctctctgggacggcccctggctggccctctgcgcttctcgggcaataaggatgtttgtatgtgggtattgtatggatctggtagattttctagctgctgtgtactggaataagcgcattggtatttttgcctggtactcctatctaatcttaggaagatgtatactaaagtaacattgtgcgagtgaactgtgacactattgcgcttgcttcgcaggcataagcttgtctggtttccgcggcctgctc

SEQ ID NO: 9891 - protein, 592 aa, Triticum aestivum
  misc_feature (1)..(592): Ceres Seq. ID no. 12778279
MGGEAPEPRRLSRALSLDGSGVPEEALHLVLGYVDDPRDREAASLACRRWHHIDALTRKHVTVPFCYAVSPARLLARFPRLESLGVKGKPRAAMYGLIPDDWGAYARPWVAELAAPLECLKALHLRRMVVTDDDLAALVRARGHMLQELKLDKCSGFSTDALRLVARSCRSLRTLFLEECTITDNGTVWLHDLAANNPVLVTLNFYLTYLRVEPADLELLARNCKSLISLKISDCDLSDLIGFFQIATSLQEFAGAEISEQMYGNVKLPSKLCSFGLTFMGTNEMHIIFPFSAVLKKLDLQYSFLTTEDHCQLIAKCPNLLVLAVRNVIGDRGLGVVGDTCKKLQRLRVERGEDDPGMQEEEGGISQVGLTAIAVGCRELENIAAYVSDITNGALESIGTFCKNLHDFRLVLLDRQETITDLPLDNGARALLRGCTKLRRFALYLRPGGLSDVGLGYIGQHSGTIQYMLLGNVGQTDGGLISFAAGCRNLRKLELRSCCFSERALALAIRQMPSLRYVWVQGYRASQTGRDLMLMARPFWNIEFTPPSTETAGRLMEDGEPCVDRQAQVLAYYSLSGKRSDYPQSVVPLYPA

SEQ ID NO: 9892 - protein, 499 aa, Triticum aestivum
  misc_feature (1)..(499): Ceres Seq. ID no. 12778280
MYGLIPDDWGAYARPWVAELAAPLECLKALHLRRMVVTDDDLAALVRARGHMLQELKLDKCSGFSTDALRLVARSCRSLRTLFLEECTITDNGTVWLHDLAANNPVLVTLNFYLTYLRVEPADLELLARNCKSLISLKISDCDLSDLIGFFQIATSLQEFAGAEISEQMYGNVKLPSKLCSFGLTFMGTNEMHIIFPFSAVLKKLDLQYSFLTTEDHCQLIAKCPNLLVLAVRNVIGDRGLGVVGDTCKKLQRLRVERGEDDPGMQEEEGGISQVGLTAIAVGCRELENIAAYVSDITNGALESIGTFCKNLHDFRLVLLDRQETITDLPLDNGARALLRGCTKLRRFALYLRPGGLSDVGLGYIGQHSGTIQYMLLGNVGQTDGGLISFAAGCRNLRKLELRSCCFSERALALAIRQMPSLRYVWVQGYRASQTGRDLMLMARPFWNIEFTPPSTETAGRLMEDGEPCVDRQAQVLAYYSLSGKRSDYPQSVVPLYPA

SEQ ID NO: 9893 - protein, 465 aa, Triticum aestivum
  misc_feature (1)..(465): Ceres Seq. ID no. 12778281
MVVTDDDLAALVRARGHMLQELKLDKCSGFSTDALRLVARSCRSLRTLFLEECTITDNGTVWLHDLAANNPVLVTLNFYLTYLRVEPADLELLARNCKSLISLKISDCDLSDLIGFFQIATSLQEFAGAEISEQMYGNVKLPSKLCSFGLTFMGTNEMHIIFPFSAVLKKLDLQYSFLTTEDHCQLIAKCPNLLVLAVRNVIGDRGLGVVGDTCKKLQRLRVERGEDDPGMQEEEGGISQVGLTAIAVGCRELENIAAYVSDITNGALESIGTFCKNLHDFRLVLLDRQETITDLPLDNGARALLRGCTKLRRFALYLRPGGLSDVGLGYIGQHSGTIQYMLLGNVGQTDGGLISFAAGCRNLRKLELRSCCFSERALALAIRQMPSLRYVWVQGYRASQTGRDLMLMARPFWNIEFTPPSTETAGRLMEDGEPCVDRQAQVLAYYSLSGKRSDYPQSVVPLYPA

SEQ ID NO: 9894 - DNA, 1674 bp, Triticum aestivum
  misc_feature (1)..(1674): Ceres Seq. ID no. 12779098
atttaagagcctcgctagtcctttcatcatcaaaccccacacacgcacacgcgcgcgcgcacacacacacaaaaaaaaagcagagagggaggagatggccggagacgggcgtcgcgtggtggtcttccccttcccgttccacggccacgccacccccctcctccgcctcgccagcgttctccacacccgcggcttcgcggtgaccatcttccacaccgagctccgggcgcccgacccggccgagtaccccgcggactaccgcttcgtgcccctgcgcgtggacgtgcccccggagctgatggcgtccgaggacatcgcggggatggtcacggccatgagcgagtactccgaggcgcccttcaaggaacgcctgaccgcggcgctcgccgaggaaggcgccggtgtccggtgcgtcatcgccgacgtcgcctggtacaaggccctgtcggtgtccagcgccctcggcgtgccggcgatgggcgtcatgacggccagcgccgccaactaccgggtctacatggcgtacccgatgttgattgagaagggctacctgcctgtacaagaggcgcgcagggaggatctggtccaggagctgccgccgtaccgtgtgaaagatctgctacggctcgaggcatccagcctccagggcttcgccgacctgctccggaacaccatcgaggcaccgcgccagtccgcaggcctcatattcaacaccttgagggccattgaggccgacgacctggacacgatccgccaggaggagtccctcccggtcttcgccctcgcccctctccacaagctggcgccgccgggcaacaccagcagcagcctgtacggcgagacgcaggcggaccgcgagtgcctcgattggctcgacacgcaggaaccaggcagtgtggtgtacgtgagcttcgggagcctggccgccatggacccgcacgagttcgtggagctggcgtgggggctcgccgccagcaagcggccgttcctctgggtcgtcaggcccacgctcatccgcggctacgagtccggccagctgcccgacgggctcgacgagcagatccgtgatcatggcaggctcgtcagctgggcaccgcaggtggaggtgctcgcccaccctgcggtaggcgccttcatcacgcacagcggctggaactccacggtggaagccgtgtcggagggcgtgccgatgatatgcctcccgttgcacggagaccagttcagcaacgccaggtacgtgtgcgatgtctggaaggtgggagtggagatcgaggcgtcgtcggcggctgggcagaacctggagagagggaagatcaaggctgccatcgacaagattgtgcacgacaaagggattagagagaggatggatgccttcaaattagctgcagatgaagcagttaactcccaaactgaggtgaaagctttggttgatctcataaactcgttttaattaattcagagccttccacttcatatacctcacttaattatgtaatcatcatccatctttggcgatcgacctactgtactgctactccaccctctgtaataagtattcgatttccataccccttttcttttaatgtctccaactgtgatgattgattccaaatgtgatgatttctccaaatgtgatggttgattcgaataaagaaaagcttattttccaagtgt

SEQ ID NO: 9895 - protein, 482 aa, Triticum aestivum
  misc_feature (1)..(482): Ceres Seq. ID no. 12779099
FKSLASPFIIKPHTRTRARAHTHKKKAEREEMAGDGRRVVVFPFPFHGHATPLLRLASVLHTRGFAVTIFHTELRAPDPAEYPADYRFVPLRVDVPPELMASEDIAGMVTAMSEYSEAPFKERLTAALAEEGAGVRCVIADVAWYKALSVSSALGVPAMGVMTASAANYRVYMAYPMLIEKGYLPVQEARREDLVQELPPYRVKDLLRLEASSLQGFADLLRNTIEAPRQSAGLIFNTLRAIEADDLDTIRQEESLPVFALAPLHKLAPPGNTSSSLYGETQADRECLDWLDTQEPGSVVYVSFGSLAAMDPHEFVELAWGLAASKRPFLWVVRPTLIRGYESGQLPDGLDEQIRDHGRLVSWAPQVEVLAHPAVGAFITHSGWNSTVEAVSEGVPMICLPLHGDQFSNARYVCDVWKVGVEIEASSAAGQNLERGKIKAAIDKIVHDKGIRERMDAFKLAADEAVNSQTEVKALVDLINSF

SEQ ID NO: 9896 - protein, 451 aa, Triticum aestivum
  misc_feature (1)..(451): Ceres Seq. ID no. 12779100
MAGDGRRVVVFPFPFHGHATPLLRLASVLHTRGFAVTIFHTELRAPDPAEYPADYRFVPLRVDVPPELMASEDIAGMVTAMSEYSEAPFKERLTAALAEEGAGVRCVIADVAWYKALSVSSALGVPAMGVMTASAANYRVYMAYPMLIEKGYLPVQEARREDLVQELPPYRVKDLLRLEASSLQGFADLLRNTIEAPRQSAGLIFNTLRAIEADDLDTIRQEESLPVFALAPLHKLAPPGNTSSSLYGETQADRECLDWLDTQEPGSVVYVSFGSLAAMDPHEFVELAWGLAASKRPFLWVVRPTLIRGYESGQLPDGLDEQIRDHGRLVSWAPQVEVLAHPAVGAFITHSGWNSTVEAVSEGVPMICLPLHGDQFSNARYVCDVWKVGVEIEASSAAGQNLERGKIKAAIDKIVHDKGIRERMDAFKLAADEAVNSQTEVKALVDLINSF

SEQ ID NO: 9897 - protein, 383 aa, Triticum aestivum
  misc_feature (1)..(383): Ceres Seq. ID no. 12779101
MASEDIAGMVTAMSEYSEAPFKERLTAALAEEGAGVRCVIADVAWYKALSVSSALGVPAMGVMTASAANYRVYMAYPMLIEKGYLPVQEARREDLVQELPPYRVKDLLRLEASSLQGFADLLRNTIEAPRQSAGLIFNTLRAIEADDLDTIRQEESLPVFALAPLHKLAPPGNTSSSLYGETQADRECLDWLDTQEPGSVVYVSFGSLAAMDPHEFVELAWGLAASKRPFLWVVRPTLIRGYESGQLPDGLDEQIRDHGRLVSWAPQVEVLAHPAVGAFITHSGWNSTVEAVSEGVPMICLPLHGDQFSNARYVCDVWKVGVEIEASSAAGQNLERGKIKAAIDKIVHDKGIRERMDAFKLAADEAVNSQTEVKALVDLINSF

SEQ ID NO: 9898 - DNA, 1020 bp, Triticum aestivum
  misc_feature (1)..(1020): Ceres Seq. ID no. 12779735
ggagactctttaccctcatcggagacggaacggttacgcgtgagtctcataaggcggaggcaggaaggggagatcgtcggaggcggagcaggcggaggcaaggaaggaaggggagatagtctgaacagcgccgcttcagtttgagttccataagtacgaaacaaactcagcgcggacccgtccagcaagaaaagttcagtgagcgaagatgctagttcttcccctcctaggcaggatctcggtgcgtcgccagcgcccctggcgcgtgtggcagtcggatgacaacaagagtctggttgacggcctaaaatacgcgagtcttgaagaatgctgcagggcaatgagtatgaacttgctcctggtaaggtgaccaggagcagccaacttggtgatgggtgttgctggagtcatggcaactttgttgctcgtcggaagtgctctggctgcttctctttcctgccggttccacaaactctctttttctttgagcacgtctgtagagctgatttcgaaggagttgtcacatgcattcctttagatgaaccagtgattgaagcctacacctttcttggtttccgtcttctgtggggtactcgtcgtcttggtggctgtctctctctctctctctctgcacattaccctcttaaatttctctgttgcctgatttcctctgttatcttttcagcggattgcgtttgcaagacatgctaccgtctcttcaatattccacacccttgtttgaagaggacatgtacatgtggacatagcagggtggagaaaatatgtgaaatgtgttataatcgaagcggtgtgctgcatccattcagaggagaattccagtttggctatcacaaatagggttacccctactgctcacataatatgctaagctagacttggtgagttggtggtggggcagtatgtgtgttcgaatgctcaatgtgtatcattcgtccttacatcactcttggcaatcttatgtacttgagaactttggcaatcatataagtatgctgtctc

SEQ ID NO: 9899 - protein, 176 aa, Triticum aestivum
  misc_feature (1)..(176): Ceres Seq. ID no. 12779736
MLQGNEYELAPGKVTRSSQLGDGCCWSHGNFVARRKCSGCFSFLPVPQTLFFFEHVCRADFEGVVTCIPLDEPVIEAYTFLGFRLLWGTRRLGGCLSLSLSAHYPLKFLCCLISSVIFSADCVCKTCYRLFNIPHPCLKRTCTCGHSRVEKICEMCYNRSGVLHPFRGEFQFGYHK

SEQ ID NO: 9900 - DNA, 1715 bp, Triticum aestivum
  misc_feature (1)..(1715): Ceres Seq. ID no. 12779893
atccatccatccctccccgcgatccgctcccgtccgcaggctccccctcctcctccgttcctcttcctccccctggccccggccgtctccgaccccgcgttgcttcttcttccctcactgctcgagtctggaaccagggaggagtatctagaggagagatggcggcggagagggtcaaggacgtcggcatcctcgccatggacatctacttcccgcccaactgcgtcctccaggaagaattggaagctcatgatggcgtgagcaaagggaagtacaccattgggcttgggcaggatagcatggccttttgcactgaagtggaggatgtcatttcaatgagcttgacagtggtgaagactctcctgaaaaattataacatcgatccaaagtgcattggtcgtttggaagttggcagtgaaactgtaatagacaagagcaagtctataaagacatggttgatgcaaatatttgaggagtgtggcaatactgatattgaaggagttgattcctcaaacgcatgttatggtggaacagctgctttgtttaattgtgttaattgggttgagagcaactcatgggatggacgttatgggctcgttgtttgcacagacagcgcggtttatgctgaagggccggctcgtcctactggcggtgcagctgctattgcaatgctgattggaccaaatgctcctatttcattggaaagcaaatttagagggtcacatatggcacatgtttatgacttttacaagcctgatcttgcgagcgaatatccggtggtcgatgggaagctgtcacagacatgctatctcatggcactggattcttgctacaagaccttttgcaaaaggtacgaaaagattgaagggaagccattttcaatcgtcgacgcagattcttttgtatttcattctccatacaacaagcttgtacagaaaagttttgctcgtttatactacaatgacttcttgagaagctgcagcattgttgacaaagactcgagagaaaaattggagccctactcgggcctgtcatccgaagaaagctatcagagtcgggaccttgagaaggtttgtcagcaagttgcgaagcctctgtatgataccaaggttcaaccaacaacattgatcccaaagcaactcgggaacatgtatacggcgtcactctatgctgcttttgcatcagttgtccacaataaacgcgatgctctggtgggccagaggatcgtcatgttctcttacggcagtggcatgacatcgacaatgttctccttcaaaatcaacgaatgccagcatccgttcagcctatcaaacattgcaaacatactggatatctccaacaagttggagtctaggcatgtggttccgccgaagaaattcgtcgaggcactgaagctgatggagcaccgctacggcgccaaggacttcgtcaccagccaggacacgcgcttgctcgtcccaggcacctactacctcacccttgtcgactccatgtaccgccggttctacgccgtgaaaggcgacgctgccgccactccggtaaccaatggccattgactgattgcccttgctcagcctgaagctgcaataagcgccgcaggcgctcttagattatttatctggcagggaaggggaagggaagggtggagcttgcccagattaatctctctgtaaacttgttctaagtttgtaaagttagatagtgctgccattgcc

SEQ ID NO: 9901 - protein, 517 aa, Triticum aestivum
  misc_feature (1)..(517): Ceres Seq. ID no. 12779894
PSIPPRDPLPSAGSPSSSVPLPPPGPGRLRPRVASSSLTARVWNQGGVSRGEMAAERVKDVGILAMDIYFPPNCVLQEELEAHDGVSKGKYTIGLGQDSMAFCTEVEDVISMSLTVVKTLLKNYNIDPKCIGRLEVGSETVIDKSKSIKTWLMQIFEECGNTDIEGVDSSNACYGGTAALFNCVNWVESNSWDGRYGLVVCTDSAVYAEGPARPTGGAAAIAMLIGPNAPISLESKFRGSHMAHVYDFYKPDLASEYPVVDGKLSQTCYLMALDSCYKTFCKRYEKIEGKPFSIVDADSFVFHSPYNKLVQKSFARLYYNDFLRSCSIVDKDSREKLEPYSGLSSEESYQSRDLEKVCQQVAKPLYDTKVQPTTLIPKQLGNMYTASLYAAFASVVHNKRDALVGQRIVMFSYGSGMTSTMFSFKINECQHPFSLSNIANILDISNKLESRHVVPPKKFVEALKLMEHRYGAKDFVTSQDTRLLVPGTYYLTLVDSMYRRFYAVKGDAAATPVTNGH

SEQ ID NO: 9902 - protein, 465 aa, Triticum aestivum
  misc_feature (1)..(465): Ceres Seq. ID no. 12779895
MAAERVKDVGILAMDIYFPPNCVLQEELEAHDGVSKGKYTIGLGQDSMAFCTEVEDVISMSLTVVKTLLKNYNIDPKCIGRLEVGSETVIDKSKSIKTWLMQIFEECGNTDIEGVDSSNACYGGTAALFNCVNWVESNSWDGRYGLVVCTDSAVYAEGPARPTGGAAAIAMLIGPNAPISLESKFRGSHMAHVYDFYKPDLASEYPVVDGKLSQTCYLMALDSCYKTFCKRYEKIEGKPFSIVDADSFVFHSPYNKLVQKSFARLYYNDFLRSCSIVDKDSREKLEPYSGLSSEESYQSRDLEKVCQQVAKPLYDTKVQPTTLIPKQLGNMYTASLYAAFASVVHNKRDALVGQRIVMFSYGSGMTSTMFSFKINECQHPFSLSNIANILDISNKLESRHVVPPKKFVEALKLMEHRYGAKDFVTSQDTRLLVPGTYYLTLVDSMYRRFYAVKGDAAATPVTNGH

SEQ ID NO: 9903 - protein, 452 aa, Triticum aestivum
  misc_feature (1)..(452): Ceres Seq. ID no. 12779896
MDIYFPPNCVLQEELEAHDGVSKGKYTIGLGQDSMAFCTEVEDVISMSLTVVKTLLKNYNIDPKCIGRLEVGSETVIDKSKSIKTWLMQIFEECGNTDIEGVDSSNACYGGTAALFNCVNWVESNSWDGRYGLVVCTDSAVYAEGPARPTGGAAAIAMLIGPNAPISLESKFRGSHMAHVYDFYKPDLASEYPVVDGKLSQTCYLMALDSCYKTFCKRYEKIEGKPFSIVDADSFVFHSPYNKLVQKSFARLYYNDFLRSCSIVDKDSREKLEPYSGLSSEESYQSRDLEKVCQQVAKPLYDTKVQPTTLIPKQLGNMYTASLYAAFASVVHNKRDALVGQRIVMFSYGSGMTSTMFSFKINECQHPFSLSNIANILDISNKLESRHVVPPKKFVEALKLMEHRYGAKDFVTSQDTRLLVPGTYYLTLVDSMYRRFYAVKGDAAATPVTNGH

SEQ ID NO: 9904 - DNA, 574 bp, Triticum aestivum
  misc_feature (1)..(574): Ceres Seq. ID no. 12779958
aatcactctcgcgtcagagaaaaaagagaggggcgcacatctccgtctccgccctcccctccccgtccccctctccctccgctcccgatccgctctgcgtcgcggccgcagcggcgacgacccccccatgatctgaccgcattgccgcgcgcggtaacccgatggaggcgctgaacgagctctgcgacctggtggccgcgcacccggatctcctcctcgccgacaagctcacctggctcacctcccgctgcgcgccgcccgcgtcccccgcgtcccccgcgcagcgcgcgacccgggcgcacctccactcgctcctcgccctcgcgcgcctcctccccgcgggcgccggcccgccggcggccccgctcctcgccttcctcgcctcccgcgccttcctcgcgccggccttctggccgcagtccttcgcgcccgcgcccttcctcgccaagctcctccctctcctcgccgccgcgcccgcctcccccgccctctcctccgcgctctccgccgtgctcctcgccttttatctcaactgggatccttgaccatatatgaaaataaatgcaaattagcc

SEQ ID NO: 9905 - protein, 127 aa, Triticum aestivum
  misc_feature (1)..(127): Ceres Seq. ID no. 12779959
MEALNELCDLVAAHPDLLLADKLTWLTSRCAPPASPASPAQRATRAHLHSLLALARLLPAGAGPPAAPLLAFLASRAFLAPAFWPQSFAPAPFLAKLLPLLAAAPASPALSSALSAVLLAFYLNWDP

SEQ ID NO: 9906 - DNA, 787 bp, Triticum aestivum
  misc_feature (1)..(787): Ceres Seq. ID no. 12780295
tttgattgtcggtactgccccctaatcactagaggaggaggtgcaacccgctttagggagcaccttggaggtataccaggtgatgtgaaacagagtatcacagcatactttgacaaggaattgtcgaccaacaaagtatcaatgcagccaaagatcagcactgctttgaatgttgagtcaaaagatgtacttggccaagcttgggaaaagttttttcatgctaatgacattgctggtctgaaagcaaattgtccctattttcgttcggctgtcaagataactcaaaaccttggcccagctcctgttccaactgccaaggagattgatgggatatatttggacaagaattatgaagaagctgagcagtggctgaagatgttcaagcaagactggaggaactatggtgtaactgtgatgtgtgactcatggacagggcctactggtatgagtctcatcaatttcatggtgtattgcaatgcacggatgttctttcataaatccattgatgcttctggtcaaactcagactgcagatacgtgctgaagaagaacaaggccctgcaggcagggtgaagagaaagaaccagaagaaggcaagtggtggcggcgacgccggtggtgatgaggaagaggaatgaggaactagtagctatcaccttatatttatcaaatgttggtgttatgagtactttagctgagaggcctgagactttcatgggttatcctcttgtcattttgtcactttatcactgttgttagcatgtatgcacttctttatgtttggagct

SEQ ID NO: 9907 - protein, 180 aa, Triticum aestivum
  misc_feature (1)..(180): Ceres Seq. ID no. 12780296
FDCRYCPLITRGGGATRFREHLGGIPGDVKQSITAYFDKELSTNKVSMQPKISTALNVESKDVLGQAWEKFFHANDIAGLKANCPYFRSAVKITQNLGPAPVPTAKEIDGIYLDKNYEEAEQWLKMFKQDWRNYGVTVMCDSWTGPTGMSLINFMVYCNARMFFHKSIDASGQTQTADTC

SEQ ID NO: 9908 - protein, 133 aa, Triticum aestivum
  misc_feature (1)..(133): Ceres Seq. ID no. 12780297
MQPKISTALNVESKDVLGQAWEKFFHANDIAGLKANCPYFRSAVKITQNLGPAPVPTAKEIDGIYLDKNYEEAEQWLKMFKQDWRNYGVTVMCDSWTGPTGMSLINFMVYCNARMFFHKSIDASGQTQTADTC

SEQ ID NO: 9909 - DNA, 1782 bp, Triticum aestivum
  misc_feature (1)..(1782): Ceres Seq. ID no. 12780315
atgctcgaaactgatgaatttgtggcaggaaattctgaaggcataaagatggacattgtgaccttcacaactgcttaccagaagatgaaatcattgtgccataatatacgcaatgaaatttttacagacattgaaattcataaccatcacatacttcccagttttgtcgacctcccgaatttgacagccgccatctatagtgtggagctctcaaatagactacgctcattccttgttgcgtgccctcctactggcccttcttctccggttgcagatttggtgatcgccactgcagattttcagaaggatcttgccagctggaacatttgttctattaaagctggtgttgatgcaaaagagctgttccatttgtacattgtattatggattgaagataaacgaagagcactgctggaaaattgcagactggataaggttaaatggtcaggagttaggactcagcatatgacgacaccttttgtggatgagatgtatgatttactgaagaacacattgacggagtatgaggttatcatttgccgatggccagaatacatatttgttcttgagaatgctattgcagatatcgagaaagcggtaatcgactccctcgaaaagcagtatgtggatattttggccccacttaaagattgtatcgccccaaaaaaatttggcctcaaatatgtacaaaagctagcaaagcgcaattcaatgtgcccttatgttgtacctgaagatctagggatcctcttgaacacaatgaaaagactattggatgttctgcggccgcggatcgagagccatctgaggtcctggagttcctgtatacctcatggaggaaattcagctgccatcggcgaaagacttagtgaggttacagtaacattgagggcgaaattcagaaactacatgcaagcagttgtcgagaagttgtctgagaatacccgcatgcagaacaccacaaagctcaagaagatcatccaagactcaaaaggattggtcctggagtcagatatccgcggcaggatgcaggagttgaatgatcagctaatcggggcaataaatcatgtgcacaaagtctcagaagttcatgtgtttgtagccatatgccgaggcttttgggaccgtatggggcaggatgtcttgagtttcctggaaaaccgcaaagagaacaaggcctggtacaaaggcgcgagagttgcagtgtcggtgctcgatgatacatttgcatcccagatgcagcagttgcttggcaacacactccagcaaaaggagctggagccgcctaggtccatcatggaagtgaggtcaattctctgcaaagacgctccccgacagaagaattcgggcttctactattgatcattttgttctgtacatatcaatgcgcattagaatgtgcagcttagaaatggtgaaatggccggagcgatgatgtggagatctttgtaaagaagacaagacaatggaatagtaagaaatagaaaatagggctggtgaaatacatgagctgagaagccgcaaaatagcgctttgctggttaaccgggttaaaatatgttcccattgcctgtgggatggggctgaatgcggagactggtacttcatagggagtagtgtaagtttcactggtagcacctagctagctgagatttcacaattactaatattgatttttgaacatgttgactggattatattgatttcgtatcttgctaagagcctaagatgctaaggggcaaccttttgatggtcatcggttcatcaatgtgtttggagaggc

SEQ ID NO: 9910 - protein, 453 aa, Triticum aestivum
  misc_feature (1)..(453): Ceres Seq. ID no. 12780316
MLETDEFVAGNSEGIKMDIVTFTTAYQKMKSLCHNIRNEIFTDIEIHNHHILPSFVDLPNLTAAIYSVELSNRLRSFLVACPPTGPSSPVADLVIATADFQKDLASWNICSIKAGVDAKELFHLYIVLWIEDKRRALLENCRLDKVKWSGVRTQHMTTPFVDEMYDLLKNTLTEYEVIICRWPEYIFVLENAIADIEKAVIDSLEKQYVDILAPLKDCIAPKKFGLKYVQKLAKRNSMCPYVVPEDLGILLNTMKRLLDVLRPRIESHLRSWSSCIPHGGNSAAIGERLSEVTVTLRAKFRNYMQAVVEKLSENTRMQNTTKLKKIIQDSKGLVLESDIRGRMQELNDQLIGAINHVHKVSEVHVFVAICRGFWDRMGQDVLSFLENRKENKAWYKGARVAVSVLDDTFASQMQQLLGNTLQQKELEPPRSIMEVRSILCKDAPRQKNSGFYY

SEQ ID NO: 9911 - protein, 437 aa, Triticum aestivum
  misc_feature (1)..(437): Ceres Seq. ID no. 12780317
MDIVTFTTAYQKMKSLCHNIRNEIFTDIEIHNHHILPSFVDLPNLTAAIYSVELSNRLRSFLVACPPTGPSSPVADLVIATADFQKDLASWNICSIKAGVDAKELFHLYIVLWIEDKRRALLENCRLDKVKWSGVRTQHMTTPFVDEMYDLLKNTLTEYEVIICRWPEYIFVLENAIADIEKAVIDSLEKQYVDILAPLKDCIAPKKFGLKYVQKLAKRNSMCPYVVPEDLGILLNTMKRLLDVLRPRIESHLRSWSSCIPHGGNSAAIGERLSEVTVTLRAKFRNYMQAVVEKLSENTRMQNTTKLKKIIQDSKGLVLESDIRGRMQELNDQLIGAINHVHKVSEVHVFVAICRGFWDRMGQDVLSFLENRKENKAWYKGARVAVSVLDDTFASQMQQLLGNTLQQKELEPPRSIMEVRSILCKDAPRQKNSGFYY

SEQ ID NO: 9912 - protein, 425 aa, Triticum aestivum
  misc_feature (1)..(425): Ceres Seq. ID no. 12780318
MKSLCHNIRNEIFTDIEIHNHHILPSFVDLPNLTAAIYSVELSNRLRSFLVACPPTGPSSPVADLVIATADFQKDLASWNICSIKAGVDAKELFHLYIVLWIEDKRRALLENCRLDKVKWSGVRTQHMTTPFVDEMYDLLKNTLTEYEVIICRWPEYIFVLENAIADIEKAVIDSLEKQYVDILAPLKDCIAPKKFGLKYVQKLAKRNSMCPYVVPEDLGILLNTMKRLLDVLRPRIESHLRSWSSCIPHGGNSAAIGERLSEVTVTLRAKFRNYMQAVVEKLSENTRMQNTTKLKKIIQDSKGLVLESDIRGRMQELNDQLIGAINHVHKVSEVHVFVAICRGFWDRMGQDVLSFLENRKENKAWYKGARVAVSVLDDTFASQMQQLLGNTLQQKELEPPRSIMEVRSILCKDAPRQKNSGFYY

SEQ ID NO: 9913 - DNA, 1407 bp, Triticum aestivum
  misc_feature (1)..(1407): Ceres Seq. ID no. 12780411
cggtaagaagttacatgttcggtcgccgcacagaaattcaacatttcagaagctttttgctttgcctcacgaagagttccttatagcagactatgcatgttccttaaagaggaaattgccattgcagggaaggctatttctgtcaaccagaatagttggtttctatgctaatttgtttgggcataaaacgaaattcttctttctgtgggacgatgtcgaggaagtcgaggtgttacctccatctttcacaacagtaggcaccccatcattggtgtttatgttaaagagtgggcgtgggcttgacgccaagaatggcgcgaagtcgcaggataaggaagggaggctgaaattccagttccattcatttgcatcgttcaacaaggctagtaggtttgtatcctccgatacctccatcggtgtcgaaataagtaggttcccattgatgaaaaaccaccgtttctttttaggacaatcattggtctgtggaaaacaaagtcttcagctattgaacagagggccaagctggaagaagatcatggagatgagagctatgacgatcttgacgacgttcagtctatgttgagcattggagacgtgaccctctcaaaggagtatacagtggaacatcctattgatgtgagatctctattgcttctcctctcttctgttcttctgtatccaacggatatcctttgattcctcgttggcaaatttgcaggcagatttgctgatgggggtgttcgacggtggccccctggagactcggacgatgagcagggtggggtgcctcgactacacggcgaccccgtgggaggagaccaagccgggcgtgctggagcggcacgccagctacaagttcaaccgctacatgtccatcttcggcggcgaggtggtgagcacccagctgaaatcgccctcggaggacggcgacgggtggacggtgtacgacgtcatgacgctgcgcaacgtccccttcggcgactacttccgggtgcatctgaggtacgacgtacggagcgtggcgtcgtcggagccgccgagctgccggtgcgaggtgctggtgggcatcgagtggctcaagagcagcaagttccagaagcggatcgccaggaacatctgcgacaagctggcccacagggccaaggaagtcctcgaggtggccggcaaggagatagcctcggcaatgtcgggctcggctagctaactgagttggaggatcgggcgtttttgttgaccatcttccggcaaagctgcgtggagcgtagcagcttagtcgttaccgtttcgtagctgacggagacgtgacacgcgcgaacagcagtgcgctaacaccccaatacccgatgtattagtgcctacaaacttatacagaagtaaataaaaagagcggaggaaatcttctgtggg

SEQ ID NO: 9914 - protein, 193 aa, Triticum aestivum
  misc_feature (1)..(193): Ceres Seq. ID no. 12780412
GKKLHVRSPHRNSTFQKLFALPHEEFLIADYACSLKRKLPLQGRLFLSTRIVGFYANLFGHKTKFFFLWDDVEEVEVLPPSFTTVGTPSLVFMLKSGRGLDAKNGAKSQDKEGRLKFQFHSFASFNKASRFVSSDTSIGVEISRFPLMKNHRFFLGQSLVCGKQSLQLLNRGPSWKKIMEMRAMTILTTFSLC

SEQ ID NO: 9915 - protein, 157 aa, Triticum aestivum
  misc_feature (1)..(157): Ceres Seq. ID no. 12780413
MGVFDGGPLETRTMSRVGCLDYTATPWEETKPGVLERHASYKFNRYMSIFGGEVVSTQLKSPSEDGDGWTVYDVMTLRNVPFGDYFRVHLRYDVRSVASSEPPSCRCEVLVGIEWLKSSKFQKRIARNICDKLAHRAKEVLEVAGKEIASAMSGSAS

SEQ ID NO: 9916 - protein, 144 aa, Triticum aestivum
  misc_feature (1)..(144): Ceres Seq. ID no. 12780414
MSRVGCLDYTATPWEETKPGVLERHASYKFNRYMSIFGGEVVSTQLKSPSEDGDGWTVYDVMTLRNVPFGDYFRVHLRYDVRSVASSEPPSCRCEVLVGIEWLKSSKFQKRIARNICDKLAHRAKEVLEVAGKEIASAMSGSAS

SEQ ID NO: 9917 - protein, 101 aa, Triticum aestivum
  misc_feature (1)..(101): Ceres Seq. ID no. 12780415
MLKSGRGLDAKNGAKSQDKEGRLKFQFHSFASFNKASRFVSSDTSIGVEISRFPLMKNHRFFLGQSLVCGKQSLQLLNRGPSWKKIMEMRAMTILTTFSLC

SEQ ID NO: 9918 - DNA, 702 bp, Triticum aestivum
  misc_feature (1)..(702): Ceres Seq. ID no. 12780526
catacggccacctgacactctcaataattgattactacagcacaaatttctcaatcggtgctaacacttgtcgagtttgcttaacttatgacgagtttgtgaagaagtgttgtgaccccaagaagttaactgtgagcgacatattcgccctacaacttatgcaggtaccacaggtgacagaagaaactgcaattgcagttatagagctctacccgactcttgtctcacttgctcgcgcgtactccatgcttgatggcgatacccctgcccaagagaagatgctgaacatgaagagcaagatggtgaacgcaggggctagcagaaatatcttcaagcttgtctggggtgaagggtgaaatattactgacctagttacctaaatgggttccttcctgacttgacttggttcaaccggccttttgtcaccatctcgatgattttggcgccacttcttgtgatgaagctccattgttcctggagatgtcgtcgcataacttgcatgttccgaaggcaaattaagatgcttctttctgcgtgccttggggcgctggaagtttcatcacctaaacctcccgatcaggggggttacctccgtgttgtagacctgcatgccttgcaatgagctggctatgtgtttcatatgtactacttactagttatgtactaagtattaagtgtcttgtgctatgcattgtcttgtgt

SEQ ID NO: 9919 - protein, 117 aa, Triticum aestivum
  misc_feature (1)..(117): Ceres Seq. ID no. 12780527
YGHLTLSIIDYYSTNFSIGANTCRVCLTYDEFVKKCCDPKKLTVSDIFALQLMQVPQVTEETAIAVIELYPTLVSLARAYSMLDGDTPAQEKMLNMKSKMVNAGASRNIFKLVWGEG

SEQ ID NO: 9920 - protein, 65 aa, Triticum aestivum
  misc_feature (1)..(65): Ceres Seq. ID no. 12780528
MQVPQVTEETAIAVIELYPTLVSLARAYSMLDGDTPAQEKMLNMKSKMVNAGASRNIFKLVWGEG

SEQ ID NO: 9921 - protein, 62 aa, Triticum aestivum
  misc_feature (1)..(62): Ceres Seq. ID no. 12780529
MILAPLLVMKLHCSWRCRRITCMFRRQIKMLLSACLGALEVSSPKPPDQGGYLRVVDLHALQ

SEQ ID NO: 9922 - DNA, 1545 bp, Triticum aestivum
  misc_feature (1)..(1545): Ceres Seq. ID no. 12780574
cactccagcatccagacccgagccattccccgagcagccaagccacacgcacacgcacgcgcacccgcacggaaaccctagctcccgcggcgcacctaccgcaggcgtacagtcagtcggtcggccgcgagagtctgccggcggatggtgtcgatgagcacgacgcccaagccgctcgaggccggggcggcggcggccgccgtggggggaggcggaggggacggagggggagggggaggcgggaaggggaaggagcagcagcaggtggtgccggtggccgcggggccgccgatggccgtgccggcggacgcggcggcggcggcggaggacgccaggatgaaggtcaggaagccctacaccatcaccaagtcccgggagagctggaccgagcccgagcacgacaagttcctcgaggccctgcagctgtttgatcgtgattggaaaaagatagaagcatttgttggctcaaaaactgtgatacagataaggagccatgcacagaagtactttttgaaggttcaaaagaacggtacaggcgaacatttaccaccgcctcggccgaagcgtaaagcagcacatccatatccgcagaaggcctctaaaactgcccctgtagcaccccaagctgttttatcacaacaacctgctcctcctccccctcctccgagggagcaagatggtgttgatgtgtctatggatgcatctatggttgtaccaaacacaaatgcaaatgcggtggtgccttcctgggacaatgctcttgttcaacctacacaagttacaagtgccattgccacaaataactgctctagtagtatagagagccaatctggaacatggccaacctctgaagcagttgaacaagaaaatgtgctgccacaaatgcgggctatgccagatttttcacaagtatacaacttcctgggaagtgtattcgatccagatacaactggacatttgcagaggttaaaggcaatggatcctattgatgtggaaacggtactactgctcatgcgaaatctatcggtgaacttgattaacccagaatttgaggcccataggcagttgctctcgtcgtatggttctggtggagacgaaaataaacctgaaggcatggaaaatttcgggtcccagagtagccatctcccatccatggtaacgagtgagtgagcgaacatcagccattcaccatggcagcttcagttgtttccgagagacgcttgtgttctccttgtattggtcctgtcggcgtctagtctggctatttatgaatgttggttggggcagtgacatttgtacagcttccgaaatggtgctctaaccctaggctagggttgcttaccaagttggtgtagatagccagttttgcgtgctcaagcaattcttttccctagggcggggcatagctcaagatggttcttgtatgtatacaccgataagtatgtgcttgtggatgtacatatgtgttattgtgtaaacgtttgagatactgcgagtatcctatcaaggcaaataataagctgaataataaatccagcttggcgt

SEQ ID NO: 9923 - protein, 341 aa, Triticum aestivum
  misc_feature (1)..(341): Ceres Seq. ID no. 12780575
MVSMSTTPKPLEAGAAAAAVGGGGGDGGGGGGGKGKEQQQVVPVAAGPPMAVPADAAAAAEDARMKVRKPYTITKSRESWTEPEHDKFLEALQLFDRDWKKIEAFVGSKTVIQIRSHAQKYFLKVQKNGTGEHLPPPRPKRKAAHPYPQKASKTAPVAPQAVLSQQPAPPPPPPREQDGVDVSMDASMVVPNTNANAVVPSWDNALVQPTQVTSAIATNNCSSSIESQSGTWPTSEAVEQENVLPQMRAMPDFSQVYNFLGSVFDPDTTGHLQRLKAMDPIDVETVLLLMRNLSVNLINPEFEAHRQLLSSYGSGGDENKPEGMENFGSQSSHLPSMVTSE

SEQ ID NO: 9924 - protein, 338 aa, Triticum aestivum
  misc_feature (1)..(338): Ceres Seq. ID no. 12780576
MSTTPKPLEAGAAAAAVGGGGGDGGGGGGGKGKEQQQVVPVAAGPPMAVPADAAAAAEDARMKVRKPYTITKSRESWTEPEHDKFLEALQLFDRDWKKIEAFVGSKTVIQIRSHAQKYFLKVQKNGTGEHLPPPRPKRKAAHPYPQKASKTAPVAPQAVLSQQPAPPPPPPREQDGVDVSMDASMVVPNTNANAVVPSWDNALVQPTQVTSAIATNNCSSSIESQSGTWPTSEAVEQENVLPQMRAMPDFSQVYNFLGSVFDPDTTGHLQRLKAMDPIDVETVLLLMRNLSVNLINPEFEAHRQLLSSYGSGGDENKPEGMENFGSQSSHLPSMVTSE

SEQ ID NO: 9925 - protein, 292 aa, Triticum aestivum
  misc_feature (1)..(292): Ceres Seq. ID no. 12780577
MAVPADAAAAAEDARMKVRKPYTITKSRESWTEPEHDKFLEALQLFDRDWKKIEAFVGSKTVIQIRSHAQKYFLKVQKNGTGEHLPPPRPKRKAAHPYPQKASKTAPVAPQAVLSQQPAPPPPPPREQDGVDVSMDASMVVPNTNANAVVPSWDNALVQPTQVTSAIATNNCSSSIESQSGTWPTSEAVEQENVLPQMRAMPDFSQVYNFLGSVFDPDTTGHLQRLKAMDPIDVETVLLLMRNLSVNLINPEFEAHRQLLSSYGSGGDENKPEGMENFGSQSSHLPSMVTSE

SEQ ID NO: 9926 - DNA, 1468 bp, Triticum aestivum
  misc_feature (1)..(1468): Ceres Seq. ID no. 12780670
aaccagtgtcagcaacaacagtccccaccgcccacaagaccctcaactgaattcacaccacgccggtgccgtagtctcaacccagctgctcgtgccggtgccagcggcagcgagaacgaggagcgatgctggtcaggagcgcgtccacgccggtgctcggcacgctgcacgcggcatccgggaccggcggccactccccggccgtccacttcgccgagtcctcgcccacggtcgcctaccacccgccggccatctcctgcagcctgtccgccggcggtggcggcggctcgggctcggaccacgaccgctcccgcggcggcggcctgcgccgcgcgtgctcggacggcaacctcgccgcgctgggcggccccgcggacgaccaccaccaccacctgccgccgcgctccaggccggcgctcgagacgatccagtcgttcacggcgcgcgacggggccagggacgaggaggaggaggaggacgacgacgctgaccaagagacgagctttgggcagttcggcttcggcagcacgtacgcgcaggagcacccgctgttcctggccaggggcctcgggatcgaccggctgggctcgggcctgctgagcgccgactgcgggggcggcatcgacggcggcgccgggggcagctacctggcggcctccggcggcgggggaggggaccgctccggcatcgagatccactacaagaggctcatcggcgaggacccctgcaacggcctcttcctcaggaactacgcgcagttcctcaaccaggtgaaaggggatcggcggagggcggaggagtactactcccgcgcgatcctggcggaccccgacgacggcgagctgctgtcggagtacgcgaggctggtgtgggaggtgcacggcgacgaggagcgcgcgtccagctacttcgaccgggcggccagggccgacccgcacaacagccacgtcctcgccgcgcaggccgccttcctgtgggacacggacgacggcgccgggcccgaggacgacgatgccatgagctacaccgggttcccggccgctcacccgtccatggcttccgccacgagctgaaagaaaggaacctcgccgccgtgccgtccctctctgaagctgacgttgatcggagctcgtgtggttgcttgcttcagaccttcagtagcagattcccacattgtccttgtaggcggtcagcgtgacttgcatcggagtctccgccttgtacttctgtgtcctggcgttgaaatccttgcagaaggccatcagattgagcctgtagaaacccagagctggcccgacaggcggtgcggggcgcgcagctccagcaggaactaggaggcggattgtcgctagaataggcttccgtgttgccacatctttaagtgttgccatgttgctctcctttagcagatctgcagtgaaaaccggcatcaatcaatatgacaggtttactaggaactacttatccc

SEQ ID NO: 9927 - protein, 315 aa, Triticum aestivum
  misc_feature (1)..(315): Ceres Seq. ID no. 12780671
MLVRSASTPVLGTLHAASGTGGHSPAVHFAESSPTVAYHPPAISCSLSAGGGGGSGSDHDRSRGGGLRRACSDGNLAALGGPADDHHHHLPPRSRPALETIQSFTARDGARDEEEEEDDDADQETSFGQFGFGSTYAQEHPLFLARGLGIDRLGSGLLSADCGGGIDGGAGGSYLAASGGGGGDRSGIEIHYKRLIGEDPCNGLFLRNYAQFLNQVKGDRRRAEEYYSRAILADPDDGELLSEYARLVWEVHGDEERASSYFDRAARADPHNSHVLAAQAAFLWDTDDGAGPEDDDAMSYTGFPAAHPSMASATS

SEQ ID NO: 9928 - protein, 199 aa, Triticum aestivum
  misc_feature (1)..(199): Ceres Seq. ID no. 12780672
NQCQQQQSPPPTRPSTEFTPRRCRSLNPAARAGASGSENEERCWSGARPRRCSARCTRHPGPAATPRPSTSPSPRPRSPTTRRPSPAACPPAVAAARARTTTAPAAAACAARARTATSPRWAAPRTTTTTTCRRAPGRRSRRSSRSRRATGPGTRRRRRTTTLTKRRALGSSASAARTRRSTRCSWPGASGSTGWARAC

SEQ ID NO: 9929 - protein, 162 aa, Triticum aestivum
  misc_feature (1)..(162): Ceres Seq. ID no. 12780673
TSVSNNSPHRPQDPQLNSHHAGAVVSTQLLVPVPAAARTRSDAGQERVHAGARHAARGIRDRRPLPGRPLRRVLAHGRLPPAGHLLQPVRRRWRRLGLGPRPLPRRRPAPRVLGRQPRRAGRPRGRPPPPPAAALQAGARDDPVVHGARRGQGRGGGGGRRR

SEQ ID NO: 9930 - DNA, 996 bp, Triticum aestivum
  misc_feature (1)..(996): Ceres Seq. ID no. 12780822
atacttctctagtttatactaccccggatccccttgctttgcgcgcgctagtaggagtacgccgcctgccgccatctccgttagactagtcgccagcgccatatggaggactacggcggcgtggcgagcctggtggcgtccggggtggtgttgtggtcgacggcgttcctgctgctgcgggcgctgctccccaagcgctcctacgacttctgcaaccgcgcggtctccaccatgcacgccgtcgccggcgtcgccctcggctgcctctccgtgcaggactgggcctcccccgtctcccccgtcgcctcaccctcctcgccaagccagatgagggcgctggcggtgacgctgtcctacatgatctacgacggggcgtgctgccacctgagcggcgacgcgcggttggacaacgccttgcaccacctcatcagcatcgtcggcctcgccgccggcctcgcctaccagaggtgtgggacggagctggtggcgtgcctgctcgtcacggagatatccagcccgctgctgcacctcagggagatgctcaaggagctcggcgtcaaggacacggacctcaacctcctcgtcgacatcctgttcgcggtgaccttctcggtggcacggatggtttgcgggacgtacgtcacctaccgcactgtcacggctgacaaccccatcctcatcaaggcgatggcgacgagcttgctgctggtgagcgcctactggttcttgaggatcctcaggatggtcaggcacaagattgggaagaagaggctggcgtccaaagccgccggcaaggaatctatgtgatgccacaagtggtgtctcgccgcaattattgttgaaaatgcacgttatgtagtagtactactatctagcgcattaatcgtgtggtgggtaaaggatgatgtcccaagcatgagatgcatgtattctggtcattttcattttattaatgtgcatgaactgttaatgtcacaagcatgagctgtttcgctc

SEQ ID NO: 9931 - protein, 234 aa, Triticum aestivum
  misc_feature (1)..(234): Ceres Seq. ID no. 12780823
MEDYGGVASLVASGVVLWSTAFLLLRALLPKRSYDFCNRAVSTMHAVAGVALGCLSVQDWASPVSPVASPSSPSQMRALAVTLSYMIYDGACCHLSGDARLDNALHHLISIVGLAAGLAYQRCGTELVACLLVTEISSPLLHLREMLKELGVKDTDLNLLVDILFAVTFSVARMVCGTYVTYRTVTADNPILIKAMATSLLLVSAYWFLRILRMVRHKIGKKRLASKAAGKESM

SEQ ID NO: 9932 - protein, 191 aa, Triticum aestivum
  misc_feature (1)..(191): Ceres Seq. ID no. 12780824
MHAVAGVALGCLSVQDWASPVSPVASPSSPSQMRALAVTLSYMIYDGACCHLSGDARLDNALHHLISIVGLAAGLAYQRCGTELVACLLVTEISSPLLHLREMLKELGVKDTDLNLLVDILFAVTFSVARMVCGTYVTYRTVTADNPILIKAMATSLLLVSAYWFLRILRMVRHKIGKKRLASKAAGKESM

SEQ ID NO: 9933 - protein, 159 aa, Triticum aestivum
  misc_feature (1)..(159): Ceres Seq. ID no. 12780825
MRALAVTLSYMIYDGACCHLSGDARLDNALHHLISIVGLAAGLAYQRCGTELVACLLVTEISSPLLHLREMLKELGVKDTDLNLLVDILFAVTFSVARMVCGTYVTYRTVTADNPILIKAMATSLLLVSAYWFLRILRMVRHKIGKKRLASKAAGKESM

SEQ ID NO: 9934 - DNA, 544 bp, Triticum aestivum
  misc_feature (1)..(544): Ceres Seq. ID no. 12780952
cttcccgtgccaccacagccgccgcctcccccaccaacctgccccgacccgctcccgacctccgaggcaagcagcgcctccgccatggcgttcgagaagatcaaggtcaccaaccccatcgtcgagatggacggcgatgagatgaccagagtattctggcagtctatcaaggacaagcttatcttcccatttttggacttggacattaagtactttgacttgggagttctacaccgcgatgcaactgatgacaaggttacagtggaggctgcagaggcaggggaggcggcggaggcaggtttaacaggaggtgaagacctagaagagtataatctatttttgacgggagtttgagagatgaaagaaggcacagggaatcgtcaaagttttgactgcgccgtgtatcgggtttttttgttttatttgttgtaagtgttctgtcccccgagattatgacgatcaagtttgccaacggaagagtgtaaaatattgatctgatactcagccactgttatgaacgagaatatatgttgttttgttttgc

SEQ ID NO: 9935 - protein, 117 aa, Triticum aestivum
  misc_feature (1)..(117): Ceres Seq. ID no. 12780953
LPVPPQPPPPPPTCPDPLPTSEASSASAMAFEKIKVTNPIVEMDGDEMTRVFWQSIKDKLIFPFLDLDIKYFDLGVLHRDATDDKVTVEAAEAGEAAEAGLTGGEDLEEYNLFLTGV

SEQ ID NO: 9936 - protein, 89 aa, Triticum aestivum
  misc_feature (1)..(89): Ceres Seq. ID no. 12780954
MAFEKIKVTNPIVEMDGDEMTRVFWQSIKDKLIFPFLDLDIKYFDLGVLHRDATDDKVTVEAAEAGEAAEAGLTGGEDLEEYNLFLTGV

SEQ ID NO: 9937 - protein, 75 aa, Triticum aestivum
  misc_feature (1)..(75): Ceres Seq. ID no. 12780955
MDGDEMTRVFWQSIKDKLIFPFLDLDIKYFDLGVLHRDATDDKVTVEAAEAGEAAEAGLTGGEDLEEYNLFLTGV

SEQ ID NO: 9938 - DNA, 721 bp, Triticum aestivum
  misc_feature (1)..(721): Ceres Seq. ID no. 12783233
atgtaggttctttcttccgctccggtcctggaatttgggcagccagcactgagccttcatcaccccttccgccagaggcaaagcaagactctgaactaactgaagggactgttttgactggctgtgaagaaggcccaaggaggaggcggccatgagcgagtctgggcagaggtcgagggcgtggccaccgggggacgccgcgatgacgccgtccgagccggctgcggccgcggacgcgacgggcgaggcgacgacgctgagggacttcggcacgtccatggacgccatctccttcggcttcgcggccacggccatcctcatctccatcttcctcctcatggccatcttcgagcacctcatcaggccccaggccttccaggcgccggccgactccccgggcggcagacgccggcgtggccaccgctcgcccggcaaaccccggagcccgcccatggtgcagacggtgctgcaggcggcggacctgtcggtgctgatgccggggcagcggtacccgacctacctcgcgcagccggcgccattgccgccgccgtgccccagggagggggtgcactggccgccgcacgaccaccaccgctcccacatgccaccctgaccatctcactcggtcgaaagtttcgttcagtttttgtacagcgggagattgttgtaaaagccggagaatgtgaacaaaaatcctggtttgttgtcggtgccgttctcc

SEQ ID NO: 9939 - protein, 153 aa, Triticum aestivum
  misc_feature (1)..(153): Ceres Seq. ID no. 12783234
MSESGQRSRAWPPGDAAMTPSEPAAAADATGEATTLRDFGTSMDAISFGFAATAILISIFLLMAIFEHLIRPQAFQAPADSPGGRRRRGHRSPGKPRSPPMVQTVLQAADLSVLMPGQRYPTYLAQPAPLPPPCPREGVHWPPHDHHRSHMPP

SEQ ID NO: 9940 - protein, 136 aa, Triticum aestivum
  misc_feature (1)..(136): Ceres Seq. ID no. 12783235
MTPSEPAAAADATGEATTLRDFGTSMDAISFGFAATAILISIFLLMAIFEHLIRPQAFQAPADSPGGRRRRGHRSPGKPRSPPMVQTVLQAADLSVLMPGQRYPTYLAQPAPLPPPCPREGVHWPPHDHHRSHMPP

SEQ ID NO: 9941 - protein, 111 aa, Triticum aestivum
  misc_feature (1)..(111): Ceres Seq. ID no. 12783236
MDAISFGFAATAILISIFLLMAIFEHLIRPQAFQAPADSPGGRRRRGHRSPGKPRSPPMVQTVLQAADLSVLMPGQRYPTYLAQPAPLPPPCPREGVHWPPHDHHRSHMPP

SEQ ID NO: 9942 - DNA, 1003 bp, Triticum aestivum
  misc_feature (1)..(1003): Ceres Seq. ID no. 12784040
agaaacaaccccaagcggcagccgaagaactcagaacctccgagagagacgacccaactcagaattcgcaagcctcgcttactcgccggagcagcccacgcaccagatggccgcggcaatggaggtcgacgccggcggagagaagccgtcggagaaggagctcttcctcgccgcggagtccggggacgccagcgtcttcgcctccctcgcccccgccgacctcgccgccgctctctccctccgcaacgaggacggccgctccctcgtccacgtcgccgccgcctccgcccgccccgaggccgtcgccgcgcttgtggctgcggggggcgacgccgtggcgagcgccgtgaacgggaaggacgaggaagggtgggcgccgattcactcggtggccagcagcggcaacgccgagatcctcgacatcctgctcggtcacggtgcaaatgttgatttgactactgatgctggccgaactgctcttcactatgctgctagtaaagggaggcttaacattgctgaaacgctgatagctcatcgtgcaaatgtcaacaagaaagataagtttggctgcacacccctgcatagagctgcaagtactggaaatgctgagctgtgtgaatacctgcttgaagaaggcgcagatattgatgcagttgacaagctaggacaatcacctctaatgcatgccgtcatatgcgaggacagaggggttgcccttctgctgatcagacatggtgccgatgttgacattgaagacaaggagggctacactgtccttggccgagcctctgatagcttcaggcctgcactgattgatgcggccaaggcaatgctcgaaggctgaggatgtttagctgccctaaggtaaaagatagatgggagaacatctggaacagaaaaaccgtcgttgtgtacctcgtgatacaagtatgagctgtttccctccaaaatcagattgaccagtcagactttttgttcgtggttaatgattctcgtgttgaag

SEQ ID NO: 9943 - protein, 280 aa, Triticum aestivum
  misc_feature (1)..(280): Ceres Seq. ID no. 12784041
ETTPSGSRRTQNLRERRPNSEFASLAYSPEQPTHQMAAAMEVDAGGEKPSEKELFLAAESGDASVFASLAPADLAAALSLRNEDGRSLVHVAAASARPEAVAALVAAGGDAVASAVNGKDEEGWAPIHSVASSGNAEILDILLGHGANVDLTTDAGRTALHYAASKGRLNIAETLIAHRANVNKKDKFGCTPLHRAASTGNAELCEYLLEEGADIDAVDKLGQSPLMHAVICEDRGVALLLIRHGADVDIEDKEGYTVLGRASDSFRPALIDAAKAMLEG

SEQ ID NO: 9944 - protein, 245 aa, Triticum aestivum
  misc_feature (1)..(245): Ceres Seq. ID no. 12784042
MAAAMEVDAGGEKPSEKELFLAAESGDASVFASLAPADLAAALSLRNEDGRSLVHVAAASARPEAVAALVAAGGDAVASAVNGKDEEGWAPIHSVASSGNAEILDILLGHGANVDLTTDAGRTALHYAASKGRLNIAETLIAHRANVNKKDKFGCTPLHRAASTGNAELCEYLLEEGADIDAVDKLGQSPLMHAVICEDRGVALLLIRHGADVDIEDKEGYTVLGRASDSFRPALIDAAKAMLEG

SEQ ID NO: 9945 - protein, 241 aa, Triticum aestivum
  misc_feature (1)..(241): Ceres Seq. ID no. 12784043
MEVDAGGEKPSEKELFLAAESGDASVFASLAPADLAAALSLRNEDGRSLVHVAAASARPEAVAALVAAGGDAVASAVNGKDEEGWAPIHSVASSGNAEILDILLGHGANVDLTTDAGRTALHYAASKGRLNIAETLIAHRANVNKKDKFGCTPLHRAASTGNAELCEYLLEEGADIDAVDKLGQSPLMHAVICEDRGVALLLIRHGADVDIEDKEGYTVLGRASDSFRPALIDAAKAMLEG

SEQ ID NO: 9946 - DNA, 1160 bp, Triticum aestivum
  misc_feature (1)..(1160): Ceres Seq. ID no. 12784064
aaaaatcctcgatctcaccaacataagccttcctcattcattcattcagctgtacaactctgatcatcgaccagcagcgggattctcctcgtctgatttgttcatccgacacccgatcgatccgcagcagcaggtgatccggctacaatggaggcagcggtagctcgcgccgacacagcagcattcttctcgggccaggaggacgcggccggggggagcatatccagactaccggctcgggtcgccggctcgatcgtccgcggcgtgatcaccttcatcttcgccacagtgggcacgattctgggagccatcacgggcgggatgatcgggctggcgacggagagcggtctcgtccgcggcgcgggcatcggcgccatctccggcgccgtggtggccatggaggttgtcgacaggtccatggccatgtggcgctccgacgagtgcggcatctggagcgtcctatacgtgcttgacgtgatctggagcctcctgacgggtcgtctggtgcgcgagaaggtggaccccgcagtgcagaacgcggtcgacagccagatgaacgccgcgggcgacgggttcagcgacagcccgccgacgctctccgagatgtttgacatgggctccgcctccttcaaaggcatggctgcagacgccatcgccgagctccccgcgacgacgatcaccgagcagcaagccgccgtgcaggacgggggctgctccgtgtgcctccaggagttcgaggccggcgaggcggcgcggagcctgccggagtgccgccacacgttccacatgtcgtgcatagacgggtggctttgccggcatgcgtcgtgcccgctgtgccgccgcgccgtctaggcctggcgtgcccggctcgttaggatcgatgtgtgcatagccagcgtatatacacacgtgttacgcgcgtgtgtgagtgtggcgctagcacgtacggcacgcgcacgcacatacgggaagttcgttaatttgttatacgtagttagctactagttgggttgagactgacatgacatgacacttgtgccgacaagttctttcgtgacttgttcgttgccttcatttctgcggaaattatgattgtattgctacaccacacgcgcggctggttgcgaatatctatacagaaaatcatcagcgtttagatt

SEQ ID NO: 9947 - protein, 234 aa, Triticum aestivum
  misc_feature (1)..(234): Ceres Seq. ID no. 12784065
MEAAVARADTAAFFSGQEDAAGGSISRLPARVAGSIVRGVITFIFATVGTILGAITGGMIGLATESGLVRGAGIGAISGAVVAMEVVDRSMAMWRSDECGIWSVLYVLDVIWSLLTGRLVREKVDPAVQNAVDSQMNAAGDGFSDSPPTLSEMFDMGSASFKGMAADAIAELPATTITEQQAAVQDGGCSVCLQEFEAGEAARSLPECRHTFHMSCIDGWLCRHASCPLCRRAV

SEQ ID NO: 9948 - protein, 176 aa, Triticum aestivum
  misc_feature (1)..(176): Ceres Seq. ID no. 12784066
MIGLATESGLVRGAGIGAISGAVVAMEVVDRSMAMWRSDECGIWSVLYVLDVIWSLLTGRLVREKVDPAVQNAVDSQMNAAGDGFSDSPPTLSEMFDMGSASFKGMAADAIAELPATTITEQQAAVQDGGCSVCLQEFEAGEAARSLPECRHTFHMSCIDGWLCRHASCPLCRRAV

SEQ ID NO: 9949 - protein, 151 aa, Triticum aestivum
  misc_feature (1)..(151): Ceres Seq. ID no. 12784067
MEVVDRSMAMWRSDECGIWSVLYVLDVIWSLLTGRLVREKVDPAVQNAVDSQMNAAGDGFSDSPPTLSEMFDMGSASFKGMAADAIAELPATTITEQQAAVQDGGCSVCLQEFEAGEAARSLPECRHTFHMSCIDGWLCRHASCPLCRRAV

SEQ ID NO: 9950 - DNA, 682 bp, Triticum aestivum
  misc_feature (1)..(682): Ceres Seq. ID no. 12784091
atccgccgcgcgcggtgcagcttctcgtggatttccccctagctagctagagccacagctacagcaatggaagctctcgcctcgtcgccgcgggctctcttcgcccgcaccgcctctccgacgacggcgctggtcacgccagcaagatggacgccgtcatcgagcaggcgtgtcaaggccgccgccgccgccgagccggccggcgaggcgaagccggctgccgcagcggcgccgtcggcacccaagaagatcctcaagaagaagcccgtatactccatgaagaaagggcagatcgtgcgcgtcgagaaagaaaagtatctgaacagcatcaattacctatcagtggggcacccacccttctacaaggggctagactacatatatgaagaccgcggcgaggttttggacatcagaatctttgaagagaccggagagtatgctctgatcgcgtgggtggggattccaaccccgccggcatggctcccaacttatatgctcatcaagtcagacaaactcgactacgagaggatatgattgttggatgagcagttgcaagggagaacgatgttctctgaataaatcaatgttgctatgtggccatgttgtgacattgctccatggatgcaaaacgaagcagttgtaaattgaagaaacaatagtgaaatatatccaaagttttttt

SEQ ID NO: 9951 - protein, 155 aa, Triticum aestivum
  misc_feature (1)..(155): Ceres Seq. ID no. 12784092
MEALASSPRALFARTASPTTALVTPARWTPSSSRRVKAAAAAEPAGEAKPAAAAAPSAPKKILKKKPVYSMKKGQIVRVEKEKYLNSINYLSVGHPPFYKGLDYIYEDRGEVLDIRIFEETGEYALIAWVGIPTPPAWLPTYMLIKSDKLDYERI

SEQ ID NO: 9952 - protein, 85 aa, Triticum aestivum
  misc_feature (1)..(85): Ceres Seq. ID no. 12784093
MKKGQIVRVEKEKYLNSINYLSVGHPPFYKGLDYIYEDRGEVLDIRIFEETGEYALIAWVGIPTPPAWLPTYMLIKSDKLDYERI

SEQ ID NO: 9953 - protein, 79 aa, Triticum aestivum
  misc_feature (1)..(79): Ceres Seq. ID no. 12784094
MDAVIEQACQGRRRRRAGRRGEAGCRSGAVGTQEDPQEEARILHEERADRARRERKVSEQHQLPISGAPTLLQGARLHI

SEQ ID NO: 9954 - DNA, 1333 bp, Triticum aestivum
  misc_feature (1)..(1333): Ceres Seq. ID no. 12784099
acaaaacaaaacgaccgcccctccgcccttctcccgccctcgcccctctccctctcctcctcccctccttccccggcaagactagggtttgcagccaccgggcctcaccatgtacaacggaggcgaccactacgacgggaacggcggcggcgccgccaacgccaacagcctcttcagcggcggcgggttcatgccctcgcagaccaccaacaccccggagggcagcggcggcatcaccaagactcgcggcgcgcagacgctgctcccgctcaccgtcaagcagattatggacgcgtcccagaccaacgacgacaagtccagtttcgctgtcaatggcaccgaggtgtccacggttaggcttgtaggacgcatgatgaataaggcagagcggatgacagatgtacaattcattcttgatgatggtacaggcaggatagaagtgaatcgctgggaaaatgagacatcggacactacagaaatgagtttagtcaaggatggtgactatgttattgtcaatggtggtctgaaaagctttcaagggaagcgtcacattgttgcttattccgtgcggcttgtaaccaactacaatgatataacacatcactttctgtactgcatttatgtgcatttggatcttgccaaggctaagaaatctgggacacagcctcaagtaactgctaatgcatcatggaaccaagctccaccccctaataatcaggccccaacactatctgcatctgggaatgctggtgggcaagatttaactgatatggtcatgaatgtttttcatgacccagtgcttgtaaacctggagcatggagttagtatcgaacaggttgcaagccgtcttaacatatcagatgcacttgccaggtcgactgttacacatcttattgatgttggcaacctctatccaactatcgatgacaaccattacaagtctacactgaatggttgatatggctgtgcccacgcgtgcaagcgttaggctcccctggagcgatcgaataatataagcactcttgcaagagttgtttttgcagagtggcttgctggtcctctagacagtcgcaaggagagcaacttaacggctaggttaagttgcatatctaagcacttgcgccttatgtgtaatggatatgagtaggttagatctctaggtgctttcgtttgtgtttgctactgcagtacctcgagaacatccatgcctgtgtgacctgcaattagtttgcgacttgtttgtggttatgactctgccctgcatattgtttctggattcagttaacgtttgccctaaaaatgcatatcatgcatctgattatttctggattcc

SEQ ID NO: 9955 - protein, 282 aa, Triticum aestivum
  misc_feature (1)..(282): Ceres Seq. ID no. 12784100
MYNGGDHYDGNGGGAANANSLFSGGGFMPSQTTNTPEGSGGITKTRGAQTLLPLTVKQIMDASQTNDDKSSFAVNGTEVSTVRLVGRMMNKAERMTDVQFILDDGTGRIEVNRWENETSDTTEMSLVKDGDYVIVNGGLKSFQGKRHIVAYSVRLVTNYNDITHHFLYCIYVHLDLAKAKKSGTQPQVTANASWNQAPPPNNQAPTLSASGNAGGQDLTDMVMNVFHDPVLVNLEHGVSIEQVASRLNISDALARSTVTHLIDVGNLYPTIDDNHYKSTLNG

SEQ ID NO: 9956 - protein, 255 aa, Triticum aestivum
  misc_feature (1)..(255): Ceres Seq. ID no. 12784101
MPSQTTNTPEGSGGITKTRGAQTLLPLTVKQIMDASQTNDDKSSFAVNGTEVSTVRLVGRMMNKAERMTDVQFILDDGTGRIEVNRWENETSDTTEMSLVKDGDYVIVNGGLKSFQGKRHIVAYSVRLVTNYNDITHHFLYCIYVHLDLAKAKKSGTQPQVTANASWNQAPPPNNQAPTLSASGNAGGQDLTDMVMNVFHDPVLVNLEHGVSIEQVASRLNISDALARSTVTHLIDVGNLYPTIDDNHYKSTLNG

SEQ ID NO: 9957 - protein, 223 aa, Triticum aestivum
  misc_feature (1)..(223): Ceres Seq. ID no. 12784102
MDASQTNDDKSSFAVNGTEVSTVRLVGRMMNKAERMTDVQFILDDGTGRIEVNRWENETSDTTEMSLVKDGDYVIVNGGLKSFQGKRHIVAYSVRLVTNYNDITHHFLYCIYVHLDLAKAKKSGTQPQVTANASWNQAPPPNNQAPTLSASGNAGGQDLTDMVMNVFHDPVLVNLEHGVSIEQVASRLNISDALARSTVTHLIDVGNLYPTIDDNHYKSTLNG

SEQ ID NO: 9958 - DNA, 1958 bp, Triticum aestivum
  misc_feature (1)..(1958): Ceres Seq. ID no. 12784163
cccaatgatttccagggagagagatagataggactttttcttaggcctctctgactctctctctctccagagagagctctagcctctagggaggagggagctgctgttgggtaagagaagagaagagagtggaggctgaatcagattagccgtacaacccatctcgcagattctgaatctcctcctcgctctgctgtccatcttcttctctggctatccagcagtgtattatcaggccactcactaatcaactgaagcagcatgagctcccatggtgttgttgccgtgaagccaatcaccacgccggacaaaaccacgcattcttatgcttgtggatccacacagtcttcagttcataagctgctggactctaaactggaccaccttgggctgttggatgataatctgtcatccaccagtcagtcatcagacatcaagaccgagctgatccgaacgtcgagcctgggaagaagcagcctgccatttaaccttcagagaagaagccctgagcctgatcctgaaagtccattgtctcatgtctcgcaccccaatttttcagagcccatggcctcaaactcttcaacgttctgcacaagtttattctcatcatcttcgacaaactcggagccttgccggcgaatgggtgctctgcctttcctgcctcaccctcccaagtatgagcagcaggttctcccagggcagtcatcaacctcctccctgcagctcagtggtgacacaggcaatgttcatgacgaggctgaacaggcagatgacataaaagacttcctcaatctttctgctggagatgcttctgatggcagcttccatggtgaaaaccaagcgtttgctttcgccgaggccgagcagatggagttccagttcttgtctgagcagctagggatcgccatcaccgataatgaggagagcccccaattagatgacatatacgacacgccgccgcctcaaatgtcgtcgcttccagtctcatcctgctccaaccagatcctgcagaatccaggatctccggctaaactgccgcttagctcgtcgcggtcatcttctggatctgcagcagctaacaagtcaagattgaggtggacactggagctccacgagcgtttcgtagaggcagtgaacaagctagaagggcctgacagtaagatggctgctctgctttcatttcccaaatgtatttataaaattttctgttttccactctaaatagttcacttcaacatctgttatttcagaagcaactcccaagggcgttctgaagcttatgaaagtggaaggcctgaccatctaccatgtaaagagtcatttgcagaagtaccgacacgcaaagtatattccagagatcaaagaagaaaagaaggcttcctcggaccttaagaaagtacaaccgggtagcagtggaagcgatccgttcaaaaacaagaacttggcagaagctctacggatgcaaatggaggttcagaagcagctccatgaacagctagaggtgcaaaggcagctgcagctacgcatagaagaacacgcgaaatacttgcagaggatactggaagagcagcagaaggtcggcagtggcagctcgctctcactgaaaaccccgacggagccgtccgagtcgacgtcgaaagacagaactgaacctgaagaggctaccacctcttcacctcagacgtccaagaacagcgaggcagggtccccttgttcataacagccgtcacattggccggttgcttcgccattgccggcgacttgcggaagctcatcactccctcggtggcagagctgtggtggccacgatgatatacacacgaacatggtagtttgaacgaacttgaggttttagccagtggtcgccagtggatgcatgtatattgtatataactttcactttgggaataggaaatgggggaaccaataagctgatcatagcacggttttgaatttgc

SEQ ID NO: 9959 - protein, 319 aa, Triticum aestivum
  misc_feature (1)..(319): Ceres Seq. ID no. 12784164
MSSHGVVAVKPITTPDKTTHSYACGSTQSSVHKLLDSKLDHLGLLDDNLSSTSQSSDIKTELIRTSSLGRSSLPFNLQRRSPEPDPESPLSHVSHPNFSEPMASNSSTFCTSLFSSSSTNSEPCRRMGALPFLPHPPKYEQQVLPGQSSTSSLQLSGDTGNVHDEAEQADDIKDFLNLSAGDASDGSFHGENQAFAFAEAEQMEFQFLSEQLGIAITDNEESPQLDDIYDTPPPQMSSLPVSSCSNQILQNPGSPAKLPLSSSRSSSGSAAANKSRLRWTLELHERFVEAVNKLEGPDSKMAALLSFPKCIYKIFCFPL

SEQ ID NO: 9960 - protein, 218 aa, Triticum aestivum
  misc_feature (1)..(218): Ceres Seq. ID no. 12784165
MASNSSTFCTSLFSSSSTNSEPCRRMGALPFLPHPPKYEQQVLPGQSSTSSLQLSGDTGNVHDEAEQADDIKDFLNLSAGDASDGSFHGENQAFAFAEAEQMEFQFLSEQLGIAITDNEESPQLDDIYDTPPPQMSSLPVSSCSNQILQNPGSPAKLPLSSSRSSSGSAAANKSRLRWTLELHERFVEAVNKLEGPDSKMAALLSFPKCIYKIFCFPL

SEQ ID NO: 9961 - protein, 193 aa, Triticum aestivum
  misc_feature (1)..(193): Ceres Seq. ID no. 12784166
MGALPFLPHPPKYEQQVLPGQSSTSSLQLSGDTGNVHDEAEQADDIKDFLNLSAGDASDGSFHGENQAFAFAEAEQMEFQFLSEQLGIAITDNEESPQLDDIYDTPPPQMSSLPVSSCSNQILQNPGSPAKLPLSSSRSSSGSAAANKSRLRWTLELHERFVEAVNKLEGPDSKMAALLSFPKCIYKIFCFPL

SEQ ID NO: 9962 - DNA, 686 bp, Triticum aestivum
  misc_feature (1)..(686): Ceres Seq. ID no. 12784286
atctcacaaagcgaagttcacagcagcgcgcagtgtagtgttgccaggcacactccacctgtgtttcgtgggtggcatcgatcgagggagagagagacaccatgagctacccgccgccgggcaccgcgtaccctccgccgggccagcagcaggcgtacccgccgccgggcaacggttacggctaccctccgccgggccaggagcagccgcagcagcaggcctaccctccgccggcgtacggcgcgccgccgcccgtcgcggccgactactaccagcccaaggacggcggcgcgtacccgcagcagcagcagcaggcgtacggcgcgccgccgcccgtcgccgccaactactacccgccgccgcagcagcagcagcaggcccagccgccgccggaggcgcagagccgcggcagcgacggcttctggaaaggatgctgtgccgcaatctgctgctgctgcctgctcgacatgtgcctctgatcgatgttgcacaggatgatgatccacatacagctgctcgccatcagatcatcgtttccttggcacaacttggatttggcttaattctgtatcaccatgtcgctcagttaccagtcagtggatttactttgttgttgcttgcttattagcagagacctcccttctgtaatttgttgggcatgaattggatatgtgcgagttatttcc

SEQ ID NO: 9963 - protein, 208 aa, Triticum aestivum
  misc_feature (1)..(208): Ceres Seq. ID no. 12784287
SHKAKFTAARSVVLPGTLHLCFVGGIDRGRERHHELPAAGHRVPSAGPAAGVPAAGQRLRLPSAGPGAAAAAGLPSAGVRRAAARRGRLLPAQGRRRVPAAAAAGVRRAAARRRQLLPAAAAAAAGPAAAGGAEPRQRRLLERMLCRNLLLLPARHVPLIDVAQDDDPHTAARHQIIVSLAQLGFGLILYHHVAQLPVSGFTLLLLAY

SEQ ID NO: 9964 - protein, 125 aa, Triticum aestivum
  misc_feature (1)..(125): Ceres Seq. ID no. 12784288
MSYPPPGTAYPPPGQQQAYPPPGNGYGYPPPGQEQPQQQAYPPPAYGAPPPVAADYYQPKDGGAYPQQQQQAYGAPPPVAANYYPPPQQQQQAQPPPEAQSRGSDGFWKGCCAAICCCCLLDMCL

SEQ ID NO: 9965 - protein, 125 aa, Triticum aestivum; identical to SEQ ID NO: 9964
  misc_feature (1)..(125): Ceres Seq. ID no. 16625691

SEQ ID NO: 9966 - DNA, 1121 bp, Triticum aestivum
  misc_feature (1)..(1121): Ceres Seq. ID no. 12784351
aacagacggccggccggaacatgcccgctcgtcgggactcgggagtaccgaccaatgctcgccgcctgccgatcagaagtcgcgacgagctcacctaatattccacctctccctgaccgccacccaacaacctaaccacatggccgtataatactccactgcagaagcgaggtgctcgtgaagtcggcgtgatatccggagtagccagcaagcccagcccagtggccgatccgtgatccgtgttggagagagcgagggagagaagatgcggccgcggctggtgctcttcggcgactcaatcaccgagcagtcctttgcccccggcggctggggcgccgccctcgcggagcacttcgcgaggcaggcggatgtggtgctgcgcgggctcagcgggtacaacacgcgctgggcgctgaaggtgctggatagagccatggagggggcggccgacggcggcgcggacccggcggcagtgacggtgttcttcggcgccaacgacgccaccctgcccgacgagatgcaggcgcaccagcacgtgccgctcggggagtacaaggacaacctgcgcgcgatctgtgcctacttcaagaataagtggccctccgctgccatcatactcatcacccctccaccgatccacgagccggcgaggattcgagacatatatggagataatgacccttcaagacagcctgaaagaacaaatgaagctgctggcacttatgcacaagcatgcataactgttgctaaagaattgggtcatccagttatagacatctggacacagatgcagcaatgtcctgattggcaaacatctgcattaagtgacgggctacatttcaccccgtccgggaacaaaattttgttcgacgaggtgctgaagacactggaaagtgttggtttcagccagcacagtctccggtccgatctccctctcttccatgaaattgaccccaaggacccactgaaagcctttgagatttgaagaaggtatctgccgcatggttggattcccagaaggaaggcactatgactcagctttatgttctgaaaacaaactatgttggtttggtgactgatgtgttctgtaacatggatatattgtgcctatgttctatgtc

SEQ ID NO: 9967 - protein, 239 aa, Triticum aestivum
  misc_feature (1)..(239): Ceres Seq. ID no. 12784352
MRPRLVLFGDSITEQSFAPGGWGAALAEHFARQADVVLRGLSGYNTRWALKVLDRAMEGAADGGADPAAVTVFFGANDATLPDEMQAHQHVPLGEYKDNLRAICAYFKNKWPSAAIILITPPPIHEPARIRDIYGDNDPSRQPERTNEAAGTYAQACITVAKELGHPVIDIWTQMQQCPDWQTSALSDGLHFTPSGNKILFDEVLKTLESVGFSQHSLRSDLPLFHEIDPKDPLKAFEI

SEQ ID NO: 9968 - protein, 183 aa, Triticum aestivum
  misc_feature (1)..(183): Ceres Seq. ID no. 12784353
MEGAADGGADPAAVTVFFGANDATLPDEMQAHQHVPLGEYKDNLRAICAYFKNKWPSAAIILITPPPIHEPARIRDIYGDNDPSRQPERTNEAAGTYAQACITVAKELGHPVIDIWTQMQQCPDWQTSALSDGLHFTPSGNKILFDEVLKTLESVGFSQHSLRSDLPLFHEIDPKDPLKAFEI

SEQ ID NO: 9969 - protein, 155 aa, Triticum aestivum
  misc_feature (1)..(155): Ceres Seq. ID no. 12784354
MQAHQHVPLGEYKDNLRAICAYFKNKWPSAAIILITPPPIHEPARIRDIYGDNDPSRQPERTNEAAGTYAQACITVAKELGHPVIDIWTQMQQCPDWQTSALSDGLHFTPSGNKILFDEVLKTLESVGFSQHSLRSDLPLFHEIDPKDPLKAFEI

SEQ ID NO: 9970 - DNA, 890 bp, Triticum aestivum
  misc_feature (1)..(890): Ceres Seq. ID no. 12784413
actttaaatacctccgctccccggcccgtagcgtagtagtacgcatcagccctcccttccctggcctcagtagttagccactagccactgaacactaccaggagggatcagaaggctaccatgaggcaaggagggggcggaggcgacggggtgagccccggcaatgtcccggtgtgctactacggcgcgggcgggcgagtctcggccaccctggagcggcgggtgcgcgccgccgaggtgctcctgcggtgcgcggcgtgcggcctggccgtgctcgccgccgccctcctcggcgccgaccgccagtcccgcaccttcttctcctgtgatcaggtgatggcgtacgtgataatcggggcggtggcggtggccatggaggcggcgctgctggggaagaccgggcaggtggagttccagtggatgaagacgtgcgagctataccagcggttctgcacgcaggcggggggcggcgttgcgtgcgccgtcgccgccagcgccaccatggtcgggatcgccctcgtctccgccttcaacctcttccgcctctacggccacggcaagggcagcagcaagtgaagccaaagccctcgctgcgtgcatgcgtgcatgcatggccggcctcttttaggttttaacgacaccgaatccaaatccagtccggggagagaaccgtacgtacgtagcatatgtagctaccgttgctctttttactatagtttgtttgatgttgacacgcatggtgtcagtcagcgttagccataagaagctctgtgggacaaaagctagaccggtttctctgtatatgatgtcaagtgatccacaaggtgtttgtagacagtaatactgctatgtgcgtaataaaagaggaacaagaaagcgatgtagtatcc

SEQ ID NO: 9971 - protein, 151 aa, Triticum aestivum
  misc_feature (1)..(151): Ceres Seq. ID no. 12784414
MRQGGGGGDGVSPGNVPVCYYGAGGRVSATLERRVRAAEVLLRCAACGLAVLAAALLGADRQSRTFFSCDQVMAYVIIGAVAVAMEAALLGKTGQVEFQWMKTCELYQRFCTQAGGGVACAVAASATMVGIALVSAFNLFRLYGHGKGSSK

SEQ ID NO: 9972 - protein, 79 aa, Triticum aestivum
  misc_feature (1)..(79): Ceres Seq. ID no. 12784415
MAYVIIGAVAVAMEAALLGKTGQVEFQWMKTCELYQRFCTQAGGGVACAVAASATMVGIALVSAFNLFRLYGHGKGSSK

SEQ ID NO: 9973 - DNA, 1945 bp, Triticum aestivum
  misc_feature (1)..(1945): Ceres Seq. ID no. 12784451
acaaggggaagtggatccccattccaaacccagcgcacctatccccattccgttccccgccgcggcacttggcgtcgtccgccccgcagctcagctccacacgcccgcccactccctccgccacaagcgatggcgaccatcaccacgcagctccgctccgcgctcctctccccggccgcctcgtcctcgtcctcctcctcaccgcgccgcggcggccggcgcgcgccctcctccgtccgctgcgatgcctctcccccggcggcgtccgcgtcggcctccctcgacccggacttcgacaagaaggccttccgccacaacctcacccgcagcgacaactacaaccgcaagggcttcggccacaagaaggagaccctcgagctcatgagccaggagtacaccagcgatgtgataaagacgctcaaggacaacgggaacgagtacacctgggggccggtgaccgtgaagctggcggaggcctacggcttctgctggggcgtcgagcgcgccgtgcagatcgcctacgaggcgcgcaagcagttccccgaggagcgcatctggatcaccaacgagatcatccacaaccccacggtcaacaagaaattggaggacatgggtgtcaaagatattcctgttaacgctggtattaaggattttgatgttattgaacaaggcgatgttgttgtcttgcctgcatttggagctgctgtggatgagatgtacacattaaatgagaagaacgtgcaaattgttgatacgacatgcccttgggtttcaaaggtgtggaacatggttgagaagcataagaagggcgactatacttctattattcacggaaaatatgcccatgaagagactgttgccactgcttcttttgcagggaagtacattattgtgaagaatatggtcgaggcaacatatgtatgtgattatatacttggtggccaacttgatgggtctagctcaactagagaggagttccttgagaaattcaaaaaggctgtttctccaggattcgatcctgatgttgacttggaaaaggtgggcattgcaaatcaaacaacaatgcttaaaggagaaactgaacaaattggaaaacttgttgagaagactatgatgcgtaagtatggagtcgagaatgccaatgaacactttgttgcattcaacactatttgtgatgccacacaggaaagacaggatgcgatgtatcacctagtgaaggaaaaggttgaccttattctggttattggagggtggaactccagtaatacctctcatttgcaagaaattggagaactcagtggaattccgtcctactggattgacagtgaacaaaggattggaccaggaaacaggattagctacaagctaaatcacggtgagcttattgaggcagaaaactggctaccagaagggcctatcacaattggagttacttctggtgcctcaaccccggacaaggttgttgaggatacgctacacaaggtgtttgacattaagcgtcaagaagttttgcaggttgcatagattttcagcaaaattggccaggggataataatagttgatggcctggcaaaggttagtagaacaattgtgcgacctatcgttgtacagtagctaagaatgtaatgctttaggcacatacttttacgaggatatctgtgctgggatacatatatatgttgtaatcacttgtaccacgaacagtagtacacttgtatcagctgctataacccctggccccttgaaaaatcgttttcataggctgattacatagatatcaaccactgggtttgttgctggatagggctcaaatgcaggactccctgtatgtagcaagtgcaagaaatgcagggtttcctttgtatattagggcgcaagtccaattcccattctgatatgttcatgtgtcatctgttgtaattgaatttaacttttctccgtattc

SEQ ID NO: 9974 - protein, 507 aa, Triticum aestivum
  misc_feature (1)..(507): Ceres Seq. ID no. 12784452
TRGSGSPFQTQRTYPHSVPRRGTWRRPPRSSAPHARPLPPPQAMATITTQLRSALLSPAASSSSSSSPRRGGRRAPSSVRCDASPPAASASASLDPDFDKKAFRHNLTRSDNYNRKGFGHKKETLELMSQEYTSDVIKTLKDNGNEYTWGPVTVKLAEAYGFCWGVERAVQIAYEARKQFPEERIWITNEIIHNPTVNKKLEDMGVKDIPVNAGIKDFDVIEQGDVVVLPAFGAAVDEMYTLNEKNVQIVDTTCPWVSKVWNMVEKHKKGDYTSIIHGKYAHEETVATASFAGKYIIVKNMVEATYVCDYILGGQLDGSSSTREEFLEKFKKAVSPGFDPDVDLEKVGIANQTTMLKGETEQIGKLVEKTMMRKYGVENANEHFVAFNTICDATQERQDAMYHLVKEKVDLILVIGGWNSSNTSHLQEIGELSGIPSYWIDSEQRIGPGNRISYKLNHGELIEAENWLPEGPITIGVTSGASTPDKVVEDTLHKVFDIKRQEVLQVA

SEQ ID NO: 9975 - protein, 464 aa, Triticum aestivum
  misc_feature (1)..(464): Ceres Seq. ID no. 12784453
MATITTQLRSALLSPAASSSSSSSPRRGGRRAPSSVRCDASPPAASASASLDPDFDKKAFRHNLTRSDNYNRKGFGHKKETLELMSQEYTSDVIKTLKDNGNEYTWGPVTVKLAEAYGFCWGVERAVQIAYEARKQFPEERIWITNEIIHNPTVNKKLEDMGVKDIPVNAGIKDFDVIEQGDVVVLPAFGAAVDEMYTLNEKNVQIVDTTCPWVSKVWNMVEKHKKGDYTSIIHGKYAHEETVATASFAGKYIIVKNMVEATYVCDYILGGQLDGSSSTREEFLEKFKKAVSPGFDPDVDLEKVGIANQTTMLKGETEQIGKLVEKTMMRKYGVENANEHFVAFNTICDATQERQDAMYHLVKEKVDLILVIGGWNSSNTSHLQEIGELSGIPSYWIDSEQRIGPGNRISYKLNHGELIEAENWLPEGPITIGVTSGASTPDKVVEDTLHKVFDIKRQEVLQVA

SEQ ID NO: 9976 - protein, 380 aa, Triticum aestivum
  misc_feature (1)..(380): Ceres Seq. ID no. 12784454
MSQEYTSDVIKTLKDNGNEYTWGPVTVKLAEAYGFCWGVERAVQIAYEARKQFPEERIWITNEIIHNPTVNKKLEDMGVKDIPVNAGIKDFDVIEQGDVVVLPAFGAAVDEMYTLNEKNVQIVDTTCPWVSKVWNMVEKHKKGDYTSIIHGKYAHEETVATASFAGKYIIVKNMVEATYVCDYILGGQLDGSSSTREEFLEKFKKAVSPGFDPDVDLEKVGIANQTTMLKGETEQIGKLVEKTMMRKYGVENANEHFVAFNTICDATQERQDAMYHLVKEKVDLILVIGGWNSSNTSHLQEIGELSGIPSYWIDSEQRIGPGNRISYKLNHGELIEAENWLPEGPITIGVTSGASTPDKVVEDTLHKVFDIKRQEVLQVA

SEQ ID NO: 9977 - DNA, 531 bp, Triticum aestivum
  misc_feature (1)..(531): Ceres Seq. ID no. 12784493
acacaactggtcctacaacgcgcgaacacacacaaacccaagcacatagtaacatcacagatcggcatggcgcacttccaggaggtggactactgctcggaggaggtgagggcggtgggcaacccggcccgccgcggctgcggcggcgtgcaggagcacatcgtcagggagacgttcgtgcaggagttcgacaccgccggccgccgccacggccaccacggccgcggctccggccacttcgaggtgcgcgagagcaggctcgaggaggacgtcaacacctgcaccggcgagttccacgagcgcaaggagaacttcgtcgtcagggccgatgactgagcttacacgtaacggagcacactaccatgtgtgtatatgtcagcagcatatgtatgtgtgatgttgcgcacagtcgtatagcgtatgcatgcgtgcgtgcttggcggccatcagcccctatcgcgcgcgcgtgcagcgcttaaataagcgctctaatcgtgaaccagaataaagcttctcgtgattattattccg

SEQ ID NO: 9978 - protein, 111 aa, Triticum aestivum
  misc_feature (1)..(111): Ceres Seq. ID no. 12784494
TQLVLQRANTHKPKHIVTSQIGMAHFQEVDYCSEEVRAVGNPARRGCGGVQEHIVRETFVQEFDTAGRRHGHHGRGSGHFEVRESRLEEDVNTCTGEFHERKENFVVRADD

SEQ ID NO: 9979 - protein, 109 aa, Triticum aestivum
  misc_feature (1)..(109): Ceres Seq. ID no. 12784495
TTGPTTREHTQTQAHSNITDRHGALPGGGLLLGGGEGGGQPGPPRLRRRAGAHRQGDVRAGVRHRRPPPRPPRPRLRPLRGAREQARGGRQHLHRRVPRAQGELRRQGR

SEQ ID NO: 9980 - protein, 89 aa, Triticum aestivum
  misc_feature (1)..(89): Ceres Seq. ID no. 12784496
MAHFQEVDYCSEEVRAVGNPARRGCGGVQEHIVRETFVQEFDTAGRRHGHHGRGSGHFEVRESRLEEDVNTCTGEFHERKENFVVRADD

SEQ ID NO: 9981 - DNA, 1030 bp, Triticum aestivum
  misc_feature (1)..(1030): Ceres Seq. ID no. 12784913
gtagttctcgtgctcactgcccacccagctcatctcgtctcaatctcacccgtctcttcctccaccgtctagaagcttctcgaaggcaggcgccatacacttctctcctctcgccatgggcaacgggctgtctccctgcgtgaacatgccggcggccgccgaggtgcccgccgcggcccggctggtgtactggggcgggcggacgagggcgctgccagtctacgaggacgaggagggtgatggcgagggcaacggcggtgtctcctgcacggcggcggacgtgacggccgagctgctcccggcggaccacgtggtctgcccggccgactccttcttcgtcggcctcccggtccccgtcgcgtcgccgggggagcggctgctgccgggccggacctacttcgtgctcccccgccgcctcctctcctccccctcccccggcggcaacggcaaggcggccgtgctcaccgcggccacgctcgcgtcgctgtcggccgcgccggggggcaggaagacggtgcagctcgccgggcccggccagtgcccgttcgagtacgtcaagggcggcgaggacggtgccgcggcgctcatccgggtcctgccgcagttcatcgagaaggtcatcacctgcgacggcggcaacggcaacggcgacgctgccggccggcgcgggtcgggcaaggtggctgcgtccgcgacggagctgtgcagcacgccggagctgaagcggcactacgcgcagctcgtgggcgccaagggccggccgtggtcgccggggctggagaccatctccgagcgcagcaagaggaggatcttcccgtcgccggccaggctgctgctctcttcgcaataatgtaattagctaatgagcgtagatcgttttcggattagagattaatcgagattaattaggtagggaacacagcgttcgattttacttgtacaatagttggaactgaaatacaaatgtataaatttgtcgaaaacatttacatatgtacctaggatttttggaagtgagatactacaagtc

SEQ ID NO: 9982 - protein, 244 aa, Triticum aestivum
  misc_feature (1)..(244): Ceres Seq. ID no. 12784914
MGNGLSPCVNMPAAAEVPAAARLVYWGGRTRALPVYEDEEGDGEGNGGVSCTAADVTAELLPADHVVCPADSFFVGLPVPVASPGERLLPGRTYFVLPRRLLSSPSPGGNGKAAVLTAATLASLSAAPGGRKTVQLAGPGQCPFEYVKGGEDGAAALIRVLPQFIEKVITCDGGNGNGDAAGRRGSGKVAASATELCSTPELKRHYAQLVGAKGRPWSPGLETISERSKRRIFPSPARLLLSSQ

SEQ ID NO: 9983 - protein, 234 aa, Triticum aestivum
  misc_feature (1)..(234): Ceres Seq. ID no. 12784915
MPAAAEVPAAARLVYWGGRTRALPVYEDEEGDGEGNGGVSCTAADVTAELLPADHVVCPADSFFVGLPVPVASPGERLLPGRTYFVLPRRLLSSPSPGGNGKAAVLTAATLASLSAAPGGRKTVQLAGPGQCPFEYVKGGEDGAAALIRVLPQFIEKVITCDGGNGNGDAAGRRGSGKVAASATELCSTPELKRHYAQLVGAKGRPWSPGLETISERSKRRIFPSPARLLLSSQ

SEQ ID NO: 9984 - DNA, 1426 bp, Triticum aestivum
  misc_feature (1)..(1426): Ceres Seq. ID no. 13495341
atcactcatcacaccaacctaaacgaacctttcctgaagcggcggcacggcggcggcgcggccaaaacccgccgaatccagctcgccgcggtggtcgtcaccctccaccgctccctctccgcgcggcgacaccatttaaacctcgccgcctgccgccgcttttttcctcccagatgcttcccccaatctccaccatcccacccacctttccccttccccaccccgccttcacaaaacctagcctcccttaccacctccgctcgccctccctcctggcaaccttctcctcctccgcggcgggtcgggcctgcgggatagcgggccgttggatgggctcggttcgagcctcgccctctgaggcggggggctgggcggtggctgcggcgggtaaggagggggtggacatggagcggctggtggcggtggcgcagagcgcggcggatgcggcgggggaggtgctcaggaagtacttcaggcagcgcttcgagatcatcgacaaagaggaccacagtcccgtcacgatcgctgatagagaagcagaagaagcaatgacctcagtcatactgaagagctttcctactcatgctgttttcggtgaggagaacggttggaggtgtgcagagaagtctgctgactatgtttgggtcttggaccccatagatggaacaaagagcttcataactgggaagcctctttttggtacgcttattgcgcttcttcacaatggaaagccggttatgggcattattgatcagccaatcttgagagagagatgggttggggtggacgggaagaaaactaccttaaatggacaagaaatatctgtccgtccttgcaatgtactggagcaagcttacttatatactacgagtccacatctctttgaaggagatgctgaagatgcattcattcgtgtacgagacaaggtgaaagtcccattgtatggctgtgattgttatgcttatgctctcctggcttctggttttgtggatcttgttgttgaatctggattgaagccatacgattttctctcgctggtaccggtgattgaaggagctgggggctcaataactgattgggaagggaacaagctccactggcctgtctcttcggaatctcggccaacaagtttcaacgtggtggcagccggagattcccatgtccatgggcaggccctggcagcgttgcggtggcgctagcctgcctgcagcacggggcggctcctattgtttatttagaaggctgcaactgttattcatctatccaataaaactgagtctgtacgcttcctcagtgggtaaagcaagttgttcacggtgcaccctttactcaataatgatcagtggtttcttgttgtgtgttatgatcagccgttatgtactcagttactcaagtcatttgatgatcgctgagcgacttgattgcc

SEQ ID NO: 9985 - protein, 398 aa, Triticum aestivum
  misc_feature (1)..(398): Ceres Seq. ID no. 15222951
HSSHQPKRTFPEAAARRRRGQNPPNPARRGGRHPPPLPLRAATPFKPRRLPPLFSSQMLPPISTIPPTFPLPHPAFTKPSLPYHLRSPSLLATFSSSAAGRACGIAGRWMGSVRASPSEAGGWAVAAAGKEGVDMERLVAVAQSAADAAGEVLRKYFRQRFEIIDKEDHSPVTIADREAEEAMTSVILKSFPTHAVFGEENGWRCAEKSADYVWVLDPIDGTKSFITGKPLFGTLIALLHNGKPVMGIIDQPILRERWVGVDGKKTTLNGQEISVRPCNVLEQAYLYTTSPHLFEGDAEDAFIRVRDKVKVPLYGCDCYAYALLASGFVDLVVESGLKPYDFLSLVPVIEGAGGSITDWEGNKLHWPVSSESRPTSFNVVAAGDSHVHGQALAALRWR

SEQ ID NO: 9986 - protein, 341 aa, Triticum aestivum
  misc_feature (1)..(341): Ceres Seq. ID no. 15222952
MLPPISTIPPTFPLPHPAFTKPSLPYHLRSPSLLATFSSSAAGRACGIAGRWMGSVRASPSEAGGWAVAAAGKEGVDMERLVAVAQSAADAAGEVLRKYFRQRFEIIDKEDHSPVTIADREAEEAMTSVILKSFPTHAVFGEENGWRCAEKSADYVWVLDPIDGTKSFITGKPLFGTLIALLHNGKPVMGIIDQPILRERWVGVDGKKTTLNGQEISVRPCNVLEQAYLYTTSPHLFEGDAEDAFIRVRDKVKVPLYGCDCYAYALLASGFVDLVVESGLKPYDFLSLVPVIEGAGGSITDWEGNKLHWPVSSESRPTSFNVVAAGDSHVHGQALAALRWR

SEQ ID NO: 9987 - protein, 289 aa, Triticum aestivum
  misc_feature (1)..(289): Ceres Seq. ID no. 15222953
MGSVRASPSEAGGWAVAAAGKEGVDMERLVAVAQSAADAAGEVLRKYFRQRFEIIDKEDHSPVTIADREAEEAMTSVILKSFPTHAVFGEENGWRCAEKSADYVWVLDPIDGTKSFITGKPLFGTLIALLHNGKPVMGIIDQPILRERWVGVDGKKTTLNGQEISVRPCNVLEQAYLYTTSPHLFEGDAEDAFIRVRDKVKVPLYGCDCYAYALLASGFVDLVVESGLKPYDFLSLVPVIEGAGGSITDWEGNKLHWPVSSESRPTSFNVVAAGDSHVHGQALAALRWR

SEQ ID NO: 9988 - DNA, 1978 bp, Triticum aestivum
  misc_feature (1)..(1978): Ceres Seq. ID no. 13496282
acgatcccgtggagccgtggaggaccggtggcgagcgacgcggaagtcgcgaagcgggccggctccacgtctcccgtccgggaacgaatttaagcccgaggggacaagtttccgatcattcttcctcctcctcccctccgtataataagatccatccgtccatcctctaatcccgtagcagccagcgtagcctagccgcccccacctgctcccctctgctccgggatccatccgtccacccaggccgtcgtcgacctagggttttgtgcagaccatggcgcggaagatgctcaaggacggggaggcgcccgccgtcgccgacggcggcggcggcgagggcgaggggagctacgactacgacctcttcgtcatcggcgccggcagcggcggcgtccgcggctcccgcaccgccgcgggattcggggccaaggttgcgatctgcgagctcccgttccaccccatcagctccgagtggctgggaggacacggcggaacgtgcgtcatacgtggctgtgtcccgaagaagattctcgtctacggggcatctttccggggggaattcgatgacgccaagcaattcgggtgggagatcaacggggacatcaactacaactggaaaaagttgctggaaaacaagactcaagaaattgtgagattaaacggagtgtacaagagaatccttggtggttctggcgtgacgatgatcgaaggggcagggagtatagttgatgctcataccgttgaagtcacccagccagatggttcaaagcaaaggcacacgaccaagcacatattgattgcaactggtagccgggcaactctggtcgacattcctggaaaggagctggctattacttcagatgaggctttaagtttggaggagctaccgaaacgtgctgtgattcttggtggcggatatattgctgttgaatttgcttctatctggaaggggttgggtgctgaagtagatctattttataggaaagaacttcctctaaggggttttgatgatgagatgagaacagttgttgcaagtaaccttgaaggaaggggaatccgattgcatccagggacaaatttgaccgagttgagtaaaacagccgatggcattaaagttgtgacagataagggggatgagctcattgcagatgttgttctttttgctacaggtcgtgcgccgaactccaataggctgaacctggaagctgttggtgttgaggttgatcaaataggagccatcaaggttgatgaatactcccgtacatcagttccaagtatatgggctgtgggtgatgtaacaaatcggattaacctaacacctgttgctctgatggaggctacttgcttcgctaaaactgtatttggtggccagacagttaagcctgattataaagatgtaccttgtgctgttttctgcattccaccgctatctgtagtcggtctcagcgaacaagaggctttggcggaagccaagaatgatcttcttgtttacacatcaagtttcaacccaatgaagaacagcatatccaaacgcgtggagaagtctaccatgaaactggtggttgatgctgagaccgataaggttctcggagcagccatgtgtggaccagatgcagctgaaattatgcagggcattgctgttgcgctcaaggctggagctaccaaggcgaccttcgacagcaccgtcggcatccacccttctgcggcggaggagtttgtgacgatgcggaccttgaccaggcgcgtgagcccgccatccaagccaaagacgaacttgtaagcaagttgcctgcaatgttttggaccaaaattatacgggtgtggccacgggaactgtagacacagactcttgtttcagtttgctagccctgctcttggcatttgacctgaaagtgtgatacggtgtatttgatgatgatagaaataagtttctgtggaacagtttgtacagaaaaaaaaaaaaaaaaaagcttatcga

SEQ ID NO: 9989 - protein, 501 aa, Triticum aestivum
  misc_feature (1)..(501): Ceres Seq. ID no. 13496283
MARKMLKDGEAPAVADGGGGEGEGSYDYDLFVIGAGSGGVRGSRTAAGFGAKVAICELPFHPISSEWLGGHGGTCVIRGCVPKKILVYGASFRGEFDDAKQFGWEINGDINYNWKKLLENKTQEIVRLNGVYKRILGGSGVTMIEGAGSIVDAHTVEVTQPDGSKQRHTTKHILIATGSRATLVDIPGKELAITSDEALSLEELPKRAVILGGGYIAVEFASIWKGLGAEVDLFYRKELPLRGFDDEMRTVVASNLEGRGIRLHPGTNLTELSKTADGIKVVTDKGDELIADVVLFATGRAPNSNRLNLEAVGVEVDQIGAIKVDEYSRTSVPSIWAVGDVTNRINLTPVALMEATCFAKTVFGGQTVKPDYKDVPCAVFCIPPLSVVGLSEQEALAEAKNDLLVYTSSFNPMKNSISKRVEKSTMKLVVDAETDKVLGAAMCGPDAAEIMQGIAVALKAGATKATFDSTVGIHPSAAEEFVTMRTLTRRVSPPSKPKTNL

SEQ ID NO: 9990 - protein, 497 aa, Triticum aestivum
  misc_feature (1)..(497): Ceres Seq. ID no. 13496284
MLKDGEAPAVADGGGGEGEGSYDYDLFVIGAGSGGVRGSRTAAGFGAKVAICELPFHPISSEWLGGHGGTCVIRGCVPKKILVYGASFRGEFDDAKQFGWEINGDINYNWKKLLENKTQEIVRLNGVYKRILGGSGVTMIEGAGSIVDAHTVEVTQPDGSKQRHTTKHILIATGSRATLVDIPGKELAITSDEALSLEELPKRAVILGGGYIAVEFASIWKGLGAEVDLFYRKELPLRGFDDEMRTVVASNLEGRGIRLHPGTNLTELSKTADGIKVVTDKGDELIADVVLFATGRAPNSNRLNLEAVGVEVDQIGAIKVDEYSRTSVPSIWAVGDVTNRINLTPVALMEATCFAKTVFGGQTVKPDYKDVPCAVFCIPPLSVVGLSEQEALAEAKNDLLVYTSSFNPMKNSISKRVEKSTMKLVVDAETDKVLGAAMCGPDAAEIMQGIAVALKAGATKATFDSTVGIHPSAAEEFVTMRTLTRRVSPPSKPKTNL

SEQ ID NO: 9991 - protein, 359 aa, Triticum aestivum
  misc_feature (1)..(359): Ceres Seq. ID no. 13496285
MIEGAGSIVDAHTVEVTQPDGSKQRHTTKHILIATGSRATLVDIPGKELAITSDEALSLEELPKRAVILGGGYIAVEFASIWKGLGAEVDLFYRKELPLRGFDDEMRTVVASNLEGRGIRLHPGTNLTELSKTADGIKVVTDKGDELIADVVLFATGRAPNSNRLNLEAVGVEVDQIGAIKVDEYSRTSVPSIWAVGDVTNRINLTPVALMEATCFAKTVFGGQTVKPDYKDVPCAVFCIPPLSVVGLSEQEALAEAKNDLLVYTSSFNPMKNSISKRVEKSTMKLVVDAETDKVLGAAMCGPDAAEIMQGIAVALKAGATKATFDSTVGIHPSAAEEFVTMRTLTRRVSPPSKPKTNL

SEQ ID NO: 9992 - DNA, 1909 bp, Triticum aestivum
  misc_feature (1)..(1909): Ceres Seq. ID no. 13500385
agaacatcctaatcgaaaaatccacagcaacagcttcctcttcctcctcagacccaccctcgctacctcctagctgcatctgctgctaagctccgcctccacccgcgcgctgtctgctagctcgtcgcgttgaaggtcgttcaggagcattttgaaggttgaaagtaaccttcggctgttggaagatgtatcgggccaagagagccgcattgtcaccaaaggtgaagcgccgtgtcggcaagtatgagctcggccgcaccatcggggaagggacctttgcaaaggtcaggttcgcaaagaacactgaaactatggagcctgttgctatcaaaatcctcgacaaggagaaggttcagaagctcagattggttgaacagattaggcgcgaaatttgtactatgaagttaataaagcatcctaatgttgttcgactgcacgaggtgatgggaagtaaagcaagaattttcattgttctggaatacattactggaggggaactctttgataccatttataccaatggaaggttgaaagaagaggaggcacgcaaatactttcagcaactgataaatgccgttgactattgccacagcaggggtgtgtatcacagagatttgaagttagaaaatttgttgcttgatgctgctggaaacctcaaagtgtccgacttcggtttaagtgctttaactgagcaagtgaaggctgacgggttgctgcacacaacatgcgggactccgaactatgttgctcctgaggtgattgaggatagaggttatgatggtgcagctgcagatatctggtcttgcggggtaatcctttttattctgcttgccgggtttttacctttcgaggatgaaaacatcatcgccctttataagaagatctcagaagctcaattcacatgtccctcttggttttctactggagctaagaagctgatcaccagaattctggaccctaatcctgcaactcgtatcaccattcctcagatactggaggatccttggttcaaaaagggattcaagccacctgtttttgacgataagtatgaaactagctttgatgatgtctatgctgcatttggagactcagaggaccagcatgtgaaagaggagactgaacataagccaacctcaatgaatgcatttgaactgatttcactgaatcagggactgaatctggacaacttgttcgaggcaaaggaggagcataaaagagagacacgattcacctcgcaatgccctccaaaagaaatcatcagcaagattgcagaagctgcaaggccacttggttttgacattcagaagaaaaactacaagatgcggatggagaacccgaaagcaggtagaaaaggcaatctcaatgttgcaaccgaggtgtttcaagtagctccatccctacatgtggttgagctgaaaaaggcgaagggggatactctggaatttcaaatgttctacagatctctgtcgacccagctcaaggacgtagtttggaagtgcggcggcgaggtagaagataacggcaccgcggcatgaagcacgttttccatgtacatagtccctactgtagttcatatgtgggatggatggcgggtgggctgcggaatgggttgtgcagatcgagttctttcgttggtttgttaatgatgatgatgatgatgaataggctccgatgaaacagcgggcgcgcagcccactgtggaagagcctatctatggcttcgttagtttgcttattattacatattcatggtccagagggagattaaagctagaggcgaaaggccgattgttgtaagattgtattggtaggaggttatattgaacagcgcaatgtgttgaactttgttctctactctacttagcattgtactgtagctatagccggaataataaataaataaaccgctg

SEQ ID NO: 9993 - protein, 449 aa, Triticum aestivum
  misc_feature (1)..(449): Ceres Seq. ID no. 13500386
MYRAKRAALSPKVKRRVGKYELGRTIGEGTFAKVRFAKNTETMEPVAIKILDKEKVQKLRLVEQIRREICTMKLIKHPNVVRLHEVMGSKARIFIVLEYITGGELFDTIYTNGRLKEEEARKYFQQLINAVDYCHSRGVYHRDLKLENLLLDAAGNLKVSDFGLSALTEQVKADGLLHTTCGTPNYVAPEVIEDRGYDGAAADIWSCGVILFILLAGFLPFEDENIIALYKKISEAQFTCPSWFSTGAKKLITRILDPNPATRITIPQILEDPWFKKGFKPPVFDDKYETSFDDVYAAFGDSEDQHVKEETEHKPTSMNAFELISLNQGLNLDNLFEAKEEHKRETRFTSQCPPKEIISKIAEAARPLGFDIQKKNYKMRMENPKAGRKGNLNVATEVFQVAPSLHVVELKKAKGDTLEFQMFYRSLSTQLKDVVWKCGGEVEDNGTAA

SEQ ID NO: 9994 - protein, 407 aa, Triticum aestivum
  misc_feature (1)..(407): Ceres Seq. ID no. 13500387
MEPVAIKILDKEKVQKLRLVEQIRREICTMKLIKHPNVVRLHEVMGSKARIFIVLEYITGGELFDTIYTNGRLKEEEARKYFQQLINAVDYCHSRGVYHRDLKLENLLLDAAGNLKVSDFGLSALTEQVKADGLLHTTCGTPNYVAPEVIEDRGYDGAAADIWSCGVILFILLAGFLPFEDENIIALYKKISEAQFTCPSWFSTGAKKLITRILDPNPATRITIPQILEDPWFKKGFKPPVFDDKYETSFDDVYAAFGDSEDQHVKEETEHKPTSMNAFELISLNQGLNLDNLFEAKEEHKRETRFTSQCPPKEIISKIAEAARPLGFDIQKKNYKMRMENPKAGRKGNLNVATEVFQVAPSLHVVELKKAKGDTLEFQMFYRSLSTQLKDVVWKCGGEVEDNGTAA

SEQ ID NO: 9995 - protein, 378 aa, Triticum aestivum
  misc_feature (1)..(378): Ceres Seq. ID no. 13500388
MKLIKHPNVVRLHEVMGSKARIFIVLEYITGGELFDTIYTNGRLKEEEARKYFQQLINAVDYCHSRGVYHRDLKLENLLLDAAGNLKVSDFGLSALTEQVKADGLLHTTCGTPNYVAPEVIEDRGYDGAAADIWSCGVILFILLAGFLPFEDENIIALYKKISEAQFTCPSWFSTGAKKLITRILDPNPATRITIPQILEDPWFKKGFKPPVFDDKYETSFDDVYAAFGDSEDQHVKEETEHKPTSMNAFELISLNQGLNLDNLFEAKEEHKRETRFTSQCPPKEIISKIAEAARPLGFDIQKKNYKMRMENPKAGRKGNLNVATEVFQVAPSLHVVELKKAKGDTLEFQMFYRSLSTQLKDVVWKCGGEVEDNGTAA

SEQ ID NO: 9996 - DNA, 1440 bp, Triticum aestivum
  misc_feature (1)..(1440): Ceres Seq. ID no. 13502858
ccgaaacagatccacctcctcagcgtcgcgtggtgggaagacgagaacctcccaaaggccaaagcccataacccctaacctagggtttcgccgccatgggatccgccgcctccgccgcctccgacgcagcgccgccaccgccttctccagcgcaaccacacggggccgcgccgccgtatggggttgggctcgccggcatcctccctcagaagccggatggggatgataagaaggaggagaaggtggactacctcaacctcccttgccccgtgccgtacgaggagatccagcgcgaggccctcatgtctctgaagcctgaactttttgaaggtttgaggtttgacttcacaaagatgttaacccagaagttcgctcttagccatagtgtccttatgggctccctggaagttccgtctcagtcagctgatgttataaaagtcccaacatcacagtatgaatttggtgccaattttttagatccaaagttaatgcttatcggaaggttgatgactgatggaaggctgaatgctcgtgtgaaatgtgatctgacagagaatctcgcgctgaaaataaatgcacagcttactagtgagcctcattactctcaagggatgttcaactttgactacaagggcacagactatcgagcacagtttcaaattggaaacaatgcgttctatggggcaaattatatccagagtgttacgccaaatttgtcgatgggaacagagatattctggcttggtcagcaaaggaagtcaggaattggatttaattctcgctacaatacagataagatggtgggtactctacaggttgctagcactggtattgttgcgttaagttatgtccagaaagtttctgaaaaggtatctcttgctactgactttatgtataaccacatgtccagagatgtgacttccagcgttggttacgattatatccttaggcagtgccgtctaaggggcaaagttgactcaaatggtgtcgttgctgcatacttggaggagagattgaacatgggtgtcaactttcttctgtctgcagagattgaccatccaaagaagaactacaagtttggttttggaatgactgtaggagagtagatatgctcacagcaattactgtgagaggactacagatgtctcctcagttcgttataagtgcaggtttaccatatggtctcggttcaagtgttcgggacctacagattcgctcctcaagcgttgcaggctttttcggtgtacttgcggttgtctcatttcagctgctttagatagcatgggcatttgggcgtccatgattctttgtttatctaaaacaagctgaaacgttgttgtaataatgttcacttggttgttggagatttttgacccttaggttcccagcaataggcttctgtgaaatgaccgtactccacaagctacagattatacattg

SEQ ID NO: 9997 - protein, 336 aa, Triticum aestivum
  misc_feature (1)..(336): Ceres Seq. ID no. 13502859
MGSAASAASDAAPPPPSPAQPHGAAPPYGVGLAGILPQKPDGDDKKEEKVDYLNLPCPVPYEEIQREALMSLKPELFEGLRFDFTKMLTQKFALSHSVLMGSLEVPSQSADVIKVPTSQYEFGANFLDPKLMLIGRLMTDGRLNARVKCDLTENLALKINAQLTSEPHYSQGMFNFDYKGTDYRAQFQIGNNAFYGANYIQSVTPNLSMGTEIFWLGQQRKSGIGFNSRYNTDKMVGTLQVASTGIVALSYVQKVSEKVSLATDFMYNHMSRDVTSSVGYDYILRQCRLRGKVDSNGVVAAYLEERLNMGVNFLLSAEIDHPKKNYKFGFGMTVGE

SEQ ID NO: 9998 - protein, 267 aa, Triticum aestivum
  misc_feature (1)..(267): Ceres Seq. ID no. 13502860
MSLKPELFEGLRFDFTKMLTQKFALSHSVLMGSLEVPSQSADVIKVPTSQYEFGANFLDPKLMLIGRLMTDGRLNARVKCDLTENLALKINAQLTSEPHYSQGMFNFDYKGTDYRAQFQIGNNAFYGANYIQSVTPNLSMGTEIFWLGQQRKSGIGFNSRYNTDKMVGTLQVASTGIVALSYVQKVSEKVSLATDFMYNHMSRDVTSSVGYDYILRQCRLRGKVDSNGVVAAYLEERLNMGVNFLLSAEIDHPKKNYKFGFGMTVGE

SEQ ID NO: 9999 - protein, 250 aa, Triticum aestivum
  misc_feature (1)..(250): Ceres Seq. ID no. 13502861
MLTQKFALSHSVLMGSLEVPSQSADVIKVPTSQYEFGANFLDPKLMLIGRLMTDGRLNARVKCDLTENLALKINAQLTSEPHYSQGMFNFDYKGTDYRAQFQIGNNAFYGANYIQSVTPNLSMGTEIFWLGQQRKSGIGFNSRYNTDKMVGTLQVASTGIVALSYVQKVSEKVSLATDFMYNHMSRDVTSSVGYDYILRQCRLRGKVDSNGVVAAYLEERLNMGVNFLLSAEIDHPKKNYKFGFGMTVGE

SEQ ID NO: 10000 - DNA, 1610 bp, Triticum aestivum
  misc_feature (1)..(1610): Ceres Seq. ID no. 13502943
atttcgcttctcgacttccccaatcggccaccccccacctccgccttccttcctggccagcgcggcggcttatggcctccatgaccacacctcggctccccttcctccccgcccgaacccgctccgccgtcgccgccacctcctcttcgtccccctcctccccgctaccacgccgctccatcaaatgcagcagctccaccaacgctaactcggcccccctcccttccacatcgcggcagccccgggcgcccgtggcggacggcgtagggtccgccgacctcaacggcctccgggccccgcctatacctgtcgcggactcccctctacccgcgtaccgcgatccgcacgggctgcctcggcctctcactagtgcggatctgatggagtcgagcggggaggggctcaaggttgcctaccagggcttccctggagcgtacagcgaggctgcagcaaagaaggcctatccaaattgccagacagtgccctgtgagcactttgatactgcatttcaggctgttcaaaactggatagttgatagggcggtactgccacttgagaatactctgggtggtagtatacatcggaactatgaccttttacttcggcatgagctgcacatagttggagaggttcgccttgcagttcggcattgcttggtagccaatcgtggagtgaagatcggaaacctaagaaatgtcatcagtcatccccaggctcttgcgcaatgtgagcatacgctgacagagttaggaattgaacatagacaggctgttgatgacactgctggtgcagcaaagttagtcgcagaacaaatgctccaagatactggtgctgttgccagttcattagctgctgaactttatggactcgatattcttgctgaaaatattcaggacgaaaaagtcaatgtcacccgttttatgatgcttgcttgggaacctattatacctcgggttgataaaccattcaagactagtattgtgttttcacttgaagaaggacctggacagctcttcaaggcacttgcagtttttgcactgagggaaatcaacctcaccaagatagaaagccgtccacacaagaaaaggccttttcgtgtagctgatgatgctttctccacgcgagtcaagtacttcgactacctgttttatgtcgaccttgaggcgtctatggctgatccaaaaactcagaatgctctcagaaatttggaggagtttgcaacttttttaagagtcctggggagctatcctacagacgtgagcgaagcttgaatagcaagtgcttgctgcagatcacatgttagtgattaatcaattgtgtgcctttctcttaatcggataaacatccgcctttgatagctgctgtttggtgtaatgaaataaacatagttctccattatagagtcagaaacatgtagctctcagagcatatttcctagtacttggattgggacttgagcagtcttattactcataaaatgtacgtgggtagtccncagcagaatagtggatatactcccggggattgttcaggttgagtacaatgtagaatcagaatactgaactatgcgttgtgggggtcaacaaagtggatataaagtgattgggggg

SEQ ID NO: 10001 - protein, 422 aa, Triticum aestivum
  misc_feature (1)..(422): Ceres Seq. ID no. 13502944
FASRLPQSATPHLRLPSWPARRLMASMTTPRLPFLPARTRSAVAATSSSSPSSPLPRRSIKCSSSTNANSAPLPSTSRQPRAPVADGVGSADLNGLRAPPIPVADSPLPAYRDPHGLPRPLTSADLMESSGEGLKVAYQGFPGAYSEAAAKKAYPNCQTVPCEHFDTAFQAVQNWIVDRAVLPLENTLGGSIHRNYDLLLRHELHIVGEVRLAVRHCLVANRGVKIGNLRNVISHPQALAQCEHTLTELGIEHRQAVDDTAGAAKLVAEQMLQDTGAVASSLAAELYGLDILAENIQDEKVNVTRFMMLAWEPIIPRVDKPFKTSIVFSLEEGPGQLFKALAVFALREINLTKIESRPHKKRPFRVADDAFSTRVKYFDYLFYVDLEASMADPKTQNALRNLEEFATFLRVLGSYPTDVSEA

SEQ ID NO: 10002 - protein, 399 aa, Triticum aestivum
  misc_feature (1)..(399): Ceres Seq. ID no. 13502945
MASMTTPRLPFLPARTRSAVAATSSSSPSSPLPRRSIKCSSSTNANSAPLPSTSRQPRAPVADGVGSADLNGLRAPPIPVADSPLPAYRDPHGLPRPLTSADLMESSGEGLKVAYQGFPGAYSEAAAKKAYPNCQTVPCEHFDTAFQAVQNWIVDRAVLPLENTLGGSIHRNYDLLLRHELHIVGEVRLAVRHCLVANRGVKIGNLRNVISHPQALAQCEHTLTELGIEHRQAVDDTAGAAKLVAEQMLQDTGAVASSLAAELYGLDILAENIQDEKVNVTRFMMLAWEPIIPRVDKPFKTSIVFSLEEGPGQLFKALAVFALREINLTKIESRPHKKRPFRVADDAFSTRVKYFDYLFYVDLEASMADPKTQNALRNLEEFATFLRVLGSYPTDVSEA

SEQ ID NO: 10003 - protein, 396 aa, Triticum aestivum
  misc_feature (1)..(396): Ceres Seq. ID no. 13502946
MTTPRLPFLPARTRSAVAATSSSSPSSPLPRRSIKCSSSTNANSAPLPSTSRQPRAPVADGVGSADLNGLRAPPIPVADSPLPAYRDPHGLPRPLTSADLMESSGEGLKVAYQGFPGAYSEAAAKKAYPNCQTVPCEHFDTAFQAVQNWIVDRAVLPLENTLGGSIHRNYDLLLRHELHIVGEVRLAVRHCLVANRGVKIGNLRNVISHPQALAQCEHTLTELGIEHRQAVDDTAGAAKLVAEQMLQDTGAVASSLAAELYGLDILAENIQDEKVNVTRFMMLAWEPIIPRVDKPFKTSIVFSLEEGPGQLFKALAVFALREINLTKIESRPHKKRPFRVADDAFSTRVKYFDYLFYVDLEASMADPKTQNALRNLEEFATFLRVLGSYPTDVSEA

SEQ ID NO: 10004 - DNA, 1783 bp, Triticum aestivum
  misc_feature (1)..(1783): Ceres Seq. ID no. 13502952
ctagaacatcctaatcgaaaagaacaaaagcaagaagtctgctacccaatcccatctactaccccccatctctcttcctgctccgtggtgtacttgtggtctcgaggatgaggagctccatggccctcttggcggcggcgctgctgctgctggtgtcgctggcggcggcggcggacatgtcgatcgtgtcgtacggggagcggagcgaggaggaggtgcggcggatgtacgccgagtggatgtccgagcaccgcaggacgtacaacgccatcggcgaggaggagcgccgcttcgaggtcttcagggacaacctccgctacatcgaccagcacaacgccgccgccgacgccgggctccactccttccgcctcggcctcaaccgcttcgccgacctcaccaacgaggagtaccgcagcacgtacctgggcgcccggaccaagccggaccgggagcggaagctcagcgccaggtaccaggccgacgacaacgaggagctgccggagaccgtcgactggaggaagaagggggccgttgctgccatcaaggaccagggcggctgcgggagctgctgggctttctcagcaatagcagctgttgaaggcatcaaccagattgttacgggcgacatgatccctctgtccgagcaagagcttgttgactgtgacacttcatacaacgagggatgcaatggaggtctgatggactatgcgtttgagttcatcattaacaatggcggtatcgactctgaggaggactacccctacaaggagagggacaaccgttgcgatgctaacaagaaaaatgcgaaggttgttaccattgatgggtacgaggatgtgcccgtgaacagtgagaagagtctgcagaaggcagttgcaaaccagcccatcagtgttgcgattgaggctggtggcagggcattccagctctacaaatcgggtatcttcactggaacctgtggaacagcacttgaccatggtgtcgccgccgttggttatggtacagagaacggcaaggactactggctcgtcaggaactcctggggtaccgtctggggagaggatggttacatccggatggagcgtaacatcaaggcatccagtggcaaatgtggtattgccgttgagccttcctacccgacgaagacgggcgagaacccccctaaccccggcccaactccaccatctcccgccccaccgtcttccgtctgtgacagctacaacgagtgccccgcgagcacgacctgctgctgcatctacgagtacggcaaggagtgcttcgcctggggctgttgcccactcgagggtgctacctgctgcgatgatcactacagctgctgccctcataactatcccatctgcaacacccagcagggaacctgccttgcggccaaggacagtccactgtcagtgaaggctcagaggcgtaccctggccaagcctatcggtgctttctctgtcattgcaactgacggcaagaaaagtagcgcgtaaacatttgcatcaccacaatcctacagccaacggccatggtggttaacttctgcaaatgatcacctggtgacccacgatagaaggcgcagcatggcaatagctgtgctctcaagtatcttctttatagtagatgctcctgtacataatcctaaaatcgggttcggttgttcacagaaccgccacatttgcttttgcatatgtatatgtaaattcagcacattcccaggcagtttggggctgctattgttatatggaattcatcaagaaacaagataagcagatttcttgtc

SEQ ID NO: 10005 - protein, 461 aa, Triticum aestivum
  misc_feature (1)..(461): Ceres Seq. ID no. 13502953
MRSSMALLAAALLLLVSLAAAADMSIVSYGERSEEEVRRMYAEWMSEHRRTYNAIGEEERRFEVFRDNLRYIDQHNAAADAGLHSFRLGLNRFADLTNEEYRSTYLGARTKPDRERKLSARYQADDNEELPETVDWRKKGAVAAIKDQGGCGSCWAFSAIAAVEGINQIVTGDMIPLSEQELVDCDTSYNEGCNGGLMDYAFEFIINNGGIDSEEDYPYKERDNRCDANKKNAKVVTIDGYEDVPVNSEKSLQKAVANQPISVAIEAGGRAFQLYKSGIFTGTCGTALDHGVAAVGYGTENGKDYWLVRNSWGTVWGEDGYIRMERNIKASSGKCGIAVEPSYPTKTGENPPNPGPTPPSPAPPSSVCDSYNECPASTTCCCIYEYGKECFAWGCCPLEGATCCDDHYSCCPHNYPICNTQQGTCLAAKDSPLSVKAQRRTLAKPIGAFSVIATDGKKSSA

SEQ ID NO: 10006 - protein, 457 aa, Triticum aestivum
  misc_feature (1)..(457): Ceres Seq. ID no. 13502954
MALLAAALLLLVSLAAAADMSIVSYGERSEEEVRRMYAEWMSEHRRTYNAIGEEERRFEVFRDNLRYIDQHNAAADAGLHSFRLGLNRFADLTNEEYRSTYLGARTKPDRERKLSARYQADDNEELPETVDWRKKGAVAAIKDQGGCGSCWAFSAIAAVEGINQIVTGDMIPLSEQELVDCDTSYNEGCNGGLMDYAFEFIINNGGIDSEEDYPYKERDNRCDANKKNAKVVTIDGYEDVPVNSEKSLQKAVANQPISVAIEAGGRAFQLYKSGIFTGTCGTALDHGVAAVGYGTENGKDYWLVRNSWGTVWGEDGYIRMERNIKASSGKCGIAVEPSYPTKTGENPPNPGPTPPSPAPPSSVCDSYNECPASTTCCCIYEYGKECFAWGCCPLEGATCCDDHYSCCPHNYPICNTQQGTCLAAKDSPLSVKAQRRTLAKPIGAFSVIATDGKKSSA

SEQ ID NO: 10007 - protein, 438 aa, Triticum aestivum
  misc_feature (1)..(438): Ceres Seq. ID no. 13502955
MSIVSYGERSEEEVRRMYAEWMSEHRRTYNAIGEEERRFEVFRDNLRYIDQHNAAADAGLHSFRLGLNRFADLTNEEYRSTYLGARTKPDRERKLSARYQADDNEELPETVDWRKKGAVAAIKDQGGCGSCWAFSAIAAVEGINQIVTGDMIPLSEQELVDCDTSYNEGCNGGLMDYAFEFIINNGGIDSEEDYPYKERDNRCDANKKNAKVVTIDGYEDVPVNSEKSLQKAVANQPISVAIEAGGRAFQLYKSGIFTGTCGTALDHGVAAVGYGTENGKDYWLVRNSWGTVWGEDGYIRMERNIKASSGKCGIAVEPSYPTKTGENPPNPGPTPPSPAPPSSVCDSYNECPASTTCCCIYEYGKECFAWGCCPLEGATCCDDHYSCCPHNYPICNTQQGTCLAAKDSPLSVKAQRRTLAKPIGAFSVIATDGKKSSA

SEQ ID NO: 10008 - DNA, 1456 bp, Triticum aestivum
  misc_feature (1)..(1456): Ceres Seq. ID no. 13502973
accattacctagaacaycctamtcsarwwcacacacgcacaacacaagaaaccgcaggaaaaataataccaagccgaccaatcatggctcgcccccgcctccggctgctcctcgtcgccgccgccgtcctcctcctcctccacccggccctctcctcggcggcggaggggctggaggaccccctcatcgagcaggtggtcgggggcgacgcggagaacgagctggagctcaacgcggaggcgcacttcgcgagcttcgtccggcggttcggcaagtcctacagggacgccgacgagcacgcgcaccggctctccgtgttcagggacaacctccgccgcgcgcgccgccaccagcgcctcgacccctccgcggtgcacggcatcaccaagttctccgacctcacccccgacgagttccgggagcgcttcctcggcctccgcaagtcccgccggagcttcctcaaggggatctccgggtcggcgcacgacgcgccggccctccccaccgacggcctccccacagagttcgactggcgcgagcacggcgcggtcggcccagtcaaggaccagggttcgtgcgggtcgtgctggtccttcagtacgtcgggggcgctggagggtgccaactacctcgccaccggaaagctggaggtgctcagcgagcagcagctggtcgactgcgaccaccagtgtgacccgtcagaaccacgcgcatgtgatgcgggatgcaatggtggcttgatgactacagctttcagctatctcgcaaaagccggtggcttagaaaccgagaaggattacccatacactgggaggaacagtgcctgcaagtttgacaaatccaaaattgctgctcaagttaagaattttagtactgttgctattgacgaagatcagattgccgctaaccttgtgaaacatggcccacttgcaattggtatcaatgcagtattcatgcaaacgtacattggtggtgtctcatgcccatacatctgcggaaggcatcttgatcatggtgttctcctggttggctatggatcagctggttacgcaccgctccgcttcaaggagaaaccatactggatcataaagaactcatggggcgaaaactggggcgagagcgggtactacaagatctgcaggggtccgcatgtcaaaaacaagtgcggtgtcgattccatggtctccacggttaccgccatccatacctctaagaaggaataagatcttgtagtactcagtctggattgcctatagacatgcttgtgtgccaggactaggtattccatgatggttattccagtattgccttgcaattcgtaaccagtaaatatgtgaaacttctcttgattgctgtaatgtatctctgggttgctatgtattgctacgcagttcttggaacatggtagcagatatttgttgccatcattaatgtatataatctggtgttctggttg

SEQ ID NO: 10009 - protein, 406 aa, Triticum aestivum
  misc_feature (1)..(406): Ceres Seq. ID no. 15223212
  misc_feature (5)..(5): Xaa is any aa, unknown or other
  misc_feature (7)..(7): Xaa is any aa, unknown or other
  misc_feature (8)..(8): Xaa is any aa, unknown or other
  misc_feature (9)..(9): Xaa is any aa, unknown or other
HYLEXPXXXHTRTTQETAGKIIPSRPIMARPRLRLLLVAAAVLLLLHPALSSAAEGLEDPLIEQVVGGDAENELELNAEAHFASFVRRFGKSYRDADEHAHRLSVFRDNLRRARRHQRLDPSAVHGITKFSDLTPDEFRERFLGLRKSRRSFLKGISGSAHDAPALPTDGLPTEFDWREHGAVGPVKDQGSCGSCWSFSTSGALEGANYLATGKLEVLSEQQLVDCDHQCDPSEPRACDAGCNGGLMTTAFSYLAKAGGLETEKDYPYTGRNSACKFDKSKIAAQVKNFSTVAIDEDQIAANLVKHGPLAIGINAVFMQTYIGGVSCPYICGRHLDHGVLLVGYGSAGYAPLRFKEKPYWIIKNSWGENWGESGYYKICRGPHVKNKCGVDSMVSTVTAIHTSKKE

SEQ ID NO: 10010 - protein, 379 aa, Triticum aestivum
  misc_feature (1)..(379): Ceres Seq. ID no. 15223213
MARPRLRLLLVAAAVLLLLHPALSSAAEGLEDPLIEQVVGGDAENELELNAEAHFASFVRRFGKSYRDADEHAHRLSVFRDNLRRARRHQRLDPSAVHGITKFSDLTPDEFRERFLGLRKSRRSFLKGISGSAHDAPALPTDGLPTEFDWREHGAVGPVKDQGSCGSCWSFSTSGALEGANYLATGKLEVLSEQQLVDCDHQCDPSEPRACDAGCNGGLMTTAFSYLAKAGGLETEKDYPYTGRNSACKFDKSKIAAQVKNFSTVAIDEDQIAANLVKHGPLAIGINAVFMQTYIGGVSCPYICGRHLDHGVLLVGYGSAGYAPLRFKEKPYWIIKNSWGENWGESGYYKICRGPHVKNKCGVDSMVSTVTAIHTSKKE

SEQ ID NO: 10011 - protein, 230 aa, Triticum aestivum
  misc_feature (1)..(230): Ceres Seq. ID no. 15223214
  misc_feature (6)..(6): Xaa is any aa, unknown or other
  misc_feature (7)..(7): Xaa is any aa, unknown or other
  misc_feature (8)..(8): Xaa is any aa, unknown or other
  misc_feature (9)..(9): Xaa is any aa, unknown or other
  misc_feature (10)..(10): Xaa is any aa, unknown or other
PLPRTXXXXXHTHNTRNRRKNNTKPTNHGSPPPPAAPRRRRRPPPPPPGPLLGGGGAGGPPHRAGGRGRRGERAGAQRGGALRELRPAVRQVLQGRRRARAPALRVQGQPPPRAPPPAPRPLRGARHHQVLRPHPRRVPGALPRPPQVPPELPQGDLRVGARRAGPPHRRPPHRVRLARARRGRPSQGPGFVRVVLVLQYVGGAGGCQLPRHRKAGGAQRAAAGRLRPPV

SEQ ID NO: 10012 - DNA, 1490 bp, Triticum aestivum
  misc_feature (1)..(1490): Ceres Seq. ID no. 13502983
gtgctctgctgccacccccaaatctcctccccactcccgaatcaaatcccccgtcacctccgccaccaccccaccccacctatccccaccgccggcgcgagcacgggagcgcgagcgcgagcggagcgatggccggcgcgggatcctcgtcgggcggctcgggcggcggcggggggagggagggcgactgggactgcggcggctgcggcaaccgcaactacgccttccgctccctctgcaaccgctgcaagcagccgcgcctcctcgtcgaccccaacaccccgcgcgactccaagtggctcccccgcgccggcgactggatctgcaacggttgcagtaacaataattatgcatccagaaagaactgcaagaagtgcaacctgcccaaggaggaagcagcgatgccgcagttatcaatgggaggaatgatgccagcctatgcagattatatggccagggtacaggagattgccaatgctgggtataagatgaactttggcaatccagctatgcagcagcagctactcgcaaacgcaaactggccctatgggatggctggtagatatggtatgcaatcgtctgcttggccgttcgccggcaacagcacaaatcagtttcaaggtgttccaaaggactggcgtagtggtgactggctctgcagctgtggattccataactattcatctcgtgctcagtgcaaagagtgtaatgcacctgtcccatcaggcatggcctctacaaccatgaaatccacaggagcagatagttcttcaacattaggtaataagcgtttggcatcagaggagcttgctaatgactgggataataaaaggctaaatccaggaaatgctaattatccactttcagcagcaggctcagataatttatttatgggtcaaggtgctggaaacaataatggccagacaacttattctgcatatgacaatggaaactcaatggcatctggacaaattccagggatgtctggtgtagttggtaaaggagcaaaatggcgtgaaggagactggttgtgcaccaactgcagcaatcataactacgcatctcgtgcattttgtaacagatgcaaaactgcgaaagagtcttcggttcatccgggtgcgctataataatagctttgcttgtacttttgcgaccaagttattgaagcgggtgtggagtctcctggttctgccacggctgatcggtcgctgccgtcgccaggattgttgttatgtttgtggtttggccctgcagtacttatgctgctgttaaaattgttctgtctgaatctaatattgtttgtgggagtttgcatttgtctacgccgagcactagaataaaacgtttcctgtatgtcgaagtgtaccatctgttttttgtttttgtgtgtgcgtgtgcaacgatttgatttgttcttcagtacctcaacagctatgatgtaatgtaatgctggatctatttcatgtggcaatgctggattttattgtttt

SEQ ID NO: 10013 - protein, 374 aa, Triticum aestivum
  misc_feature (1)..(374): Ceres Seq. ID no. 13502984
ALLPPPNLLPTPESNPPSPPPPPHPTYPHRRREHGSASASGAMAGAGSSSGGSGGGGGREGDWDCGGCGNRNYAFRSLCNRCKQPRLLVDPNTPRDSKWLPRAGDWICNGCSNNNYASRKNCKKCNLPKEEAAMPQLSMGGMMPAYADYMARVQEIANAGYKMNFGNPAMQQQLLANANWPYGMAGRYGMQSSAWPFAGNSTNQFQGVPKDWRSGDWLCSCGFHNYSSRAQCKECNAPVPSGMASTTMKSTGADSSSTLGNKRLASEELANDWDNKRLNPGNANYPLSAAGSDNLFMGQGAGNNNGQTTYSAYDNGNSMASGQIPGMSGVVGKGAKWREGDWLCTNCSNHNYASRAFCNRCKTAKESSVHPGAL

SEQ ID NO: 10014 - protein, 332 aa, Triticum aestivum
  misc_feature (1)..(332): Ceres Seq. ID no. 13502985
MAGAGSSSGGSGGGGGREGDWDCGGCGNRNYAFRSLCNRCKQPRLLVDPNTPRDSKWLPRAGDWICNGCSNNNYASRKNCKKCNLPKEEAAMPQLSMGGMMPAYADYMARVQEIANAGYKMNFGNPAMQQQLLANANWPYGMAGRYGMQSSAWPFAGNSTNQFQGVPKDWRSGDWLCSCGFHNYSSRAQCKECNAPVPSGMASTTMKSTGADSSSTLGNKRLASEELANDWDNKRLNPGNANYPLSAAGSDNLFMGQGAGNNNGQTTYSAYDNGNSMASGQIPGMSGVVGKGAKWREGDWLCTNCSNHNYASRAFCNRCKTAKESSVHPGAL

SEQ ID NO: 10015 - protein, 241 aa, Triticum aestivum
  misc_feature (1)..(241): Ceres Seq. ID no. 13502986
MPQLSMGGMMPAYADYMARVQEIANAGYKMNFGNPAMQQQLLANANWPYGMAGRYGMQSSAWPFAGNSTNQFQGVPKDWRSGDWLCSCGFHNYSSRAQCKECNAPVPSGMASTTMKSTGADSSSTLGNKRLASEELANDWDNKRLNPGNANYPLSAAGSDNLFMGQGAGNNNGQTTYSAYDNGNSMASGQIPGMSGVVGKGAKWREGDWLCTNCSNHNYASRAFCNRCKTAKESSVHPGAL

SEQ ID NO: 10016 - DNA, 1266 bp, Triticum aestivum
  misc_feature (1)..(1266): Ceres Seq. ID no. 13503463
aaattcgtctgtgccgaaacccctctccaatctgagatctcctcacgagcgcgacccggagccgaaaccctagagtagagcaggggcggcggccatggccatcatctcggacatccaggaggaggaggcgccgccgcagcagccgcaagcggccccggccccggcggcggtcgacgtggacctggaggtcctcgaggcggtgctcgagcgcaagggcggcgcgctcccgttcctccacgcggccatcgacgtcgcgcaccggcgctccgacctcttccgcgacccctccgcggtcggcaagatcaccgcgatggcctcggcgtgcagggcgcaggtggaggcggaggagaggaaggccagggatgccaagaggaaggcggcggagctggagaaggcagcggcggccgagaaggagagggtggtcaaggccgcggccgagaaggagaagcgggagagctcggtggtgacggaggagcggggtgcagggagctcggcggagaaggatggcagcacggaggtggagaagaaggagagcaaggcgaacaaaccaaatgctggcaatggtcttgatatggagaagtattcctggactcagcagttaccagaggttaatgtcaatgttcctgttcctgaaggaacaaagtcaaggtttgttgtctgtgagatcaagaaggatcatctgaaggttgggttgaagggccagcctcctatcattgatggtgagcttcacaagccagttaaagtggatgactgcttctggagcatagaggatgggaaagcactgtctatactgctgacaaagcacaatcaaatggagtggtggaaatctgtgatcaaaggtgaccctgaagtcgacacccagaaggcggaaccagagactagcaagctttctgatctggatcctgagactaggcaaactgtggagaagatgatgtttgaccagcgccagaagcagatgggcctgccaacaagtgatgaaatgcagaagcaagacatgctcaagaagttcatgtctcagcacccggagatggacttctcaagggcgaagatagcttgagattggttggatccaaggggatgagaagtttttgatggataaatcgcatctatcctagttcttttcagtttcgggtgccttgtggttaagtgtctgattaaggtcgcgaaggacatggttttcgtgatgctttggaaatataagtgaactatgttttctgttgttggaactgatcgattgcctaattttctgtagtttgtgtttcgtcc

SEQ ID NO: 10017 - protein, 320 aa, Triticum aestivum
  misc_feature (1)..(320): Ceres Seq. ID no. 15223227
MAIISDIQEEEAPPQQPQAAPAPAAVDVDLEVLEAVLERKGGALPFLHAAIDVAHRRSDLFRDPSAVGKITAMASACRAQVEAEERKARDAKRKAAELEKAAAAEKERVVKAAAEKEKRESSVVTEERGAGSSAEKDGSTEVEKKESKANKPNAGNGLDMEKYSWTQQLPEVNVNVPVPEGTKSRFVVCEIKKDHLKVGLKGQPPIIDGELHKPVKVDDCFWSIEDGKALSILLTKHNQMEWWKSVIKGDPEVDTQKAEPETSKLSDLDPETRQTVEKMMFDQRQKQMGLPTSDEMQKQDMLKKFMSQHPEMDFSRAKIA

SEQ ID NO: 10018 - protein, 248 aa, Triticum aestivum
  misc_feature (1)..(248): Ceres Seq. ID no. 15223228
MASACRAQVEAEERKARDAKRKAAELEKAAAAEKERVVKAAAEKEKRESSVVTEERGAGSSAEKDGSTEVEKKESKANKPNAGNGLDMEKYSWTQQLPEVNVNVPVPEGTKSRFVVCEIKKDHLKVGLKGQPPIIDGELHKPVKVDDCFWSIEDGKALSILLTKHNQMEWWKSVIKGDPEVDTQKAEPETSKLSDLDPETRQTVEKMMFDQRQKQMGLPTSDEMQKQDMLKKFMSQHPEMDFSRAKIA

SEQ ID NO: 10019 - protein, 161 aa, Triticum aestivum
  misc_feature (1)..(161): Ceres Seq. ID no. 15223229
MEKYSWTQQLPEVNVNVPVPEGTKSRFVVCEIKKDHLKVGLKGQPPIIDGELHKPVKVDDCFWSIEDGKALSILLTKHNQMEWWKSVIKGDPEVDTQKAEPETSKLSDLDPETRQTVEKMMFDQRQKQMGLPTSDEMQKQDMLKKFMSQHPEMDFSRAKIA

SEQ ID NO: 10020 - DNA, 1585 bp, Triticum aestivum
  misc_feature (1)..(1585): Ceres Seq. ID no. 13503468
gactgcaagtagttttaggagagcgccgaggacgcacccgcgtactgccaaatacaagccgcggtgcacccgtgccgccgttcgtccgctcccgtcgtccgcacacgcgcacgctcggctcgataatcctcaccggcgagcgcgcagctcacgatctatcatcccgatgtcgccggtgaggattaccgactcgacctatgtcggcgtgccggagaccgccgcgccaccgccggggccgatcaggttcaccgcgatggaggcgctctgggtcgtcttcccggtgctgcagcacgtgctgctctacgagggcgacgacgacatgccgcccttcgacgccattctcgagtccctccgctcctccctcgcggccactctgggcagcttcgcgccgctcgccggcaagctggtccacctcgaggagacgggggacgtgggcatcagctgctccgcctccgacggcgtcaggttcgtcgtcgccgagtgcgacgccgacatccgccgcctcgccggcgacgaggagcacgacctgcgcgtcctcgaggcgctcgtgccggaggtggacatgggccggctgccgaccgccctgctggccgtgcaggccacgcgtttcgagggcggcgtggcgctcgggctgacggtgcaccacggcgccgccgacgggcgggcgctgtggacgttcgtcgaggcgtgggcgacggcgtgccggggcgagacgccggccaccacgccgtgcttcgaccgctcgctcgtcaagatgcccgccggcgacgagctggccaggagtgttctgcggaagttcgctcccaatttgccctcggcggcactagcgtcatcagtcttcgaagaccgaaagcggctcactcgccgaaccttcaccttggaccaaggagacatccaacgcctgaagctgcgcattgtccacctcaatgagtcgggcggcacgcccctgcctcgcccgccgtctgctttcgccgccgtggtcgcgctcgcgtggacgtgcttcgcccggtgcaagtcgttctccttggacgacgacgtgtggctcttcttcttcgccgacatccgcgagcgccttgaccctcccgtcggcgcggggtacatcggctcgtgcctcaccaagtgtttggcaaggctccctgcccgggagcttcatggtgagcgtgccctggcggctgcggcgtcggcggtccaggacgagatcaacaagatgaaggaagaccctatcgctggttggaacttcttctcattcgatcccatgcccgccatggaccggttgatgaacatatcaggctcgtcgggctttagtgcatacaagatcgccgacttcgggtggggaaagccgacacggacagagccgattaggatgaacacagacggtcaggtggcattgatgggcagcagggacgaccggggtgtgcaggtctcagtggcactgctccaagcggcacaaatggacgagttcaaatctaactttctggcgctacttgagtgacaatttttgttctcaaagagacctagttaggtcaattcaaaacagtacacccagatgttttataaagattaatacattataattgaattgttt

SEQ ID NO: 10021 - protein, 496 aa, Triticum aestivum
  misc_feature (1)..(496): Ceres Seq. ID no. 13503469
TASSFRRAPRTHPRTAKYKPRCTRAAVRPLPSSAHAHARLDNPHRRARSSRSIIPMSPVRITDSTYVGVPETAAPPPGPIRFTAMEALWVVFPVLQHVLLYEGDDDMPPFDAILESLRSSLAATLGSFAPLAGKLVHLEETGDVGISCSASDGVRFVVAECDADIRRLAGDEEHDLRVLEALVPEVDMGRLPTALLAVQATRFEGGVALGLTVHHGAADGRALWTFVEAWATACRGETPATTPCFDRSLVKMPAGDELARSVLRKFAPNLPSAALASSVFEDRKRLTRRTFTLDQGDIQRLKLRIVHLNESGGTPLPRPPSAFAAVVALAWTCFARCKSFSLDDDVWLFFFADIRERLDPPVGAGYIGSCLTKCLARLPARELHGERALAAAASAVQDEINKMKEDPIAGWNFFSFDPMPAMDRLMNISGSSGFSAYKIADFGWGKPTRTEPIRMNTDGQVALMGSRDDRGVQVSVALLQAAQMDEFKSNFLALLE

SEQ ID NO: 10022 - protein, 441 aa, Triticum aestivum
  misc_feature (1)..(441): Ceres Seq. ID no. 13503470
MSPVRITDSTYVGVPETAAPPPGPIRFTAMEALWVVFPVLQHVLLYEGDDDMPPFDAILESLRSSLAATLGSFAPLAGKLVHLEETGDVGISCSASDGVRFVVAECDADIRRLAGDEEHDLRVLEALVPEVDMGRLPTALLAVQATRFEGGVALGLTVHHGAADGRALWTFVEAWATACRGETPATTPCFDRSLVKMPAGDELARSVLRKFAPNLPSAALASSVFEDRKRLTRRTFTLDQGDIQRLKLRIVHLNESGGTPLPRPPSAFAAVVALAWTCFARCKSFSLDDDVWLFFFADIRERLDPPVGAGYIGSCLTKCLARLPARELHGERALAAAASAVQDEINKMKEDPIAGWNFFSFDPMPAMDRLMNISGSSGFSAYKIADFGWGKPTRTEPIRMNTDGQVALMGSRDDRGVQVSVALLQAAQMDEFKSNFLALLE

SEQ ID NO: 10023 - protein, 412 aa, Triticum aestivum
  misc_feature (1)..(412): Ceres Seq. ID no. 13503471
MEALWVVFPVLQHVLLYEGDDDMPPFDAILESLRSSLAATLGSFAPLAGKLVHLEETGDVGISCSASDGVRFVVAECDADIRRLAGDEEHDLRVLEALVPEVDMGRLPTALLAVQATRFEGGVALGLTVHHGAADGRALWTFVEAWATACRGETPATTPCFDRSLVKMPAGDELARSVLRKFAPNLPSAALASSVFEDRKRLTRRTFTLDQGDIQRLKLRIVHLNESGGTPLPRPPSAFAAVVALAWTCFARCKSFSLDDDVWLFFFADIRERLDPPVGAGYIGSCLTKCLARLPARELHGERALAAAASAVQDEINKMKEDPIAGWNFFSFDPMPAMDRLMNISGSSGFSAYKIADFGWGKPTRTEPIRMNTDGQVALMGSRDDRGVQVSVALLQAAQMDEFKSNFLALLE

SEQ ID NO: 10024 - DNA, 1391 bp, Triticum aestivum
  misc_feature (1)..(1391): Ceres Seq. ID no. 13503476
accaaagcattagcacgctcctccacagcccactgctctgcctgtttgtggctttgccgtttcctgttccccactcatcgtcggcgatacaatcttctcgtggattgtctcgtggaggcgggagcgatggggcgtccgtgcgtcggcgctctcctggcgtgcgccgccgttgcagcttcttgctgcggctgcttccagttccagggtgctgctgcggcggcgaccccgtcgttcggggacaacttcgacatcaccggcgccgaggaccacgtcaagacctcccccgacggccagacctggtacctctccctcgacaacaagacgggcgttgggttccagacgaagcagaagtacctgttcgggtggttcagcatgaagctcaagctcgtcgggaacgactccgccggcgtcgtcaccgcctactacatgtgctcggacctggacgcggcgccggagcgcgacgagctggacttcgagttcctgggcaaccgcaccggcgagccgtacatcatccagacgaacgtgtaccgcagcggcgtaggcgggcgggagatgcggcactcgctgtggttcgaccccaccgccgagttccacagctactccatcctctggaaccccaagcagatcgtgtttttcgtggacaaggtgccgatcagggagtaccgcaactcggacaagcccaacaggttcttcccgatcatgaagcccatgtacgtcttctccagcatctggaacgccgacgactgggccacgcgcggggggctggagaagacggactggaccaaggggcccttcgtctcctcctacagcgacttcaccgccgacgcctgcgcctgggccaccggcccggccccgccggcgtgcgcggccgccacggggaacagctggtgggaccagccgccggcgtgggcgctcgacgacggccagcgccgggactcgggctgggtggccaggaacctcgtgatatacgactactgcgacgaccgcaagaggttcccggccgtgccggaggagtgcgcgctcaggaccaagactagctagtagctcctcatggatgggccgccctaggtctcgcttcacatgcatcgttcttttttgggggttcgatcgagtacgtggtgtggtgtagctatcaattggtggatggatttttttttcttttctcttctcttgttttgtgatgatgagatgcacatgcggacgtgcatgtgcacggtgatgcggcattgattgcccggggtggctgtgctctcatgtgagtgatagccctttcggaggaaaatgatgacatttttgttccgatgccttccatgctgcacgacacgagcatggatgggccaaaacttcatagaaatggtcccacgtatacgcatgataatcggcttcgactt

SEQ ID NO: 10025 - protein, 346 aa, Triticum aestivum
  misc_feature (1)..(346): Ceres Seq. ID no. 13503477
TKALARSSTAHCSACLWLCRFLFPTHRRRYNLLVDCLVEAGAMGRPCVGALLACAAVAASCCGCFQFQGAAAAATPSFGDNFDITGAEDHVKTSPDGQTWYLSLDNKTGVGFQTKQKYLFGWFSMKLKLVGNDSAGVVTAYYMCSDLDAAPERDELDFEFLGNRTGEPYIIQTNVYRSGVGGREMRHSLWFDPTAEFHSYSILWNPKQIVFFVDKVPIREYRNSDKPNRFFPIMKPMYVFSSIWNADDWATRGGLEKTDWTKGPFVSSYSDFTADACAWATGPAPPACAAATGNSWWDQPPAWALDDGQRRDSGWVARNLVIYDYCDDRKRFPAVPEECALRTKTS

SEQ ID NO: 10026 - protein, 344 aa, Triticum aestivum
  misc_feature (1)..(344): Ceres Seq. ID no. 13503478
QSISTLLHSPLLCLFVALPFPVPHSSSAIQSSRGLSRGGGSDGASVRRRSPGVRRRCSFLLRLLPVPGCCCGGDPVVRGQLRHHRRRGPRQDLPRRPDLVPLPRQQDGRWVPDEAEVPVRVVQHEAQARRERLRRRRHRLLHVLGPGRGAGARRAGLRVPGQPHRRAVHHPDERVPQRRRRAGDAALAVVRPHRRVPQLLHPLEPQADRVFRGQGADQGVPQLGQAQQVLPDHEAHVRLLQHLERRRLGHARGAGEDGLDQGALRLLLQRLHRRRLRLGHRPGPAGVRGRHGEQLVGPAAGVGARRRPAPGLGLGGQEPRDIRLLRRPQEVPGRAGGVRAQDQD

SEQ ID NO: 10027 - protein, 304 aa, Triticum aestivum
  misc_feature (1)..(304): Ceres Seq. ID no. 13503479
MGRPCVGALLACAAVAASCCGCFQFQGAAAAATPSFGDNFDITGAEDHVKTSPDGQTWYLSLDNKTGVGFQTKQKYLFGWFSMKLKLVGNDSAGVVTAYYMCSDLDAAPERDELDFEFLGNRTGEPYIIQTNVYRSGVGGREMRHSLWFDPTAEFHSYSILWNPKQIVFFVDKVPIREYRNSDKPNRFFPIMKPMYVFSSIWNADDWATRGGLEKTDWTKGPFVSSYSDFTADACAWATGPAPPACAAATGNSWWDQPPAWALDDGQRRDSGWVARNLVIYDYCDDRKRFPAVPEECALRTKTS

SEQ ID NO: 10028 - DNA, 1890 bp, Triticum aestivum
  misc_feature (1)..(1890): Ceres Seq. ID no. 13503498
cctaatcgaaaaccacgagcggaggcacgtgagcgctgcgcgaagaggaggactcgcagccgcctccaccctcctctgctgatccaatcaggtcaacgcgtgcgccccctccctcctctgctgcggctgctgcggcttagatctccctcttcaatctggagagataggaggattctgagaagcaaaccgagtgggactcctcgaatcaagtccgtgccttcatcagcaaaagaatccccgagtgcccaatccaatacagttcttcgcgtattcgaatcagattatgaagtccggcggtacacctgagaataatcggactgtcgccgaagctccgtatcttcctcctccggcattgggtctttttaagtcgtccaagattgattttgcctatatggaggcctgtagcctagcctggacaatgagcttatggagtctagctatacacccagcatatctgtgctcgctagttctcagagctttgcctaggctgctacgcctcactccaagttcactgaagaaattctgcaagcatcctccactgatcaagactatggagggcgcatcgcctgagctgcctcaggacatcttgatgagcatcttggccaccctcgagatccctgacctcatccgtgccgggtcggtctgctcctcatggcgctccacgtacttgaggctgcgcagccttgggcactacacgcgcccccagacgccgtgcctcctctacacatctgaatctgctggcgagagcgttgcttgcctctacagcctcgcggagaagcggacgtacaagctgactcttccagggccgcctatcagaaataggcatctgattgggtcctcgcaaggcttgcttgttacagttgatgacagatctgagatgcaccttgtcaatcccatcactggtgaacagattgatctcccttcggtgatcaccatcgagcatgtgaaacccagctataatgactccggtgctcttcaccagtacgagtactcatgccacaccgcaaaaagggtttacggtccgccatcgatcttggctcttggagagctgaggaacaagctccactataaagcttttgtgttttctgatgcatgcaatggatacattgtggcgctcatacacaatccagccagtcagctctcggttgcaagggcaggggatgatagttggatatggctgccaccatacaccaactatgacgattgcatttacaagaacggcctgctgtacgcagtcacttcatatggacaaattcacgcttttgacctaagtagccctgttgtcacgatgaagatgattacacgggagccagagcctgatgaccggtttctgaatacttacattgtacaagctccatggggcaatcttcttcaggtgtggagattatatgagcactgtgatttagaacccgagcctggggcatctgtgttttggagcactggaaaattcaaaatatatgaagtcgatgcttcttcaggagagaaaattaagaaaaccagttgcttgcgcgaccatgtgttgtttcttgggcacaatcaatcactttgtcttgctgctcaagactatccggctctcaagggaaaccatgcctactttaccgatgacagtgtgctttggacaaggggattcaagaacagtccccgtgatatgggaattctcgacttgggtaataacagcagggaggaacttgtgtcttcccagctttgctccaactgcccagctccggtgtggattacacccaatcttagaaagatgaacttggcattcaatgaataggttttagcttcctttatctataattatatgtaataattatttagtttggtaggcggtggtcctgtgttgatgaaccctgtactcgtacacttgaaccactttttaagaagttc

SEQ ID NO: 10029 - protein, 497 aa, Triticum aestivum
  misc_feature (1)..(497): Ceres Seq. ID no. 15223233
MKSGGTPENNRTVAEAPYLPPPALGLFKSSKIDFAYMEACSLAWTMSLWSLAIHPAYLCSLVLRALPRLLRLTPSSLKKFCKHPPLIKTMEGASPELPQDILMSILATLEIPDLIRAGSVCSSWRSTYLRLRSLGHYTRPQTPCLLYTSESAGESVACLYSLAEKRTYKLTLPGPPIRNRHLIGSSQGLLVTVDDRSEMHLVNPITGEQIDLPSVITIEHVKPSYNDSGALHQYEYSCHTAKRVYGPPSILALGELRNKLHYKAFVFSDACNGYIVALIHNPASQLSVARAGDDSWIWLPPYTNYDDCIYKNGLLYAVTSYGQIHAFDLSSPVVTMKMITREPEPDDRFLNTYIVQAPWGNLLQVWRLYEHCDLEPEPGASVFWSTGKFKIYEVDASSGEKIKKTSCLRDHVLFLGHNQSLCLAAQDYPALKGNHAYFTDDSVLWTRGFKNSPRDMGILDLGNNSREELVSSQLCSNCPAPVWITPNLRKMNLAFNE

SEQ ID NO: 10030 - protein, 461 aa, Triticum aestivum
  misc_feature (1)..(461): Ceres Seq. ID no. 15223234
MEACSLAWTMSLWSLAIHPAYLCSLVLRALPRLLRLTPSSLKKFCKHPPLIKTMEGASPELPQDILMSILATLEIPDLIRAGSVCSSWRSTYLRLRSLGHYTRPQTPCLLYTSESAGESVACLYSLAEKRTYKLTLPGPPIRNRHLIGSSQGLLVTVDDRSEMHLVNPITGEQIDLPSVITIEHVKPSYNDSGALHQYEYSCHTAKRVYGPPSILALGELRNKLHYKAFVFSDACNGYIVALIHNPASQLSVARAGDDSWIWLPPYTNYDDCIYKNGLLYAVTSYGQIHAFDLSSPVVTMKMITREPEPDDRFLNTYIVQAPWGNLLQVWRLYEHCDLEPEPGASVFWSTGKFKIYEVDASSGEKIKKTSCLRDHVLFLGHNQSLCLAAQDYPALKGNHAYFTDDSVLWTRGFKNSPRDMGILDLGNNSREELVSSQLCSNCPAPVWITPNLRKMNLAFNE

SEQ ID NO: 10031 - protein, 452 aa, Triticum aestivum
  misc_feature (1)..(452): Ceres Seq. ID no. 15223235
MSLWSLAIHPAYLCSLVLRALPRLLRLTPSSLKKFCKHPPLIKTMEGASPELPQDILMSILATLEIPDLIRAGSVCSSWRSTYLRLRSLGHYTRPQTPCLLYTSESAGESVACLYSLAEKRTYKLTLPGPPIRNRHLIGSSQGLLVTVDDRSEMHLVNPITGEQIDLPSVITIEHVKPSYNDSGALHQYEYSCHTAKRVYGPPSILALGELRNKLHYKAFVFSDACNGYIVALIHNPASQLSVARAGDDSWIWLPPYTNYDDCIYKNGLLYAVTSYGQIHAFDLSSPVVTMKMITREPEPDDRFLNTYIVQAPWGNLLQVWRLYEHCDLEPEPGASVFWSTGKFKIYEVDASSGEKIKKTSCLRDHVLFLGHNQSLCLAAQDYPALKGNHAYFTDDSVLWTRGFKNSPRDMGILDLGNNSREELVSSQLCSNCPAPVWITPNLRKMNLAFNE

SEQ ID NO: 10032 - DNA, 1619 bp, Triticum aestivum
  misc_feature (1)..(1619): Ceres Seq. ID no. 13503499
acccacgccacgctcgcgctcaaagcctggtcggtaacagagccaaggtgccatttctcgacccccctctccacatacctctcctagctagctacccatccgcttccacttggccatttcccatcccacatcctgcttgcttccggagctcatcagcatcgcttggcctaaggctcgcttcaactgcctgctcttctcagctcatcccctgctggtgtagcatttggagtctcggagactttgaattggctcgccaagaacgagtcctatggaagaaagctccatgaaaagagaagccatgcctcgactcctggatctcatcccggacgagaaagaatggagcctgagaggaggagcgccagggcagggcaggtcaaaaaacacaggcttcgggagcgacgaggacgagaaactggagctgaagcttggccttccaggcctcgtacaagaggagccagcggccagctcaagagagaagagggtgcatcaggagagcccggccctctaccttgggtacccccctagacactccacggccaccacaacgacgaccaccaccggagcaaagagggggttcctggacacggttgaggccaaagcacaaggttatgagaaggagcaggcgagagcagcaacatgtgggaaggaactggcgatggaggaaaatacagaggccgtcggtgagaggaagaaagggtgctgtcccccaccaccaccagcacatgcccctcctgctacacctgcgcgcaacatcggcaacagaccgcaggcgcggggaagaggggctgcaggtccagtggtcggctggcctccaatccggtcattcaggagaaaccttgcaagcactagtgcatccaaacagccccctgaaccacaaatcggtgaagccgatgccaaggccgtgcttgactgcaagaaaagccctcttgtgaaaatcaacatggatgggatccccattggaaggaaagttgatcttgcagcatgtgacagctacgggagactttcattggctgtcaaagatctcttccacgggtttcttcaagtgcaaagggacccgtcgaaggttgaccgtacacagcaaggagcagatgaaaaaatattttcgcagttgctagacgggtccggtgaatatactctagtttacgaagacagtgaaggagacaggatgctggttggggatgtcccttggaatgtgtttgtttcaaccgctaaaaggctgagggttctgagaagctcagagctttcccatgatctgattggagctactcctgagagagcagcaaatggctgaaatggtgacaccttttcaaccatttggaatgttgctcactgaagccgtaaactaaaggaactcctaagaagcaggggagacctaaatcctgtggtcagtttggagatcgttatcctttttgaggattagtagtttggtaacctttttttcttgtagtgagatgaattagcataccgcagatgcatggagatatcctgcctattttgtaaattaggctaccttgtatttaacgctatagttctcgattcagttacatagatttggcgcctattttctctgacaaatttgtaacctgacatgcaaatctgttcatgacaaaagaggaccc

SEQ ID NO: 10033 - protein, 340 aa, Triticum aestivum
  misc_feature (1)..(340): Ceres Seq. ID no. 15223236
MEESSMKREAMPRLLDLIPDEKEWSLRGGAPGQGRSKNTGFGSDEDEKLELKLGLPGLVQEEPAASSREKRVHQESPALYLGYPPRHSTATTTTTTTGAKRGFLDTVEAKAQGYEKEQARAATCGKELAMEENTEAVGERKKGCCPPPPPAHAPPATPARNIGNRPQARGRGAAGPVVGWPPIRSFRRNLASTSASKQPPEPQIGEADAKAVLDCKKSPLVKINMDGIPIGRKVDLAACDSYGRLSLAVKDLFHGFLQVQRDPSKVDRTQQGADEKIFSQLLDGSGEYTLVYEDSEGDRMLVGDVPWNVFVSTAKRLRVLRSSELSHDLIGATPERAANG

SEQ ID NO: 10034 - protein, 335 aa, Triticum aestivum
  misc_feature (1)..(335): Ceres Seq. ID no. 15223237
MKREAMPRLLDLIPDEKEWSLRGGAPGQGRSKNTGFGSDEDEKLELKLGLPGLVQEEPAASSREKRVHQESPALYLGYPPRHSTATTTTTTTGAKRGFLDTVEAKAQGYEKEQARAATCGKELAMEENTEAVGERKKGCCPPPPPAHAPPATPARNIGNRPQARGRGAAGPVVGWPPIRSFRRNLASTSASKQPPEPQIGEADAKAVLDCKKSPLVKINMDGIPIGRKVDLAACDSYGRLSLAVKDLFHGFLQVQRDPSKVDRTQQGADEKIFSQLLDGSGEYTLVYEDSEGDRMLVGDVPWNVFVSTAKRLRVLRSSELSHDLIGATPERAANG

SEQ ID NO: 10035 - protein, 330 aa, Triticum aestivum
  misc_feature (1)..(330): Ceres Seq. ID no. 15223238
MPRLLDLIPDEKEWSLRGGAPGQGRSKNTGFGSDEDEKLELKLGLPGLVQEEPAASSREKRVHQESPALYLGYPPRHSTATTTTTTTGAKRGFLDTVEAKAQGYEKEQARAATCGKELAMEENTEAVGERKKGCCPPPPPAHAPPATPARNIGNRPQARGRGAAGPVVGWPPIRSFRRNLASTSASKQPPEPQIGEADAKAVLDCKKSPLVKINMDGIPIGRKVDLAACDSYGRLSLAVKDLFHGFLQVQRDPSKVDRTQQGADEKIFSQLLDGSGEYTLVYEDSEGDRMLVGDVPWNVFVSTAKRLRVLRSSELSHDLIGATPERAANG

SEQ ID NO: 10036 - DNA, 1361 bp, Triticum aestivum
  misc_feature (1)..(1361): Ceres Seq. ID no. 13503549
acaggggaaaaacctcttcctagcgagatttccccacccgtcttcttcctccgaaaccctaatccccaaatcggagaatcggacccagcccggcgccgcggagagcatccccccgtcgaccggcatggcaattgctcgcactggcgtgtacgtggacgactacttggagtattcgagcaccctggccggcgacctgcagaggatcctctccaccatgcacgagctcgacgagagggcccatggcattttgggtcagacaaaagggcagatcaaatatctcctgggggtgccatcccatgggttcgacaggccaaacgtggtgcatgatgaaaatgcctcggagaagatgacgagggatattgaaaatagccaggacaacgcgcttagtctctgcacggagaaagtgttgctcgcacgccaagcttatgacctgatagagagccatatcaaacgtcttgatgaagacctaggccagtttgcagaagatttaaagcaagaaggaaaaatacctccagatgaaccgcatatccttcctccaatgccggtgggtggcagggatgaaagacggaggtccagttttagtacaccccaagcagcaaggaagtttgtcagagagaaggaatgggatagggatagggagagaggtatggacttcgacttaatgccccctccaggtagcagcaacaagaaggccgttgcatctatggatgtggatcaaatgattgatccaaatgaaccaacatattgtatatgccaccaggtttcatatggtgatatgattgcttgtgacaatgagaattgtgaaggaggcgaatggttccattactcgtgcgttggtctgacaccagaaacaagattcaaagggaaatggttttgcccaacttgcaggaatcttcaatgagaggttctcctaaattgtgttgacgaggcgagcggttccggtcggcccagactttccgcaacatgcaggactcttcaacacgaggctctcagaagcttttcttggacaggaggataccaaatggtacatgtttcaatttgtaaggaggcgtttgcttacagtgtggtcttattttggtaataatgtatatgctggagaggacgcgactgttctagagaaggataaaaaagcttggcgtgttctgttgttgtatcttgtcgccgcaaacaatctatcatagtttcaggtgttggtaacctggtaactattttactttggtcgtgatgtctattaagcgtcatcgcaacctttgctcgcatgattctgcccctgagcaccattatctgctgcatcttggttgagctggaggtgcagcatatgcacttctacagcacacattgtattaaattattgtgtaact

SEQ ID NO: 10037 - protein, 299 aa, Triticum aestivum
  misc_feature (1)..(299): Ceres Seq. ID no. 13503550
QGKNLFLARFPHPSSSSETLIPKSENRTQPGAAESIPPSTGMAIARTGVYVDDYLEYSSTLAGDLQRILSTMHELDERAHGILGQTKGQIKYLLGVPSHGFDRPNVVHDENASEKMTRDIENSQDNALSLCTEKVLLARQAYDLIESHIKRLDEDLGQFAEDLKQEGKIPPDEPHILPPMPVGGRDERRRSSFSTPQAARKFVREKEWDRDRERGMDFDLMPPPGSSNKKAVASMDVDQMIDPNEPTYCICHQVSYGDMIACDNENCEGGEWFHYSCVGLTPETRFKGKWFCPTCRNLQ

SEQ ID NO: 10038 - protein, 258 aa, Triticum aestivum
  misc_feature (1)..(258): Ceres Seq. ID no. 13503551
MAIARTGVYVDDYLEYSSTLAGDLQRILSTMHELDERAHGILGQTKGQIKYLLGVPSHGFDRPNVVHDENASEKMTRDIENSQDNALSLCTEKVLLARQAYDLIESHIKRLDEDLGQFAEDLKQEGKIPPDEPHILPPMPVGGRDERRRSSFSTPQAARKFVREKEWDRDRERGMDFDLMPPPGSSNKKAVASMDVDQMIDPNEPTYCICHQVSYGDMIACDNENCEGGEWFHYSCVGLTPETRFKGKWFCPTCRNLQ

SEQ ID NO: 10039 - protein, 228 aa, Triticum aestivum
  misc_feature (1)..(228): Ceres Seq. ID no. 13503552
MHELDERAHGILGQTKGQIKYLLGVPSHGFDRPNVVHDENASEKMTRDIENSQDNALSLCTEKVLLARQAYDLIESHIKRLDEDLGQFAEDLKQEGKIPPDEPHILPPMPVGGRDERRRSSFSTPQAARKFVREKEWDRDRERGMDFDLMPPPGSSNKKAVASMDVDQMIDPNEPTYCICHQVSYGDMIACDNENCEGGEWFHYSCVGLTPETRFKGKWFCPTCRNLQ

SEQ ID NO: 10040 - DNA, 1345 bp, Triticum aestivum
  misc_feature (1)..(1345): Ceres Seq. ID no. 13503553
ttttccggtaccaaacgtcaccttcttcccagcttcctcctccgtccacccacgccgccgacgcgcctccgccggtccggtctacatataccagcgccctcgccatcccccatttccttcctccccaacccgccattttccgtcctcaccgagacggttcccatccccgcgcatctgcctctgccgtctccgcccggtgccatcttcttcgctcactccgcgcaggccaactaatctttctgatcggccggccggtcgaaatgggccacgagggagccaagtacggcgacgacggccgccccacctgcgactgcctcctcttcgaccttgatgacacgctctacccggtgggatcaggcatcggcctcgacgtcatgaagaacatccaagaatacatggtcgagaagctcggcatcgacaagagcatcagccacgagctctgcatcctgctgtacaagcagtacggaaccaccatggccggtctgcgggctgtcgggtaccagttcgactacgatgatttccacggctttgttcatggaaggttggcctacgaaaagctcaagcctgaccctgtgctcaggaacatccttctgagcctaccaatccgcaaactcgtgttcacgaatggtgacaggctccatgcttcgagggccatgaagaggcttgggatcgaggactgctttgagggagttctgtgctttgagacattgaacccgccatcgcccactcctgcgccagccagcaaagttgagatctttgatataatgaagcacctggctcatccggagcctggggttgagctgccaaggtcaccaatcctgtgcaaaccgaatatagatgcaatgctgcatgccctcaagcttgccgacatcaatcctcagactactatattttttgatgacagcgtcaggaacatccaggccgggaagcaaatcggaatgcacactgtcctggttggaacttctgaaaagattaaaggtgctgaccatgccttggaaagcctccacaacatgaaggaagcgtttccagaactgtgggaggaggctgtgaaggatgaggacgtcaggaaatcgagcaaagttggaatcgagacatcggtgatcgcttaaaatccctcatgaactgactcatggttttgggcaaagggcacatgagacgaccagatccagtatctgtttgtctgacagtagacatgctgattagaccaagagaaaattgttgtaatcgttaagggaactgatgccactttcgttatgtttgtcccttgtaataagaaataaaatgttctgaacctcgctgtaactccgttcacggggcaatagacctgctatgctagtactatttg

SEQ ID NO: 10041 - protein, 368 aa, Triticum aestivum
  misc_feature (1)..(368): Ceres Seq. ID no. 13503554
FRYQTSPSSQLPPPSTHAADAPPPVRSTYTSALAIPHFLPPQPAIFRPHRDGSHPRASASAVSARCHLLRSLRAGQLIFLIGRPVEMGHEGAKYGDDGRPTCDCLLFDLDDTLYPVGSGIGLDVMKNIQEYMVEKLGIDKSISHELCILLYKQYGTTMAGLRAVGYQFDYDDFHGFVHGRLAYEKLKPDPVLRNILLSLPIRKLVFTNGDRLHASRAMKRLGIEDCFEGVLCFETLNPPSPTPAPASKVEIFDIMKHLAHPEPGVELPRSPILCKPNIDAMLHALKLADINPQTTIFFDDSVRNIQAGKQIGMHTVLVGTSEKIKGADHALESLHNMKEAFPELWEEAVKDEDVRKSSKVGIETSVIA

SEQ ID NO: 10042 - protein, 282 aa, Triticum aestivum
  misc_feature (1)..(282): Ceres Seq. ID no. 13503555
MGHEGAKYGDDGRPTCDCLLFDLDDTLYPVGSGIGLDVMKNIQEYMVEKLGIDKSISHELCILLYKQYGTTMAGLRAVGYQFDYDDFHGFVHGRLAYEKLKPDPVLRNILLSLPIRKLVFTNGDRLHASRAMKRLGIEDCFEGVLCFETLNPPSPTPAPASKVEIFDIMKHLAHPEPGVELPRSPILCKPNIDAMLHALKLADINPQTTIFFDDSVRNIQAGKQIGMHTVLVGTSEKIKGADHALESLHNMKEAFPELWEEAVKDEDVRKSSKVGIETSVIA

SEQ ID NO: 10043 - protein, 244 aa, Triticum aestivum
  misc_feature (1)..(244): Ceres Seq. ID no. 13503556
MKNIQEYMVEKLGIDKSISHELCILLYKQYGTTMAGLRAVGYQFDYDDFHGFVHGRLAYEKLKPDPVLRNILLSLPIRKLVFTNGDRLHASRAMKRLGIEDCFEGVLCFETLNPPSPTPAPASKVEIFDIMKHLAHPEPGVELPRSPILCKPNIDAMLHALKLADINPQTTIFFDDSVRNIQAGKQIGMHTVLVGTSEKIKGADHALESLHNMKEAFPELWEEAVKDEDVRKSSKVGIETSVIA

SEQ ID NO: 10044 - DNA, 996 bp, Triticum aestivum
  misc_feature (1)..(996): Ceres Seq. ID no. 13503610
gcactccattcacggttcgccaaggtcaacaagagtagtgatagatagaagaggccaccatcaccatggatcggcagctgctgaggacggtgaagcaggcgaccaagaaccacgccggcctcatgtaccaccgtctcgtgggccacatcccccacctcctcgtggtcacgctgctcgtcgtcgtggcgccgcagctctcgacgctgacgccggagaaggtgcgcgccctttggaacacagcagtgaacgcgccggcgctggccatggcgtgctgggcggcggcgctggcggcgtacacgtacgcgtcgtcccgccctcagccagtgtatctagtggacctcgccgggtacaagccgccggtggagctggaggcgtcgcgcgccaagaccatcgtgcacttctcgcggtgcgggcggttcagcgagcagagcatggcgttccagaagcggatgctggagcggtcggggctgggcgaggcgacgcacttccccatgtcgctgatccgcctccccgtggacatgtgcgaccggacggccatggaggagtcccacgccgtgatcttcggcgtcgtcgacgaggtcctccgcaagaccggcgtggacgccggcgacgtgggcgtgctcatcttcaactccagcctgctcagcccgacgccgtccttcacgtcgctcatcgtgaaccgctacaagttccgcgacgacatcgtcacgcacaacctcagcggcatggggtgcagcgccggcatcatcgccatcgacctcgccaagcgcctgctccaggtacaccggaacacgtacgcgctggtggtgagcacggagaacatcaccctcaacgcctacatgggcaacannccgtccgatgctggtgaccaacacgctcttccgtgtcggcggcgcggcgatcctcctcaccaaccgggccggcgaccgggcgcggtccaagtaccagctgatccacaccgtgcgcacccaccgcggggcgcacgaccagagctac

SEQ ID NO: 10045 - protein, 310 aa, Triticum aestivum
  misc_feature (1)..(310): Ceres Seq. ID no. 13503611
  misc_feature (262)..(262): Xaa is any aa, unknown or other
MDRQLLRTVKQATKNHAGLMYHRLVGHIPHLLVVTLLVVVAPQLSTLTPEKVRALWNTAVNAPALAMACWAAALAAYTYASSRPQPVYLVDLAGYKPPVELEASRAKTIVHFSRCGRFSEQSMAFQKRMLERSGLGEATHFPMSLIRLPVDMCDRTAMEESHAVIFGVVDEVLRKTGVDAGDVGVLIFNSSLLSPTPSFTSLIVNRYKFRDDIVTHNLSGMGCSAGIIAIDLAKRLLQVHRNTYALVVSTENITLNAYMGNXPSDAGDQHALPCRRRGDPPHQPGRRPGAVQVPADPHRAHPPRGARPEL

SEQ ID NO: 10046 - protein, 291 aa, Triticum aestivum
  misc_feature (1)..(291): Ceres Seq. ID no. 13503612
  misc_feature (243)..(243): Xaa is any aa, unknown or other
MYHRLVGHIPHLLVVTLLVVVAPQLSTLTPEKVRALWNTAVNAPALAMACWAAALAAYTYASSRPQPVYLVDLAGYKPPVELEASRAKTIVHFSRCGRFSEQSMAFQKRMLERSGLGEATHFPMSLIRLPVDMCDRTAMEESHAVIFGVVDEVLRKTGVDAGDVGVLIFNSSLLSPTPSFTSLIVNRYKFRDDIVTHNLSGMGCSAGIIAIDLAKRLLQVHRNTYALVVSTENITLNAYMGNXPSDAGDQHALPCRRRGDPPHQPGRRPGAVQVPADPHRAHPPRGARPEL

SEQ ID NO: 10047 - protein, 288 aa, Triticum aestivum
  misc_feature (1)..(288): Ceres Seq. ID no. 13503613
  misc_feature (283)..(283): Xaa is any aa, unknown or other
  misc_feature (284)..(284): Xaa is any aa, unknown or other
HSIHGSPRSTRVVIDRRGHHHHGSAAAEDGEAGDQEPRRPHVPPSRGPHPPPPRGHAARRRGAAALDADAGEGARPLEHSSERAGAGHGVLGGGAGGVHVRVVPPSASVSSGPRRVQAAGGAGGVARQDHRALLAVRAVQRAEHGVPEADAGAVGAGRGDALPHVADPPPRGHVRPDGHGGVPRRDLRRRRRGPPQDRRGRRRRGRAHLQLQPAQPDAVLHVAHREPLQVPRRHRHAQPQRHGVQRRHHRHRPRQAPAPGTPEHVRAGGEHGEHHPQRLHGQXXVRCW

SEQ ID NO: 10048 - DNA, 1633 bp, Triticum aestivum
  misc_feature (1)..(1633): Ceres Seq. ID no. 13542155
tacctagaacatcctaatcgaaaacccgacttcactccccctcccccctcccccatcctctcctcgtagtctccgccggacgccgacgcccgccccctacctgcggcgaaaccccaggcgcggcggcggcggcgggacctgctcagatccgatgggggcgacggagccgcagtgggtgctgatggccacggggcggtcgccgaccaacatcgcggtgatcaagtactgggggaagcgggacgagacgctcatcctccccgtcaacgacagcatcagcgtcaccctcgaccccgaccacctctccgccaccaccaccgtcgctgccagcccctcattcccatccgaccgcatgtggctcaacggcaaggagatcgcgttgtcgggcgggagattccagagctgcctgagggagatacggaagcgggctcgtgatgtcgaggacgagaaaaaggggatcaagatcaagaaagaggactgggaaaagttgcatgtccacatagcatcctacaacaacttcccaaccgctgccggtttggcctcttcggccgctggccttgcttgtcttgttttcaccctgggaaagctaatgaacgtgaatgaagattacggagaactttcttcaatagcaaggcaggggtctggaagtgcatgccgcagtatatatggtggatttgtgaaatggtgtatgggaaaaaatgatgacggaagtgacagcatggcagtacagcttgctgacgagtcacattgggatgatcttgttataatcatagcagtggtcagttcaaagcagaaggaaaccagtagcaccagtgggatgcgagacactgtcgaaacaagccccctcttgcagtacagggcccagactgtagtgccaagtcggatattgaaaatggaagatgctatcaagaatcgtgattttgaatccttcgccaggttaacttgtgccgatagcaaccagtttcatgctgtatgtttggacacgagtcctcccatcttctacatgaacgacacatcacacaggataattagccttgtggaaaagtggaaccactcggaaggaacaccacaggttgcctacacatttgatgctgggcctaacgctgtcctaatagcacggaaccgcaaaactgccacccttctccttcagaggctcttatacactttccccccacagaagaatgacttggacagctatatgctcggcgataaatcgatcctaagcgacgctggtttgcaatccatagccgatgtcgaggcccttccagcgcctccagagatgaaagctccaaaccaaaaattcaaaggcgatgttagctacttcatctgtagcaggcctggggccggcccaaaagttctcaccgatgagagccacgccttgattgattcagccacggggcttgcgaaaggagtgtaattttgaacgacgataggtttccataacagtctttggttgagattaatgtagaattgtcacgttgttgtacactcagtactttcgtcattttgatcttgtactgtaccttcgatcttgtactatttccatcattttgtccctgactgttgtagcctcttaaagaacatgtatatttcttcaataaaagttcgtggaaygaattatcattttatcgatccc

SEQ ID NO: 10049 - protein, 420 aa, Triticum aestivum
  misc_feature (1)..(420): Ceres Seq. ID no. 15220498
MGATEPQWVLMATGRSPTNIAVIKYWGKRDETLILPVNDSISVTLDPDHLSATTTVAASPSFPSDRMWLNGKEIALSGGRFQSCLREIRKRARDVEDEKKGIKIKKEDWEKLHVHIASYNNFPTAAGLASSAAGLACLVFTLGKLMNVNEDYGELSSIARQGSGSACRSIYGGFVKWCMGKNDDGSDSMAVQLADESHWDDLVIIIAVVSSKQKETSSTSGMRDTVETSPLLQYRAQTVVPSRILKMEDAIKNRDFESFARLTCADSNQFHAVCLDTSPPIFYMNDTSHRIISLVEKWNHSEGTPQVAYTFDAGPNAVLIARNRKTATLLLQRLLYTFPPQKNDLDSYMLGDKSILSDAGLQSIADVEALPAPPEMKAPNQKFKGDVSYFICSRPGAGPKVLTDESHALIDSATGLAKGV

SEQ ID NO: 10050 - protein, 410 aa, Triticum aestivum
  misc_feature (1)..(410): Ceres Seq. ID no. 15220499
MATGRSPTNIAVIKYWGKRDETLILPVNDSISVTLDPDHLSATTTVAASPSFPSDRMWLNGKEIALSGGRFQSCLREIRKRARDVEDEKKGIKIKKEDWEKLHVHIASYNNFPTAAGLASSAAGLACLVFTLGKLMNVNEDYGELSSIARQGSGSACRSIYGGFVKWCMGKNDDGSDSMAVQLADESHWDDLVIIIAVVSSKQKETSSTSGMRDTVETSPLLQYRAQTVVPSRILKMEDAIKNRDFESFARLTCADSNQFHAVCLDTSPPIFYMNDTSHRIISLVEKWNHSEGTPQVAYTFDAGPNAVLIARNRKTATLLLQRLLYTFPPQKNDLDSYMLGDKSILSDAGLQSIADVEALPAPPEMKAPNQKFKGDVSYFICSRPGAGPKVLTDESHALIDSATGLAKGV

SEQ ID NO: 10051 - protein, 354 aa, Triticum aestivum
  misc_feature (1)..(354): Ceres Seq. ID no. 15220500
MWLNGKEIALSGGRFQSCLREIRKRARDVEDEKKGIKIKKEDWEKLHVHIASYNNFPTAAGLASSAAGLACLVFTLGKLMNVNEDYGELSSIARQGSGSACRSIYGGFVKWCMGKNDDGSDSMAVQLADESHWDDLVIIIAVVSSKQKETSSTSGMRDTVETSPLLQYRAQTVVPSRILKMEDAIKNRDFESFARLTCADSNQFHAVCLDTSPPIFYMNDTSHRIISLVEKWNHSEGTPQVAYTFDAGPNAVLIARNRKTATLLLQRLLYTFPPQKNDLDSYMLGDKSILSDAGLQSIADVEALPAPPEMKAPNQKFKGDVSYFICSRPGAGPKVLTDESHALIDSATGLAKGV

SEQ ID NO: 10052 - DNA, 1290 bp, Triticum aestivum
  misc_feature (1)..(1290): Ceres Seq. ID no. 13550707
cttatacgcatcctgggagaccgatttccatggcaagttaagtcagctatcctatcaaccctgactattatcatcgcaaaaggtggtcttgcacttaagcccttccttccacaacttcagacaacatttgttaaatgtctacaagatagcaacagatctgtccgcacgagggccgcatcagctcttggaaagcttagcgcattaagcacaagaattgatcctttagttagcgatcttttgtccatgttgcagtcaggagatgacgctgttaaggaaagtgtgctgtctgcacttaaaggtgttgttaggcatgctggcaaaagtgttagctctgcaatcagatcacgtgggtgtactcttctcaaagatttgctgcaggctgatgctgatgatgtccgcagttctgctgcaaaagcaattggtacattatctcagtacatggatgagaccgagaccaccgatctggtgcagaccctgttgagcatgggcacattaccagactggtgtaccagacatggtgctttgttaacattctcttccatatcaaggcattgtccaacaaaactgtgccattcaacatcatttccatctattgttgatcttctgaaagattcgctaaaagatgacaagttccctgttcgtgaagcctctacgaaaactctggggaggctactttgttaccagttacaatttgggggcagcacgttgcaacttgttcaattgctcatcttggccttgcgtgatagttcaaccgaagttaggagaagatcgttgtcctgtatcaaagctgctgcgaagataaatcattcagctcttgccacacatatctcgatattgggcccggcaattggtgatactttgaaggatagtagttcgccagtacgcatagctgcagagcgctgtgccgttcatgttttccagttgaccaaaggggcagattacgttactactgcgcaaaagcatctcaccaacatgacaggcttagaagtaagaagacttgcaaagcttcctgtggagagtgacgacagtgaaagcagtgacgatgacaggagagcatagacactgcccagccacagcggcctcgaaggacgttttctgtgcctgtccattcatacatcttataggtaaaccggtaatggaacagcgtggtcaatttttgcctgtgacccttgatgtaaacaccgtttttgacaagttacagtactagaggaaggggtcggtgttgtttctatttcttactacaaatgaacaatgttcatatccgtatattattattgaatgaggctaatc

SEQ ID NO: 10053 - protein, 352 aa, Triticum aestivum
  misc_feature (1)..(352): Ceres Seq. ID no. 13550708
LIRILGDRFPWQVKSAILSTLTIIIAKGGLALKPFLPQLQTTFVKCLQDSNRSVRTRAASALGKLSALSTRIDPLVSDLLSMLQSGDDAVKESVLSALKGVVRHAGKSVSSAIRSRGCTLLKDLLQADADDVRSSAAKAIGTLSQYMDETETTDLVQTLLSMGTLPDWCTRHGALLTFSSISRHCPTKLCHSTSFPSIVDLLKDSLKDDKFPVREASTKTLGRLLCYQLQFGGSTLQLVQLLILALRDSSTEVRRRSLSCIKAAAKINHSALATHISILGPAIGDTLKDSSSPVRIAAERCAVHVFQLTKGADYVTTAQKHLTNMTGLEVRRLAKLPVESDDSESSDDDRRA

SEQ ID NO: 10054 - protein, 271 aa, Triticum aestivum
  misc_feature (1)..(271): Ceres Seq. ID no. 13550709
MLQSGDDAVKESVLSALKGVVRHAGKSVSSAIRSRGCTLLKDLLQADADDVRSSAAKAIGTLSQYMDETETTDLVQTLLSMGTLPDWCTRHGALLTFSSISRHCPTKLCHSTSFPSIVDLLKDSLKDDKFPVREASTKTLGRLLCYQLQFGGSTLQLVQLLILALRDSSTEVRRRSLSCIKAAAKINHSALATHISILGPAIGDTLKDSSSPVRIAAERCAVHVFQLTKGADYVTTAQKHLTNMTGLEVRRLAKLPVESDDSESSDDDRRA

SEQ ID NO: 10055 - protein, 206 aa, Triticum aestivum
  misc_feature (1)..(206): Ceres Seq. ID no. 13550710
MDETETTDLVQTLLSMGTLPDWCTRHGALLTFSSISRHCPTKLCHSTSFPSIVDLLKDSLKDDKFPVREASTKTLGRLLCYQLQFGGSTLQLVQLLILALRDSSTEVRRRSLSCIKAAAKINHSALATHISILGPAIGDTLKDSSSPVRIAAERCAVHVFQLTKGADYVTTAQKHLTNMTGLEVRRLAKLPVESDDSESSDDDRRA

SEQ ID NO: 10056 - DNA, 1157 bp, Triticum aestivum
  misc_feature (1)..(1157): Ceres Seq. ID no. 13579986
aggattggagaaaagcagagtgggccgacgtcgtcgccctccgcaggtcaagctcggcagctccagctccacctcgaaaccgaagccgccgccgccgccgccggcagcggaggaggaggaggaggaggagggagatggcgtcgggcctggtgacggaggacgtgacggtggggcggctggtccggatccggcgcacggtgatgcacatgctgcgcgaccggggctacctggtggtggagcacgagctgtccatgacccgccgcgacttccagcgcaagtacggcgagtccttccaccgcgaggacatgctcatcaacaagtgcaagaagaacgaccccaacgaccagatatacgtgttcttcccgaacgacgagaaggtggggatgaagcacatcaagaagtacgtcgaaatgatgaacgccgagaaagtctccagggctatattggtcgtgcagcagaacctcaccccatttgcaaaatcgtttctccaagaactggagccaaagatccacttggaggttttccaggacgcggaaatgcttataaatatcaaggaacatgttcttgttccggagcatcaagtgcttgctaatgaggaaaagaagacgttattggcgcggtacactttaaaggaaactcagctaccaagaatacagattacagatcccattgcgaggtactacggcctcaaacgagggcaggtggtgaagatcatcaggcccagcgagacagccggcagatacgtcacatatcgctatgttgtatgacagtacacaagtgaggtgaaggtcaaggaacctaaaacatggtgatttttgcagttacacacgacacacatacccattcgcttggagaaaaacggcatcgcttcaagcaaccattcttaaggatcgcatgcctgttacgtaaaaggattcttaataagctgagtgtatggagcataagcaaaatcctcatgttgtaccattgtttcgtgaactttatagaacatacagaaccgaaactagtgtgctgagagcaatgaaaggctctgcagttctggctgctacatcatttgaacgaaccattcttgaaactccatgattctggtcctgacgttgtgtgagtgtgtgtgtgtggtggtgatatgcgtgatgaacttgtttgcaatatacccc

SEQ ID NO: 10057 - protein, 254 aa, Triticum aestivum
  misc_feature (1)..(254): Ceres Seq. ID no. 13579987
DWRKAEWADVVALRRSSSAAPAPPRNRSRRRRRRQRRRRRRRREMASGLVTEDVTVGRLVRIRRTVMHMLRDRGYLVVEHELSMTRRDFQRKYGESFHREDMLINKCKKNDPNDQIYVFFPNDEKVGMKHIKKYVEMMNAEKVSRAILVVQQNLTPFAKSFLQELEPKIHLEVFQDAEMLINIKEHVLVPEHQVLANEEKKTLLARYTLKETQLPRIQITDPIARYYGLKRGQVVKIIRPSETAGRYVTYRYVV

SEQ ID NO: 10058 - protein, 210 aa, Triticum aestivum
  misc_feature (1)..(210): Ceres Seq. ID no. 13579988
MASGLVTEDVTVGRLVRIRRTVMHMLRDRGYLVVEHELSMTRRDFQRKYGESFHREDMLINKCKKNDPNDQIYVFFPNDEKVGMKHIKKYVEMMNAEKVSRAILVVQQNLTPFAKSFLQELEPKIHLEVFQDAEMLINIKEHVLVPEHQVLANEEKKTLLARYTLKETQLPRIQITDPIARYYGLKRGQVVKIIRPSETAGRYVTYRYVV

SEQ ID NO: 10059 - protein, 196 aa, Triticum aestivum
  misc_feature (1)..(196): Ceres Seq. ID no. 13579989
GLEKSRVGRRRRPPQVKLGSSSSTSKPKPPPPPPAAEEEEEEEGDGVGPGDGGRDGGAAGPDPAHGDAHAARPGLPGGGARAVHDPPRLPAQVRRVLPPRGHAHQQVQEERPQRPDIRVLPERREGGDEAHQEVRRNDERRESLQGYIGRAAEPHPICKIVSPRTGAKDPLGGFPGRGNAYKYQGTCSCSGASSAC

SEQ ID NO: 10060 - DNA, 2016 bp, Triticum aestivum
  misc_feature (1)..(2016): Ceres Seq. ID no. 13582783
ggtaatccatttgaaatgactagaaagacaaatatttcggaacggaggaagtacatgacactcttatactcgcaagagttcaattctattctactcgagaagacactcactccctgtgagaaattctaaaaggaaatgcttttacactgcatgaaagctcgaaaactggctacatcagagccttgaaattgcaggccaggcatcagatcacgaaaggcattacactgttggtggcggtcctccctccaaccaactccaaaggtttgcaatacatatagcatgtaagcagcagcttcctatatatttgatgagttctctttccgcagcttggctggcctctccttgtgcgattctgcatatctcctcttcttgttggctcttcttcttttgcgctcagcttgtgtaagctccacgtcttctttaatatcccctttcccttcaaaaacttcttcgggagcgagcattgcggcatctgaaacagctacaggtgcaacctcttccattgctagagcaggtatattaacttgtatggacatatcctcaatgaccggctttggggcaaagtggaaatgagagagcgcatccaacttcaagcatatcctcttaaataaatcatttgcctcattcttcagttcatctgaaatagcaagtgtggcaggtgcaatgccagttttttccttaaactcatcctcatactgttcagcaagaccctttttgctcttgttttcatccatctccttttgctgctttggaactttatacggcaaggttgaaggcttttcaacatcatcaaaatgaccctccgcaattcttttctttatcatctcttcgagagaagctgtgacttcctccgtgattactggggcaggtcttacattatgctcaaaatcaagatccacttccagggcactatttttgggcctcctggaagcatcaacctctccctgcatgatccatttactgggttcaagactagctttctccattaggtctatttggttacgcatcttcaagagccccttttcatgagttgaaagaccttgttcatcctctaatgctggaccatcatttacatcatccttctcaatgtcatccacttccatttcatgcaattcatccttgaagtggactttctttgtgaaaccatttctcttcttgacttgttgcttactgctttcctcaaaaaaatcctcataccttatatctccgccagatttccccacaccctcttcatcatcagactcaaaatcttccaaatccaaatcgtcatcttcatcatcacccccatcatcttcatccacatcctcctcatcactatcgtcctccatcaagttcacacttgccttcttcttctctcctcccttggaacccccaccgtactcctgctcctccccctcctccataaacttttccaggtccttcatcttcaggaacctgtcctccaccccgttccctttcttcgcccctagctcctccgtttcttcatcctccccctcctccgattccaactcgtcatccgtgtcctccaggccaccctcatcctcctcctccgattcgtcaccctctccatcctcctcctcgtctgacgggccctccacggcttcagcgggcttggacggcggaggagtagccaacggctgcgcaggcggttggtgctcgaggcggcggagctggcggtggaggtgggggaggagggggcgggagagcagctcgctctgggaccaaatctgctcggcgtcgaagttggggccggcgaggaggttggggaggggcggcggctgcacgggggagacaacggcgagcgacgagtggaagtgcttcagagccgcccgggcggcggcggcgaggtccgcggacggggagaggtagacggacgggtcggcgcgccgcagctgctgcagcgccacctcgcccttctccgcggcaagcggctcgtccaaatccatggccattgccgtggtggccgggagcgaattggttgactggagtatgtggaggcgacgctgggaaagagag

SEQ ID NO: 10061 - protein, 260 aa, Triticum aestivum
  misc_feature (1)..(260): Ceres Seq. ID no. 13582784
MSSTSISCNSSLKWTFFVKPFLFLTCCLLLSSKKSSYLISPPDFPTPSSSSDSKSSKSKSSSSSSPPSSSSTSSSSLSSSIKFTLAFFFSPPLEPPPYSCSSPSSINFSRSFIFRNLSSTPFPFFAPSSSVSSSSPSSDSNSSSVSSRPPSSSSSDSSPSPSSSSSDGPSTASAGLDGGGVANGCAGGWCSRRRSWRWRWGRRGRESSSLWDQICSASKLGPARRLGRGGGCTGETTASDEWKCFRAARAAAARSADGER

SEQ ID NO: 10062 - DNA, 504 bp, Triticum aestivum
  misc_feature (1)..(504): Ceres Seq. ID no. 13583026
acccacagcacacaactccaccggtagtaacaaagccagtacgtagcgcaagcagagagtttaggtcgctcccagcccggccgctcaccatgtggaccaagaaggtggcgacgcaggtggctttggtcctgcttctccttctcatcgcacaggaggcggcggtgccgggggcggaggcgaaggtctgccggcagcgcagcgcggggttcaaagggccgtgcgtgtccgataagaactgcgcgcaggtctgcctgcaggaaggctggggcggcggcaactgcgacggacccttccgccggtgcaagtgcatcaggcagtgctgatcataatatgtgctacggctagctggccctcgccgtacgtcagctagctagcccatggaatcatacgtctgtgtacctacttgaatgtgtgtgtgtgtgccgccttctacgtacgtatgtcgtatgtatatccgtatcaccactagccagctgctgcatctcgatcgatgcatgcgagagc

SEQ ID NO: 10063 - protein, 106 aa, Triticum aestivum
  misc_feature (1)..(106): Ceres Seq. ID no. 13583027
PQHTTPPVVTKPVRSASREFRSLPARPLTMWTKKVATQVALVLLLLLIAQEAAVPGAEAKVCRQRSAGFKGPCVSDKNCAQVCLQEGWGGGNCDGPFRRCKCIRQC

SEQ ID NO: 10064 - protein, 77 aa, Triticum aestivum
  misc_feature (1)..(77): Ceres Seq. ID no. 13583028
MWTKKVATQVALVLLLLLIAQEAAVPGAEAKVCRQRSAGFKGPCVSDKNCAQVCLQEGWGGGNCDGPFRRCKCIRQC

SEQ ID NO: 10065 - DNA, 738 bp, Triticum aestivum
  misc_feature (1)..(738): Ceres Seq. ID no. 13583129
ccattacctagaacatcctaatcgaaaacaagttagagaatccttcgtccactcgcagtcgcacgcacgcacgcacgcaccaacttcccacgccacagcacacaggcggcggcggcggcggcggtgatgggaggcgagggcgccagttccagcggcggggggttccgcgcccggatagaccactacctgtacagcggcgagaagaagcacgtagtcgcaggcatcgccatcttcgccgccattttcggggtgccctggtacttcatgacccgaggggcaaagcatgactctcatcaagattacatggagcgagctaacaaggcaaggtcggataggctttcttctggacagccatcatcactgaaagaataaagcagctgtctcgaccggccccagatttgcccaacccctgcatatgcagtttgcattatgaatctgaaggcttaatcttgtgtcaaataaacagaccatctctgttcctgaatctcagagtagtgctattgtaatacagtaatagaaattttgttcgccggaatctcatagtagtgtctttgctattctaggaggagatgatggacaaatcatggtatttttgtcccacgaattgcagtccggagccaaaaaaaaaaaaaaaaaaaaaaaaaaaaaaaaaaaaaaaaaaaaaaaaaaaaaaaaaaaaaaattaaaaaaaaaaaaaaaaaagtttatcaataccgccaacctcaagggggggcccgg

SEQ ID NO: 10066 - protein, 81 aa, Triticum aestivum
  misc_feature (1)..(81): Ceres Seq. ID no. 13583130
MGGEGASSSGGGFRARIDHYLYSGEKKHVVAGIAIFAAIFGVPWYFMTRGAKHDSHQDYMERANKARSDRLSSGQPSSLKE

SEQ ID NO: 10067 - protein, 51 aa, Triticum aestivum
  misc_feature (1)..(51): Ceres Seq. ID no. 13583131
MVFLSHELQSGAKKKKKKKKKKKKKKKKKKKKKLKKKKKKFINTANLKGGP

SEQ ID NO: 10068 - protein, 41 aa, Triticum aestivum
  misc_feature (1)..(41): Ceres Seq. ID no. 13583132
HYLEHPNRKQVRESFVHSQSHARTHAPTSHATAHRRRRRRR

SEQ ID NO: 10069 - DNA, 656 bp, Triticum aestivum
  misc_feature (1)..(656): Ceres Seq. ID no. 13583388
cctaatcgaaaaaatcaaggaaaaaacttttaaaaaaagagcacaaaatcgttcctcattctccatctactccaccaaacctcaatccccatctctctccccctaggctctccttcgccgtcggtcgggctccctctccgacacgccgccgtcgatacatccacccgaggcatggcgacggcgttcaaggcgttcgtgaacagccccgtcggccccaagaccacccacttctggggccccgtcgctaactggggcttcgtcctcgcgggtttggttgacttgaacaagcctcctgagatgatatctggcaatatgacagccgccatgtgtgtgtattctgggctctttatgaggttcgcgtggatggtacagccccggaactacttgctcctggcatgccatgcctccaacgaaaccgttcagctctatcatttatctcgctgtgctagggctcaggggtatctggattccaagaaagagccggaggcccaacagtaaagggtgtggtgtttctgaagtcggaggagccttgactccgcagccagcctttcaataagtaaaatttgtttctgaagctttgcaatgcccttcatgagaaaaaacctatacagtggaaatttctatttctatgatactcatgcctgcaatgtggcctt

SEQ ID NO: 10070 - protein, 108 aa, Triticum aestivum
  misc_feature (1)..(108): Ceres Seq. ID no. 13583389
MATAFKAFVNSPVGPKTTHFWGPVANWGFVLAGLVDLNKPPEMISGNMTAAMCVYSGLFMRFAWMVQPRNYLLLACHASNETVQLYHLSRCARAQGYLDSKKEPEAQQ

SEQ ID NO: 10071 - protein, 66 aa, Triticum aestivum
  misc_feature (1)..(66): Ceres Seq. ID no. 13583390
MISGNMTAAMCVYSGLFMRFAWMVQPRNYLLLACHASNETVQLYHLSRCARAQGYLDSKKEPEAQQ

SEQ ID NO: 10072 - protein, 61 aa, Triticum aestivum
  misc_feature (1)..(61): Ceres Seq. ID no. 13583391
MTAAMCVYSGLFMRFAWMVQPRNYLLLACHASNETVQLYHLSRCARAQGYLDSKKEPEAQQ

SEQ ID NO: 10073 - DNA, 530 bp, Triticum aestivum
  misc_feature (1)..(530): Ceres Seq. ID no. 13583396
aaaaaatcaacctcccagcacgaaccaacccaatccctgctacatagtcagtcagtctttgcaaccatgaggccacaggtgctgctcgccgcgctggccgtcgtcctcctcctcgcagcagctctgcccttcgcccacagccaaggtgcgaccccaagcgcgtcgctgtgctgcaacaactgcggcacctgcactaggtccatcccgcccaggtgtacgtgcatggatgcgtcgcccagcggctgcaacccgtcctgcaagacctgcgacaagaccaccgtcgccggccgtgacagcttccagtgcaaggaccgcgtcgcaaacttctgccagcgcagctgcactaagcccgcgtgactcgacctgttgtcgccagaataatgccgattagcttgttcttttcctttgtttttgcagtatttaagagttccctctgcatcttgctctggtagatgcagagaagaaatgagagttggatgcatgctcgttgttccttcttgtgtctgaaataaagagcatattctttgccc

SEQ ID NO: 10074 - protein, 118 aa, Triticum aestivum
  misc_feature (1)..(118): Ceres Seq. ID no. 13583397
KKSTSQHEPTQSLLHSQSVFATMRPQVLLAALAVVLLLAAALPFAHSQGATPSASLCCNNCGTCTRSIPPRCTCMDASPSGCNPSCKTCDKTTVAGRDSFQCKDRVANFCQRSCTKPA

SEQ ID NO: 10075 - protein, 96 aa, Triticum aestivum
  misc_feature (1)..(96): Ceres Seq. ID no. 13583398
MRPQVLLAALAVVLLLAAALPFAHSQGATPSASLCCNNCGTCTRSIPPRCTCMDASPSGCNPSCKTCDKTTVAGRDSFQCKDRVANFCQRSCTKPA

SEQ ID NO: 10076 - DNA, 1093 bp, Triticum aestivum
  misc_feature (1)..(1093): Ceres Seq. ID no. 13583408
aaggctcttcccaaaccctccccgaccgccgccccccgttcgcctccgccgccgcctagccaccacgcgccaggagaaccccgcgccgccggccatggcggaggaggagggcacgcagcagctgccgttcgtgcgggagacggtcctcaagaagaggaaggacaacgaggagtgggccaccaagaaccgggagcgcaaggcggccaagaggcagcgccgctgccacgacgccaagggcgccatcaagcgccccgaggacttcgtcaaggagttccgcaacaaggagctcgacttcctgcggatgcgcacgcgcctcaaggtccggaacctgcgccccgccgaggccatcgacgccaagctgctcttcgccgtccgcatcccaggcaccgccgacttgcacccgcaaatcaggaagatcttggccaggctgcggctcacgcaggtcctcaccggcgtgttcctcaaggccaccgaggcaaacctcaagaggcttgcagctgtcggaccgttcgtcacctatgggttccccaatttgaagaatgtgaaggagcttatttacaagaagggtcgcggttatttcgacaaggagcctttcccccttaccagcaatgatctaatcgagaaggcacttggagaacacggtgtcatatgcttggaagacgtggtgcacgaaatctccacggtcgggccacacttcagagaaacggcgagctttctcatgcccttcaagctcaagtgtccggagaggaggctgcggatgaagaagaagcccttcaaggatggtggcgactcgggcaaccgtggggacaagatcaacgagctactcgagaagctgaactgaggcagtctccaacctgcgtccgcaaacaagcgatggatccgttattaccttgtcggttttgtaatagcatagctgaatgtacctttgttttggaaaccctgcctgagtgtttgggatcaaatcacgaaatactgttcttcgcccctcgctctgtccttcatgatcgatctgccgtgctttgcttgcgctgacagacttagtgaggttggatgatattgcaacaaaacatcaggttctcaaaaaaattttttt

SEQ ID NO: 10077 - protein, 279 aa, Triticum aestivum
  misc_feature (1)..(279): Ceres Seq. ID no. 13583409
RLFPNPPRPPPPVRLRRRLATTRQENPAPPAMAEEEGTQQLPFVRETVLKKRKDNEEWATKNRERKAAKRQRRCHDAKGAIKRPEDFVKEFRNKELDFLRMRTRLKVRNLRPAEAIDAKLLFAVRIPGTADLHPQIRKILARLRLTQVLTGVFLKATEANLKRLAAVGPFVTYGFPNLKNVKELIYKKGRGYFDKEPFPLTSNDLIEKALGEHGVICLEDVVHEISTVGPHFRETASFLMPFKLKCPERRLRMKKKPFKDGGDSGNRGDKINELLEKLN

SEQ ID NO: 10078 - protein, 248 aa, Triticum aestivum
  misc_feature (1)..(248): Ceres Seq. ID no. 13583410
MAEEEGTQQLPFVRETVLKKRKDNEEWATKNRERKAAKRQRRCHDAKGAIKRPEDFVKEFRNKELDFLRMRTRLKVRNLRPAEAIDAKLLFAVRIPGTADLHPQIRKILARLRLTQVLTGVFLKATEANLKRLAAVGPFVTYGFPNLKNVKELIYKKGRGYFDKEPFPLTSNDLIEKALGEHGVICLEDVVHEISTVGPHFRETASFLMPFKLKCPERRLRMKKKPFKDGGDSGNRGDKINELLEKLN

SEQ ID NO: 10079 - protein, 203 aa, Triticum aestivum
  misc_feature (1)..(203): Ceres Seq. ID no. 13583411
KALPKPSPTAAPRSPPPPPSHHAPGEPRAAGHGGGGGHAAAAVRAGDGPQEEEGQRGVGHQEPGAQGGQEAAPLPRRQGRHQAPRGLRQGVPQQGARLPADAHAPQGPEPAPRRGHRRQAALRRPHPRHRRLAPANQEDLGQAAAHAGPHRRVPQGHRGKPQEACSCRTVRHLWVPQFEECEGAYLQEGSRLFRQGAFPPYQQ

SEQ ID NO: 10080 - DNA, 826 bp, Triticum aestivum
  misc_feature (1)..(826): Ceres Seq. ID no. 13583463
acaacacacatccatccatggagggagtggtcaagcaggccatccacgcgggcggggagcagggagtccgcatgggcagcgagcaaggcggatgcgcgggcggcgagccgagcccgcatgtgcagcgagcaaggcggacacgctggcggcgagccgagcccgcatgggcagcgagcaaggcggacgcacggacggcgagccgaggccgcgtgggcagcgagcaaggcagacgcgcgggcgacgagccgagcccgcatgcgcagcgagcaaggcggactcgcggacggcgagccgaggccgcgtgggcagtgaacaaggcagatgcgcgggcggcgagcatggtgcgcggcggcggcccactccaccgtcggcttcttccctcgggcgtgtggcggcctattcccttgggcgcacggtggcctattccctcaagcatggcgcgtgacggccactacagaggagctccttcctccggcgtcggccgcccgacgctgcactagcgcgcggcggtgcccctctctctctctccaggaaccagcgagcacggccgggcggcggtgcagataccagggtcgggcgggcgtgcctgtctggtggcgtggcgagtagggcggggcgagcggcgcggtgagcagggggaggcggcagtattgtccccagcgagaagaaggtggctggcggtgaagtagttgttgctgcgatggaggacttgattgcttttcctttttagtttctaggggtccttgtgtaaattttcaggacagcttgtaacttctctgtaacttcaccgacgatgaatgcaagacagcacggctgtgtcaaattc

SEQ ID NO: 10081 - protein, 165 aa, Triticum aestivum
  misc_feature (1)..(165): Ceres Seq. ID no. 13583464
NTHPSMEGVVKQAIHAGGEQGVRMGSEQGGCAGGEPSPHVQRARRTRWRRAEPAWAASKADARTASRGRVGSEQGRRAGDEPSPHAQRARRTRGRRAEAAWAVNKADARAASMVRGGGPLHRRLLPSGVWRPIPLGARWPIPSSMARDGHYRGAPSSGVGRPTLH

SEQ ID NO: 10082 - protein, 160 aa, Triticum aestivum
  misc_feature (1)..(160): Ceres Seq. ID no. 13583465
MEGVVKQAIHAGGEQGVRMGSEQGGCAGGEPSPHVQRARRTRWRRAEPAWAASKADARTASRGRVGSEQGRRAGDEPSPHAQRARRTRGRRAEAAWAVNKADARAASMVRGGGPLHRRLLPSGVWRPIPLGARWPIPSSMARDGHYRGAPSSGVGRPTLH

SEQ ID NO: 10083 - protein, 147 aa, Triticum aestivum
  misc_feature (1)..(147): Ceres Seq. ID no. 13583466
QHTSIHGGSGQAGHPRGRGAGSPHGQRARRMRGRRAEPACAASKADTLAASRARMGSEQGGRTDGEPRPRGQRARQTRGRRAEPACAASKADSRTASRGRVGSEQGRCAGGEHGARRRPTPPSASSLGRVAAYSLGRTVAYSLKHGA

SEQ ID NO: 10084 - DNA, 673 bp, Triticum aestivum
  misc_feature (1)..(673): Ceres Seq. ID no. 13583501
ctccaagaaagaaggagggcaaaaccctagagcttttctcgccgctgctccagcgtccccccccccccccccccgcgaccgcggcatctcgaccaccgccgccgccgccgccgagctcgcgagatctccggcctcctccggtcttccttcccggctgaggcgtcgcgacaatggctggccccaaggacgtgcggagcgagctggagaaggagatgatgttcgggatggccgagaaggagatggagtaccgggtcgagcttttcaaccggcttacacatgtctgttttgagaagtgcattgagaaaaggcataaagaaggtgaactcaatatgggagagaacagttgcattgatcggtgtgtttcaaagtactggcaggtgactaacattgtcggcggaatgctcgggactcagcagaccccgatgtgagcgctctgagaagcagtagtcgcattttctgtagcaggataccgtcgccatgtttctcctccgtttttgttttggaatgttcgccgtttcgctaagtaaaagcatgagtgactgactaattcatatatactgttcaaaagggaacctcccagcgcgtcgtgctttccagtggtgtaccgtgtcactgaatcatgggcagaggcgcatgcctgtaataatttggtacagctcgatagattttgttg

SEQ ID NO: 10085 - protein, 95 aa, Triticum aestivum
  misc_feature (1)..(95): Ceres Seq. ID no. 13583502
SKKEGGQNPRAFLAAAPASPPPPPRDRGISTTAAAAAELARSPASSGLPSRLRRRDNGWPQGRAERAGEGDDVRDGREGDGVPGRAFQPAYTCLF

SEQ ID NO: 10086 - protein, 85 aa, Triticum aestivum
  misc_feature (1)..(85): Ceres Seq. ID no. 13583503
MAGPKDVRSELEKEMMFGMAEKEMEYRVELFNRLTHVCFEKCIEKRHKEGELNMGENSCIDRCVSKYWQVTNIVGGMLGTQQTPM

SEQ ID NO: 10087 - protein, 71 aa, Triticum aestivum
  misc_feature (1)..(71): Ceres Seq. ID no. 13583504
MMFGMAEKEMEYRVELFNRLTHVCFEKCIEKRHKEGELNMGENSCIDRCVSKYWQVTNIVGGMLGTQQTPM

SEQ ID NO: 10088 - DNA, 831 bp, Triticum aestivum
  misc_feature (1)..(831): Ceres Seq. ID no. 13583556
cctaattccagaaccatcccctccgacctaggctatggctttcatcgtgtccaagctcgcgcgggcagccctcgcatcccgccccgttggagatattgctggtggcatctccccgtgtctctcccggctctatctggcggctggtaccagccgtcgcatgtttgcagctgcaggcggtcccaagtcaaaagaagcaccccgaatatttccccttgttgatgagaattccattaagtcgaaggaatccctatgggccttgtatgaatgctggtgcaagtattggggggtatcccgtgaccgtgaagagatggtccgccggttcaagtcatttgaggctactgcacagtgggtttacaaaatgaacaactctgggtgttcgcaagtgtctcaactgggcccgcatgcagatttttcagagagtgagtttgctgaggtggtgtttcctccacttcctgatgatgatgatgaagacataaaagagatggtgccaggtcaagatttgggccaggagcttgaggagcccttaaataattaattcgagaaattatgaacttgtcttactccatccgttcccaaatataagtctttctagagattcaacaagtgactacatacggagcaaaatgagtgaatctgcactctaaaatatgtctacatgcatacgtatgttgtagtccatttgaaatgtctaaaaagacttatatgtaggaacggatgagtatttggttgtggtaatactgtggtactgggattattgttgttgtctggttgttctcatggaaccaaattagaattgaaataactttgtgttattgctcaaaaaaaaaaaaa

SEQ ID NO: 10089 - protein, 166 aa, Triticum aestivum
  misc_feature (1)..(166): Ceres Seq. ID no. 13583557
MAFIVSKLARAALASRPVGDIAGGISPCLSRLYLAAGTSRRMFAAAGGPKSKEAPRIFPLVDENSIKSKESLWALYECWCKYWGVSRDREEMVRRFKSFEATAQWVYKMNNSGCSQVSQLGPHADFSESEFAEVVFPPLPDDDDEDIKEMVPGQDLGQELEEPLNN

SEQ ID NO: 10090 - protein, 125 aa, Triticum aestivum
  misc_feature (1)..(125): Ceres Seq. ID no. 13583558
MFAAAGGPKSKEAPRIFPLVDENSIKSKESLWALYECWCKYWGVSRDREEMVRRFKSFEATAQWVYKMNNSGCSQVSQLGPHADFSESEFAEVVFPPLPDDDDEDIKEMVPGQDLGQELEEPLNN

SEQ ID NO: 10091 - DNA, 1312 bp, Triticum aestivum
  misc_feature (1)..(1312): Ceres Seq. ID no. 13583590
gaacccttgctcgactgcgactgcgattgcgtcccggcggtagccgctgccgtccggccgcgctgctatggcgagttagacgtcgcggccctcattgatccccgttacggatttccccttcttccccggggatcccgcctgccctaccaccgaatcgtgctgctccattgccttggaaggtcgccgccgccgccgcccgttcctccttccgtcacaatacaaggtgatcaatggcgtcaggtgcacctggtatcatgctccgacacctttccaaaacacttgctgtaagcccagcagtggcatctggtatgaccagccagcatcaccagcttcaacagcgtgcaccagtgggtggcacatccaaaggcaaggctaagctcaaagccggcctgcctttgaagcgcagcgtcatagcaaagaaggggggcgcgcctgccactgctgggagcggtggtgctggccgtggtcgtcgtgaagccattgagcgcattactcagattgcagagtcttgtctgaagtcctctactcctctacggcacttgtcccccaaggagtgtcttcgcgaggcaaaacgtgaggagcttggactcatctccaaggaacgacaacgtgaacttgatattgccaaggctaaagccaagtccaaaggtaccattggaggtgatggtggccgtgttctgatgggtccacctggccttgactatatcagtcttggccttgtagatgagaagaccatccctacttatgagctgacagttgaggatggtcggcgtcttgccaaagaatacagccgtgtgctaatgcaacgacaccgtgcacgccaaactgcggaatcaacacttttgagcctcaagaaggaggccgttgctgcactccccgagaagctgcaagctgctgctatggttcctgacatgacaccattccctgcaaaccggtacatggcaacactcacgccaccaattgaagggtatattgaaaaggtgcgagatgctgccaagaagtattctgtgaaagagaagcttcgctgagttcaattcaatccatataaggtggctgagagttctggaactttttcttatgttgtattcttgagaatctgtcagttttgctgacttcgtgctgtttttgcctctaataatcagatagcggtaataaactgccacgattttgctttgcaagaccatgttattttggctgaatctttttactccagttttgctgtgtagcacaaattgatatgttgaactaaaatcaagaaaagtttgttgctttgaaatgatgcttatactgaaagtatcctgccaaggttact

SEQ ID NO: 10092 - protein, 265 aa, Triticum aestivum
  misc_feature (1)..(265): Ceres Seq. ID no. 15222763
MASGAPGIMLRHLSKTLAVSPAVASGMTSQHHQLQQRAPVGGTSKGKAKLKAGLPLKRSVIAKKGGAPATAGSGGAGRGRREAIERITQIAESCLKSSTPLRHLSPKECLREAKREELGLISKERQRELDIAKAKAKSKGTIGGDGGRVLMGPPGLDYISLGLVDEKTIPTYELTVEDGRRLAKEYSRVLMQRHRARQTAESTLLSLKKEAVAALPEKLQAAAMVPDMTPFPANRYMATLTPPIEGYIEKVRDAAKKYSVKEKLR

SEQ ID NO: 10093 - protein, 257 aa, Triticum aestivum
  misc_feature (1)..(257): Ceres Seq. ID no. 15222764
MLRHLSKTLAVSPAVASGMTSQHHQLQQRAPVGGTSKGKAKLKAGLPLKRSVIAKKGGAPATAGSGGAGRGRREAIERITQIAESCLKSSTPLRHLSPKECLREAKREELGLISKERQRELDIAKAKAKSKGTIGGDGGRVLMGPPGLDYISLGLVDEKTIPTYELTVEDGRRLAKEYSRVLMQRHRARQTAESTLLSLKKEAVAALPEKLQAAAMVPDMTPFPANRYMATLTPPIEGYIEKVRDAAKKYSVKEKLR

SEQ ID NO: 10094 - protein, 239 aa, Triticum aestivum
  misc_feature (1)..(239): Ceres Seq. ID no. 15222765
MTSQHHQLQQRAPVGGTSKGKAKLKAGLPLKRSVIAKKGGAPATAGSGGAGRGRREAIERITQIAESCLKSSTPLRHLSPKECLREAKREELGLISKERQRELDIAKAKAKSKGTIGGDGGRVLMGPPGLDYISLGLVDEKTIPTYELTVEDGRRLAKEYSRVLMQRHRARQTAESTLLSLKKEAVAALPEKLQAAAMVPDMTPFPANRYMATLTPPIEGYIEKVRDAAKKYSVKEKLR

SEQ ID NO: 10095 - DNA, 847 bp, Triticum aestivum
  misc_feature (1)..(847): Ceres Seq. ID no. 13583591
aatcgaaaacccctgactccgccgagcgagcatcacctttccgccgctgctcgccgcacgccgccccgccgaccgagaccctcaggcccgccccactctagcccgcccgcccgcatggctgccgatcgccggcccggcgtctgagggagcgggcggctgcgctcgggggccagtccggcggcgcgatggagctgtccgggagccccggcacgtggagcggcctctcgctgcggctcggccagttcctcttcgccgccgcgtccgtctgcgtcatgtcctccgcgatcggcttcgccaactacaccgccttctgctacttgattgcatcaatgggactacaagcactctggagcttgggacttgcgtgtcttgatggctatgctttgagaatgaaaaaggaactcaacagtgctgttctcgtgagcttatttgttgttggagattgggtaacgtcgatcctgtcgttcgccgcttcatgctcagcaggaagcgtcgttgttctcttcgacaaggatgcgtacttctgcagcagggacccgcatctcccctgtgggacatttgagcttgcgaccgcgtttgcattcctttcctgggcgcttagtgccacatctgcccttgtgatgttttggctcctcgcttcatcttgattagatatgtaggagctctgtctgtacctagtgttgtttggtcctgtctggttatataccgactgatgtgtcaagcagactacataggaatagactgctaattccagagaatagatgggcaatggtcgcaagttccatggagtcttaaattttagagccatgcttcagtgtttcgggccaaagataacttggttcctggc

SEQ ID NO: 10096 - protein, 153 aa, Triticum aestivum
  misc_feature (1)..(153): Ceres Seq. ID no. 13583592
MELSGSPGTWSGLSLRLGQFLFAAASVCVMSSAIGFANYTAFCYLIASMGLQALWSLGLACLDGYALRMKKELNSAVLVSLFVVGDWVTSILSFAASCSAGSVVVLFDKDAYFCSRDPHLPCGTFELATAFAFLSWALSATSALVMFWLLASS

SEQ ID NO: 10097 - protein, 124 aa, Triticum aestivum
  misc_feature (1)..(124): Ceres Seq. ID no. 13583593
MSSAIGFANYTAFCYLIASMGLQALWSLGLACLDGYALRMKKELNSAVLVSLFVVGDWVTSILSFAASCSAGSVVVLFDKDAYFCSRDPHLPCGTFELATAFAFLSWALSATSALVMFWLLASS

SEQ ID NO: 10098 - protein, 105 aa, Triticum aestivum
  misc_feature (1)..(105): Ceres Seq. ID no. 13583594
MGLQALWSLGLACLDGYALRMKKELNSAVLVSLFVVGDWVTSILSFAASCSAGSVVVLFDKDAYFCSRDPHLPCGTFELATAFAFLSWALSATSALVMFWLLASS

SEQ ID NO: 10099 - DNA, 524 bp, Triticum aestivum
  misc_feature (1)..(524): Ceres Seq. ID no. 13583629
aacatcataatcgaaaaaacaagtactccctagaagctgccagccatggccgccaagaaccaccgcattgtgccgctgctgctgctgctcctggcactattcacgctggcggccgccgggcatccgtctctgccgtcggacaagcaatgccctccgaccccacccacgccgccgaccccgccaacaccgcccactccgcccggggggcagaccccgccgacaccgccaaccccgcctaccccacccacgccgccgtgccgaaggctgctgacacgctgaagatgctggtgcccgtacgtgtacgttcgtggtgctgcccatcgccatggaggcgctggacgacaacgactgcggttgctgtcctccgccttccactgcctgcccttaactccatcaattagtatcaccttccacctttgttttggcctcttgggcttgtcgcaatttgtatgttttatttcctgcaaaaaatggtttatgtaacgtgtgtttatcaagcttcaaaaaccagatcaattttttcc

SEQ ID NO: 10100 - protein, 132 aa, Triticum aestivum
  misc_feature (1)..(132): Ceres Seq. ID no. 13583630
HHNRKNKYSLEAASHGRQEPPHCAAAAAAPGTIHAGGRRASVSAVGQAMPSDPTHAADPANTAHSARGADPADTANPAYPTHAAVPKAADTLKMLVPVRVRSWCCPSPWRRWTTTTAVAVLRLPLPALNSIN

SEQ ID NO: 10101 - protein, 84 aa, Triticum aestivum
  misc_feature (1)..(84): Ceres Seq. ID no. 13583631
MPSDPTHAADPANTAHSARGADPADTANPAYPTHAAVPKAADTLKMLVPVRVRSWCCPSPWRRWTTTTAVAVLRLPLPALNSIN

SEQ ID NO: 10102 - protein, 77 aa, Triticum aestivum
  misc_feature (1)..(77): Ceres Seq. ID no. 13583632
MAAKNHRIVPLLLLLLALFTLAAAGHPSLPSDKQCPPTPPTPPTPPTPPTPPGGQTPPTPPTPPTPPTPPCRRLLTR

SEQ ID NO: 10103 - DNA, 908 bp, Triticum aestivum
  misc_feature (1)..(908): Ceres Seq. ID no. 13583691
aatcccaatcgagccctcctccccttccgccgccgccgccgccgccatgtcccgcttcgtgcggcgcctcgccggcatcccgtggcgccagatcgccggggaggcctcctccgtcggtctgctaatggcgcagggcctctgcgccgtccacgtcgtcagcgagcacgtcctcggcgtcgccttcccacggggccccagcatgctgccggcgctgaacatggcgggggacgtgctgctcaccgacaaggtgagcccgcggcgcgggtgggtggggccgggggacgtcgtgctcctcctctcgccggaggacccgcgcaagatcgtcgccaagcgcgtgctcgggatggagggcgacgaggtcacctaccccgtcgacgccggcaacagcgacgccaccaagaccgtcgtggtaccgcaaggtcatatctgggtgcagggcgacaatatctattcatctaacgactcgaggcagtttggacccgtgccttacggtctcgtaaaagggaagatgtcctatcggatttggccaccgtcaaggattggttcgattgactcaaaggagtaggacacagagtataagcgactgttcatacgatgcaaccaggccctgcatttgttggtgcatcttgatgtctaccatttgatgcttcacaattttggtccttgccccccagaagccccgttcagcgaatctatggcatgatttgattgctgtgtctcatgtcgtaacttatggtctgtgatacttgtaaagtgaactaacccgatgaacctacaagttccgggcatggctgagatcagctagtgtcttgacgttgagattgtattaaacttgtcattctcctggaccaaagcttgatgagttgtgcattgtaacatttgcttattattaaggccgttttaagcgg

SEQ ID NO: 10104 - protein, 187 aa, Triticum aestivum
  misc_feature (1)..(187): Ceres Seq. ID no. 13583692
IPIEPSSPSAAAAAAMSRFVRRLAGIPWRQIAGEASSVGLLMAQGLCAVHVVSEHVLGVAFPRGPSMLPALNMAGDVLLTDKVSPRRGWVGPGDVVLLLSPEDPRKIVAKRVLGMEGDEVTYPVDAGNSDATKTVVVPQGHIWVQGDNIYSSNDSRQFGPVPYGLVKGKMSYRIWPPSRIGSIDSKE

SEQ ID NO: 10105 - protein, 172 aa, Triticum aestivum
  misc_feature (1)..(172): Ceres Seq. ID no. 13583693
MSRFVRRLAGIPWRQIAGEASSVGLLMAQGLCAVHVVSEHVLGVAFPRGPSMLPALNMAGDVLLTDKVSPRRGWVGPGDVVLLLSPEDPRKIVAKRVLGMEGDEVTYPVDAGNSDATKTVVVPQGHIWVQGDNIYSSNDSRQFGPVPYGLVKGKMSYRIWPPSRIGSIDSKE

SEQ ID NO: 10106 - protein, 152 aa, Triticum aestivum
  misc_feature (1)..(152): Ceres Seq. ID no. 13583694
NPNRALLPFRRRRRRHVPLRAAPRRHPVAPDRRGGLLRRSANGAGPLRRPRRQRARPRRRLPTGPQHAAGAEHGGGRAAHRQGEPAARVGGAGGRRAPPLAGGPAQDRRQARARDGGRRGHLPRRRRQQRRHQDRRGTARSYLGAGRQYLFI

SEQ ID NO: 10107 - DNA, 760 bp, Triticum aestivum
  misc_feature (1)..(760): Ceres Seq. ID no. 13583718
gaagagccgaacacccaccccaatccactaacctagcgatgcctcccaagcgcaagtccccggttgcgacggcggcggcccccgcaatgccgcctaggatgacccggagcatggccgccgggaagcggggcgccgacgctccggctaaaaaggaggaagcagaggcggcgccggcggcggccggggggaagggcaggaagaaggccaagaaggaggtgtctgcggtggagacggtactgtcgcctcctgcagcggccaagcagaaggtgaagaaaaatgccaagaaggaggtggtggcggccgcggtagatgatggcggtgctggcgctgaaagcgggaagcgcgtcatcgtcgaggcctgcacccagtgccaacagttcaagagaagagctttaaaggtgaaggaggatcttgaaagtgctgtccctggggtttctgtgacaatcaaccctgagaagccacgccgtggatgccttgagatacgggaggaaggtggtgatgtgttcatttcactgcagaacatgccccggcccttcaaaaagatgagggagctcgacatggacaaggttatcaaggacattgcccagaaaattgcttgaatctgacgtggcattaatgtatggatgcgctccttttgcaattgatgtttagggcttattttgtgtgggaacttggtattgcagtggccgtagaatgtgggatcagtgtttcgttattgtgccctatgtgggctaagacatgctgaaattatcgcattagc

SEQ ID NO: 10108 - protein, 198 aa, Triticum aestivum
  misc_feature (1)..(198): Ceres Seq. ID no. 13583719
RAEHPPQSTNLAMPPKRKSPVATAAAPAMPPRMTRSMAAGKRGADAPAKKEEAEAAPAAAGGKGRKKAKKEVSAVETVLSPPAAAKQKVKKNAKKEVVAAAVDDGGAGAESGKRVIVEACTQCQQFKRRALKVKEDLESAVPGVSVTINPEKPRRGCLEIREEGGDVFISLQNMPRPFKKMRELDMDKVIKDIAQKIA

SEQ ID NO: 10109 - protein, 186 aa, Triticum aestivum
  misc_feature (1)..(186): Ceres Seq. ID no. 13583720
MPPKRKSPVATAAAPAMPPRMTRSMAAGKRGADAPAKKEEAEAAPAAAGGKGRKKAKKEVSAVETVLSPPAAAKQKVKKNAKKEVVAAAVDDGGAGAESGKRVIVEACTQCQQFKRRALKVKEDLESAVPGVSVTINPEKPRRGCLEIREEGGDVFISLQNMPRPFKKMRELDMDKVIKDIAQKIA

SEQ ID NO: 10110 - protein, 170 aa, Triticum aestivum
  misc_feature (1)..(170): Ceres Seq. ID no. 13583721
MPPRMTRSMAAGKRGADAPAKKEEAEAAPAAAGGKGRKKAKKEVSAVETVLSPPAAAKQKVKKNAKKEVVAAAVDDGGAGAESGKRVIVEACTQCQQFKRRALKVKEDLESAVPGVSVTINPEKPRRGCLEIREEGGDVFISLQNMPRPFKKMRELDMDKVIKDIAQKIA

SEQ ID NO: 10111 - DNA, 875 bp, Triticum aestivum
  misc_feature (1)..(875): Ceres Seq. ID no. 13583760
atcccgtcgctactcgcccatccccttcgccgcagcgccgccgcctctgatctccaccctcctcgacgcggcgactctgctttacgcccttacgcggcggaggcaaacagatcaaggataacacaaaatcatactttgaagaggtgtcttgtgccaatcactggaataatgactccgtcggcatctgttggaaaggaagtcaacttgaaggaagtcaacttcaacttgaaggaggataagaacataccctgtgctattcagtttgtaacgacgatgttggggacgtcttcaacattgacgatcggggaccggaacaagaagttcagggtgagccgttcttcgacttggataacggttgtcttcacacagtctatgttcattgccaccacagcaggttggatctacgacatgtataataaacctatctggaatgccggcttcccatggtggctgccagttgctgtgttgttgggcgcctacctggcagtggtagacctggcgcgtgggtatttgaccctcttcgtgccacaggcacccttggcggcatggaatgcacttgacgaagttggcttcaaggtgattggattttctgtcatcttaatctctgtccctgttttcttgtttgaccaggcgtggctgcacatcacctttgcttgccttcttagtgtcctcattgctaccatacttgccttctgtgtctgtcttgttcgcacgtaccggcaatagccctcttggcacctagcggctttgtttatggtttggatgtcgtttgctagtagacgaataagcttgtctctccaagccaaagtcgccccttttgtgtaaacagtcggtgccactcatgtgttgttgttgttattattattattattatt

SEQ ID NO: 10112 - protein, 241 aa, Triticum aestivum
  misc_feature (1)..(241): Ceres Seq. ID no. 13583761
IPSLLAHPLRRSAAASDLHPPRRGDSALRPYAAEANRSRITQNHTLKRCLVPITGIMTPSASVGKEVNLKEVNFNLKEDKNIPCAIQFVTTMLGTSSTLTIGDRNKKFRVSRSSTWITVVFTQSMFIATTAGWIYDMYNKPIWNAGFPWWLPVAVLLGAYLAVVDLARGYLTLFVPQAPLAAWNALDEVGFKVIGFSVILISVPVFLFDQAWLHITFACLLSVLIATILAFCVCLVRTYRQ

SEQ ID NO: 10113 - protein, 185 aa, Triticum aestivum
  misc_feature (1)..(185): Ceres Seq. ID no. 13583762
MTPSASVGKEVNLKEVNFNLKEDKNIPCAIQFVTTMLGTSSTLTIGDRNKKFRVSRSSTWITVVFTQSMFIATTAGWIYDMYNKPIWNAGFPWWLPVAVLLGAYLAVVDLARGYLTLFVPQAPLAAWNALDEVGFKVIGFSVILISVPVFLFDQAWLHITFACLLSVLIATILAFCVCLVRTYRQ

SEQ ID NO: 10114 - protein, 150 aa, Triticum aestivum
  misc_feature (1)..(150): Ceres Seq. ID no. 13583763
MLGTSSTLTIGDRNKKFRVSRSSTWITVVFTQSMFIATTAGWIYDMYNKPIWNAGFPWWLPVAVLLGAYLAVVDLARGYLTLFVPQAPLAAWNALDEVGFKVIGFSVILISVPVFLFDQAWLHITFACLLSVLIATILAFCVCLVRTYRQ

SEQ ID NO: 10115 - DNA, 562 bp, Triticum aestivum
  misc_feature (1)..(562): Ceres Seq. ID no. 13583887
atcctaatcgaaaatatcttgtcagctttaacattttctggtgtattccttgccgagaaaataaacacgttcttaggacaaaactggaagagcttctcaagccagaattactttgatccccaaggcctcttcatctcggtcatgtggtccggtcccttgctcctgattacgatacttattctggtgaacacccttgtgacgctctgcatgctcatggtaaggtggaaaagggccgagctcaagcaccgtgctcgtgaggcccgtagcaagcaggagtgatgatgctgccctgctcttgaaccgtggatctattgtgcagtaggggattaagctgctgatttaacggagaagtttgattggaacagtaaagtggaaggttaattagcccttgattttgattgatggtcccacttatggtctctggtactgaagcacacggttttacacatgtattagctgctgttcgtcaaatttaagggatatgtttgtgtagggagctctgaatgttatttggatggctgcaggagtcaagtgccgtcgtatatgcattgctttgtcatct

SEQ ID NO: 10116 - protein, 92 aa, Triticum aestivum
  misc_feature (1)..(92): Ceres Seq. ID no. 13583888
ILIENILSALTFSGVFLAEKINTFLGQNWKSFSSQNYFDPQGLFISVMWSGPLLLITILILVNTLVTLCMLMVRWKRAELKHRAREARSKQE

SEQ ID NO: 10117 - protein, 45 aa, Triticum aestivum
  misc_feature (1)..(45): Ceres Seq. ID no. 13583889
MWSGPLLLITILILVNTLVTLCMLMVRWKRAELKHRAREARSKQE

SEQ ID NO: 10118 - DNA, 925 bp, Triticum aestivum
  misc_feature (1)..(925): Ceres Seq. ID no. 13583898
caccatcccaaattcgtccgtccattcgtcgaaaggggattacggctccacgccagcgcgccccggcaccgccgatccagccgcgccgctgccgccggccccctcgatcggaggcctcggaaggagagcaggcgcgccaggaggggggagatccgggacgccccggcgtaatcctgccgtgcaaggctcttcctgccgagacgaatcgtacgtgcctgccgccgcgccggcgaaccatgtcgtcgtccgcgttgagggccgcggggcagagggcgggggccgcggcccgtaagcaggcgctcaccctgacggaggccgcggcggccagggtgcgccacctcctcgacctcaggcagcggccctacctgcgccttggcgtcaaggcgcgcggctgcaacggcctgtcctacacgctcaattacgccgaaaaagggaagttcgatgagcttgttgaagagaagggtgtgaaagtgctgattgaccccaaggccctgatgcatgtgatcggcaccaagatggacttcgtcgacgatccactgaggtcagagtttgtgttcataaacccgaactcgaaaggggagtgtggatgcggtgaatctttcatgactacgggcagcaaaggatctacgtcatgatgcgtcatgcgatgatgtaaatagagcgaagcatgtgcagtggtggctctagttactgatataattttgtcttggaaagcaacggccattgtaagcttgttgcgcttgcatccaggtagtgaacactgcagtggatttaatcacgtgatggatgaaccagcttgttaccggtactcttacattcatcttggccccgtgttgttgatacgttcactaattcttgtttgggaacataccgagtgcatgataatcaaaataaacacagcaacatttcttcttttgctgttttg

SEQ ID NO: 10119 - protein, 210 aa, Triticum aestivum
  misc_feature (1)..(210): Ceres Seq. ID no. 13583899
PSQIRPSIRRKGITAPRQRAPAPPIQPRRCRRPPRSEASEGEQARQEGGDPGRPGVILPCKALPAETNRTCLPPRRRTMSSSALRAAGQRAGAAARKQALTLTEAAAARVRHLLDLRQRPYLRLGVKARGCNGLSYTLNYAEKGKFDELVEEKGVKVLIDPKALMHVIGTKMDFVDDPLRSEFVFINPNSKGECGCGESFMTTGSKGSTS

SEQ ID NO: 10120 - protein, 132 aa, Triticum aestivum
  misc_feature (1)..(132): Ceres Seq. ID no. 13583900
MSSSALRAAGQRAGAAARKQALTLTEAAAARVRHLLDLRQRPYLRLGVKARGCNGLSYTLNYAEKGKFDELVEEKGVKVLIDPKALMHVIGTKMDFVDDPLRSEFVFINPNSKGECGCGESFMTTGSKGSTS

SEQ ID NO: 10121 - DNA, 839 bp, Triticum aestivum
  misc_feature (1)..(839): Ceres Seq. ID no. 13583909
acacactgaactgcttcagcttgttcttgttggttcacagacacttcccttctcacagtccattaagtccatggcgatgaggaagaacaaggttcacgagttcgaggccgatgtgcccgccgccgacctatgggggctctatggcacgctccgtgcagcggagctgctgcccgagcttctcccgcaggtgctcgccaagatacagctcgtgagcggcgacggcgacgtcggcaccatcttggagctcacattcgctccagggatccctggcctggagacatacagggagaaattcatcaaggtcgacaatgagaactacatcaaggaagcgcagacgattgacggagacatcctgaagctcgggttcctctattacatggtcaggttcgagatcatcgccaaaggacccagttcttcagtgataagatcgaccattgtgtatgagataaattatgaaactcaccccgggcttgaagctatggtcagcaccggacctctggctgcaactgctgagaaatttgcagggtacctcaaggagcagaagatcgctcagagcagttaattcttgcaacagctcagagcaaaagtgtatcaatgctttgagaaaaataatgtctgattccacgttgtgtgttttccctgaaaaaataaatgaccaatgatcaaacatattaggatagtatgtttgatcatatgaatatcacatagttgatatatagatatttcacggtccatgtaccttaactttattagtttcatgaaaatgaagttgggagccttgatgctccttttctcgaagaaatgtaccttaacttgttttggttaatgaaggtttgatt

SEQ ID NO: 10122 - protein, 186 aa, Triticum aestivum
  misc_feature (1)..(186): Ceres Seq. ID no. 13583910
HTELLQLVLVGSQTLPFSQSIKSMAMRKNKVHEFEADVPAADLWGLYGTLRAAELLPELLPQVLAKIQLVSGDGDVGTILELTFAPGIPGLETYREKFIKVDNENYIKEAQTIDGDILKLGFLYYMVRFEIIAKGPSSSVIRSTIVYEINYETHPGLEAMVSTGPLAATAEKFAGYLKEQKIAQSS

SEQ ID NO: 10123 - protein, 163 aa, Triticum aestivum
  misc_feature (1)..(163): Ceres Seq. ID no. 13583911
MAMRKNKVHEFEADVPAADLWGLYGTLRAAELLPELLPQVLAKIQLVSGDGDVGTILELTFAPGIPGLETYREKFIKVDNENYIKEAQTIDGDILKLGFLYYMVRFEIIAKGPSSSVIRSTIVYEINYETHPGLEAMVSTGPLAATAEKFAGYLKEQKIAQSS

SEQ ID NO: 10124 - protein, 161 aa, Triticum aestivum
  misc_feature (1)..(161): Ceres Seq. ID no. 13583912
MRKNKVHEFEADVPAADLWGLYGTLRAAELLPELLPQVLAKIQLVSGDGDVGTILELTFAPGIPGLETYREKFIKVDNENYIKEAQTIDGDILKLGFLYYMVRFEIIAKGPSSSVIRSTIVYEINYETHPGLEAMVSTGPLAATAEKFAGYLKEQKIAQSS

SEQ ID NO: 10125 - DNA, 595 bp, Triticum aestivum
  misc_feature (1)..(595): Ceres Seq. ID no. 13583963
ctcaccaagcaagagcaaaaccaatcaaccacaggtcgatcgattcgcgaagtaccctccgatcacaacccaagaccgccatggctgacaagtgcggcaactgcgactgcgccgacaagacccagtgcgtgaagaagggcgacggctacggcatcgtcatggtcgacaccgagaagagccacttcgaggtgcaggaggccgcggagaacgacggcaagtgcaagtgcggcgccagctgcacctgcaccaactgcacctgcggccactgaacaggcccgccccgctgggcctctcggtcatcgcgtacgcctctacccgtactagtaacccgtgtcaataaaggttgtacgtgtgtgtctacgtatgttgtgttgtcgtcgtgcaagaacctgaaggttggctgatgcgtgcataggataggatcttggatcagccgatcggtcccgtgttcctcccctgtaaccagtggctgagcttcaggtactactactatgtggttgtgagctcgtacgtgttgtggcatgtgacttcatttcgcgtatgcgtgttgcacggaatgaaatttgtcgtgtggttaactagtacttcctccgcg

SEQ ID NO: 10126 - protein, 88 aa, Triticum aestivum
  misc_feature (1)..(88): Ceres Seq. ID no. 13583964
HQARAKPINHRSIDSRSTLRSQPKTAMADKCGNCDCADKTQCVKKGDGYGIVMVDTEKSHFEVQEAAENDGKCKCGASCTCTNCTCGH

SEQ ID NO: 10127 - protein, 62 aa, Triticum aestivum
  misc_feature (1)..(62): Ceres Seq. ID no. 13583965
MADKCGNCDCADKTQCVKKGDGYGIVMVDTEKSHFEVQEAAENDGKCKCGASCTCTNCTCGH

SEQ ID NO: 10128 - DNA, 1092 bp, Triticum aestivum
  misc_feature (1)..(1092): Ceres Seq. ID no. 13584012
aatttctgctaacctgctgctgcggtcgccggcggcgaggaggaggaggaaggggctgagagatggcgggcgccggcggcacgagggagcgggaggaggaagaggaggacgacttcgtctgcctggatccctccttcttcatgaaccgcaactacgagatgaagaccttcacctacggctcccaggagctccagctcctctgcctcagctccgcctgcactgattatgatcttactggacaattagtgtggccaggtgctgttctgatgaacacgtacctatctgaacaccctgagactgtgaaggggcgttcactaattgagttaggatctgggatcggcattaccggcatattgtgcagccgtttctgcaaagaggtggtattgactgatcacaatgatgaagttctagagattataaagaaaaatatagagatgcagtcatgttctggcaatgcggatgcagtgttgactgctgagaagctagaatggggaaatcatgatcatctaagcaatatcattgaaaaacatcctgttggatttgatctcattcttggagccgatatctgcttccagcaagctagcattccatgtctctttgatactgtagagaagcttcttcgtatgcaggccaataaatgtagatttatactggcttatgtatcacgaaccaaagtcatggacgcactggtactgaaggaagctgaaaaacgtggaatgcttgtcgaggaagtggacgggacaagaacaaccatcacagatctcgaaggcgtcatattcgacatcaccctcaaatgacgcctccgatgaaatgcttgggtgacaattccatcagacaggaacaagatgtggagcctcctcccatcaggaaagccaatgttaccgccttcatgatctgctgagctggccctgaacatgatgtggtctctagtccgcatctctccactccatgggagaaaacagttgcacaacaccagcatcagtcctgatatggcgctgattgattcagcgtaacttttaaatgattcgtcggtcgtgacccctttcgctaaatcaagaagcgattcggggtcacgagcatcgcatcgccgtc

SEQ ID NO: 10129 - protein, 244 aa, Triticum aestivum
  misc_feature (1)..(244): Ceres Seq. ID no. 13584013
MAGAGGTREREEEEEDDFVCLDPSFFMNRNYEMKTFTYGSQELQLLCLSSACTDYDLTGQLVWPGAVLMNTYLSEHPETVKGRSLIELGSGIGITGILCSRFCKEVVLTDHNDEVLEIIKKNIEMQSCSGNADAVLTAEKLEWGNHDHLSNIIEKHPVGFDLILGADICFQQASIPCLFDTVEKLLRMQANKCRFILAYVSRTKVMDALVLKEAEKRGMLVEEVDGTRTTITDLEGVIFDITLK

SEQ ID NO: 10130 - protein, 218 aa, Triticum aestivum
  misc_feature (1)..(218): Ceres Seq. ID no. 13584014
MNRNYEMKTFTYGSQELQLLCLSSACTDYDLTGQLVWPGAVLMNTYLSEHPETVKGRSLIELGSGIGITGILCSRFCKEVVLTDHNDEVLEIIKKNIEMQSCSGNADAVLTAEKLEWGNHDHLSNIIEKHPVGFDLILGADICFQQASIPCLFDTVEKLLRMQANKCRFILAYVSRTKVMDALVLKEAEKRGMLVEEVDGTRTTITDLEGVIFDITLK

SEQ ID NO: 10131 - protein, 212 aa, Triticum aestivum
  misc_feature (1)..(212): Ceres Seq. ID no. 13584015
MKTFTYGSQELQLLCLSSACTDYDLTGQLVWPGAVLMNTYLSEHPETVKGRSLIELGSGIGITGILCSRFCKEVVLTDHNDEVLEIIKKNIEMQSCSGNADAVLTAEKLEWGNHDHLSNIIEKHPVGFDLILGADICFQQASIPCLFDTVEKLLRMQANKCRFILAYVSRTKVMDALVLKEAEKRGMLVEEVDGTRTTITDLEGVIFDITLK

SEQ ID NO: 10132 - DNA, 857 bp, Triticum aestivum
  misc_feature (1)..(857): Ceres Seq. ID no. 13584023
aatcgaaaaattcggcttttccgcctcgctgccgccgcccaaaatccacctgggaagaagaaaagaggggcctcttctcttcctctctcgcgtccgatggcctcgagcccgggcgtcggcggcggaggggcggacggcggcggaggggatggaccgacgacgctcgacgagctgtaccacatcaacgtcgtgccggccgagctgcacttcaagttccgcaaggagctccagggcctccgcgtgggcctcaacttcgagttctacaacctagaggtgaatgattttgaggcaaaggtagttctgaagcccctggactttgaccggaagtggaagttccagtacaagcccatcagtggtgacatacagctgctttccaagaagataccagtcacaaaatatctcaaccttcaggtcggcattggtcacaatttccaactgaaggcaactggatggaagtggaagctctctacttgcttggggggagatggtgtttctcagataagaaacaaatcaaaactcaacgtgtttccagggtttgatctgaggctcggttggaaagctgaatatgtgcttcctgagattcatggggctgttggcacaggagaacctgccttcagtatgaactatggacgattgcaagcatccatagaccgggttgaggctattgtgacccaatcagatcggcactgaacctcctaggatgagcagaccaggacgttgatgatgttatggtcggcgaagcaagggagttctttggctacaatttcctctgcaaaatccgatggtttactcatgtcttttgaggctttgcatctgatgtacagaaatgagcaaacattgttttaccaacataaagg

SEQ ID NO: 10133 - protein, 229 aa, Triticum aestivum
  misc_feature (1)..(229): Ceres Seq. ID no. 13584024
NRKIRLFRLAAAAQNPPGKKKRGASSLPLSRPMASSPGVGGGGADGGGGDGPTTLDELYHINVVPAELHFKFRKELQGLRVGLNFEFYNLEVNDFEAKVVLKPLDFDRKWKFQYKPISGDIQLLSKKIPVTKYLNLQVGIGHNFQLKATGWKWKLSTCLGGDGVSQIRNKSKLNVFPGFDLRLGWKAEYVLPEIHGAVGTGEPAFSMNYGRLQASIDRVEAIVTQSDRH

SEQ ID NO: 10134 - protein, 197 aa, Triticum aestivum
  misc_feature (1)..(197): Ceres Seq. ID no. 13584025
MASSPGVGGGGADGGGGDGPTTLDELYHINVVPAELHFKFRKELQGLRVGLNFEFYNLEVNDFEAKVVLKPLDFDRKWKFQYKPISGDIQLLSKKIPVTKYLNLQVGIGHNFQLKATGWKWKLSTCLGGDGVSQIRNKSKLNVFPGFDLRLGWKAEYVLPEIHGAVGTGEPAFSMNYGRLQASIDRVEAIVTQSDRH

SEQ ID NO: 10135 - DNA, 924 bp, Triticum aestivum
  misc_feature (1)..(924): Ceres Seq. ID no. 13584026
cctctctgtcaccgccagcttccacacacctcgtcggcacggaacaccgcccctcgagtcaagagtcaacccacacccaccgatctccgtccatcgaccatgggagccggccaggacctggaggccggcgccggcgacggcggcgagaagaagatggcccactcctcctcctcgggcccgctcccgccgtcggagccgccgcacctgcggggccaggaccccgcccagtaccagtatggtaccttccacccccctgccccccaccccgacgtccgcccccacccgcccgtcggcttcccccaacccgcgcctccccccggattcgccgccggcggctaccagcagcagcagcagaagcagccctacgcgcccgccgacccctactacgcgcaggggtaccaggccgccccaggttatggtcctgttgttcaaggtaggcctgttgaaggaagacccgtgagaatgcggcgccttccatgctgtgggctcggcatgggctggcttctgttcattgccgggttcttcttggctgccattccgtggtatattggtgctttcgtcctaatctgtgtccgggtacatgaccacagagagaaaccaggatatgttgcctgcactgttgctgctataattgcggccattgttataccccttggagtaacaaaaggaacagactcatggtgagccaccaccaggtcttggcaggcggttctgttgctgaatataaacatcgttatttcaggcccagttacatgataggttaaaaagtctgctggttgtatttcatgtatgagtgtgtcttgtatacatatatgtacagtaaaaagagtggggctgcatcttcgatgttctcttgtatcgatacttggtacttatagtgtgtaataaaagcttgaatgtacaacacatatcttcctcgaggct

SEQ ID NO: 10136 - protein, 227 aa, Triticum aestivum
  misc_feature (1)..(227): Ceres Seq. ID no. 13584027
PLCHRQLPHTSSARNTAPRVKSQPTPTDLRPSTMGAGQDLEAGAGDGGEKKMAHSSSSGPLPPSEPPHLRGQDPAQYQYGTFHPPAPHPDVRPHPPVGFPQPAPPPGFAAGGYQQQQQKQPYAPADPYYAQGYQAAPGYGPVVQGRPVEGRPVRMRRLPCCGLGMGWLLFIAGFFLAAIPWYIGAFVLICVRVHDHREKPGYVACTVAAIIAAIVIPLGVTKGTDSW

SEQ ID NO: 10137 - protein, 194 aa, Triticum aestivum
  misc_feature (1)..(194): Ceres Seq. ID no. 13584028
MGAGQDLEAGAGDGGEKKMAHSSSSGPLPPSEPPHLRGQDPAQYQYGTFHPPAPHPDVRPHPPVGFPQPAPPPGFAAGGYQQQQQKQPYAPADPYYAQGYQAAPGYGPVVQGRPVEGRPVRMRRLPCCGLGMGWLLFIAGFFLAAIPWYIGAFVLICVRVHDHREKPGYVACTVAAIIAAIVIPLGVTKGTDSW

SEQ ID NO: 10138 - protein, 176 aa, Triticum aestivum
  misc_feature (1)..(176): Ceres Seq. ID no. 13584029
MAHSSSSGPLPPSEPPHLRGQDPAQYQYGTFHPPAPHPDVRPHPPVGFPQPAPPPGFAAGGYQQQQQKQPYAPADPYYAQGYQAAPGYGPVVQGRPVEGRPVRMRRLPCCGLGMGWLLFIAGFFLAAIPWYIGAFVLICVRVHDHREKPGYVACTVAAIIAAIVIPLGVTKGTDSW

SEQ ID NO: 10139 - DNA, 1831 bp, Triticum aestivum
  misc_feature (1)..(1831): Ceres Seq. ID no. 13584031
agattaaatgttgaggtggaggaaagagaaaccgaaaaaaaggtcttgccttcgcttaattaagcgatgacatcttagccccgattttgatgcgatctgtgatccatgcgccgaacggccacagccggatccttctcgttgcctcgcgcgaaaattttcttcttggcgcgcctctcttccttctcgcccgtcctgcgcgccaaatttctcatcccgatcctggagcccgccagaagaaacctaggcccgctgcccccataaatccacagcagcagactccatcttccatccgtgcgacttgcaggttccttgagcaccaacatggctggccatgggaggaagaaagcggcgcccccatcccaggtgatggacggaccagacggacaagacccaaaatatggcgcccctcccctgccgatggggcgacctaaagctgccgcagcagccgtagcggcatcgaacgcttggttggctgggcatgctgccgctagatccgattcttcccttcaagttgattggggaaatgatgtttacccacctggtggttttgtaaattatttgaacaattcatcgagcttcagtcttccacaacaaattcctcctccaccagccatgacacatggtgctaatttcgcggcaccgctgacatttgcatctcaaaagaatccaattacagcagtgaagaaacgatccaaacgtgcccatgttgaaattgcggatgatgcgggagaaggtaaaactatgaagagattgccatggacatcagaggaggaggatagattgatgagtgcttggctcaagaactcaaatgatcctatcggtggtaatttcaagaagaatgacaaatattggggagatgtggtcgcggactacaatagcaacaccccctcagatcgcaaaagacaagtcaatcaagctatgaaccgatggcatcgagttaacaaaatgataaataatttccattccatccacggagagattagcggtgtatatgctagtgggcagtccaatcagcaattgatggagaaagtccacaaagcatatgagaacagacacggaggaccatttcttctggaaagtacctggcaggttgttcgtcactatccgaagtggtctacgtacaatgcagaactgaatggattgaagaaaatagatgtggccgacctggggaaggcagaggatcatgaggcagctgatagtgatgatatcccacggcctccaggtactaaaacagctaaaagagatgggaatggcaatgacaaaagaaagttgaagtcagaggatttagaagagcttgagaaattcttagaagcccaaaaagaagctactaaaagtcgcacggatgtccttgaggttcaaaagcgtattgcagccgataaacttgagtcgtcgaggctcattctccttgcagcgaaggagaacaaggaggcaaaaacaagagggaaaatgctagaacagtacggtaaattattgacacaagatatggcagggatgaccgagtttcagaaagctgagcatgcgattgcacttaaattgatgcgggaggagttattccccaacgctcgtcaataagtttggaaggaacctgttcctgtttgatgaatgaagagagaagaacagccaatgaagcaatgtggttcatgtcctagtactgatgcttcgggagtgcacaagcttgtttttgttttgttgacagaagtagttattatcaatagatttctgttggtctcgagctagttatttatgtatgtcaacttcttgcttaagtacttccaaaaattgttttctaatctgaagtcagtaataatcattaatccgtaatgattaaaat

SEQ ID NO: 10140 - protein, 416 aa, Triticum aestivum
  misc_feature (1)..(416): Ceres Seq. ID no. 13584032
MAGHGRKKAAPPSQVMDGPDGQDPKYGAPPLPMGRPKAAAAAVAASNAWLAGHAAARSDSSLQVDWGNDVYPPGGFVNYLNNSSSFSLPQQIPPPPAMTHGANFAAPLTFASQKNPITAVKKRSKRAHVEIADDAGEGKTMKRLPWTSEEEDRLMSAWLKNSNDPIGGNFKKNDKYWGDVVADYNSNTPSDRKRQVNQAMNRWHRVNKMINNFHSIHGEISGVYASGQSNQQLMEKVHKAYENRHGGPFLLESTWQVVRHYPKWSTYNAELNGLKKIDVADLGKAEDHEAADSDDIPRPPGTKTAKRDGNGNDKRKLKSEDLEELEKFLEAQKEATKSRTDVLEVQKRIAADKLESSRLILLAAKENKEAKTRGKMLEQYGKLLTQDMAGMTEFQKAEHAIALKLMREELFPNARQ

SEQ ID NO: 10141 - protein, 401 aa, Triticum aestivum
  misc_feature (1)..(401): Ceres Seq. ID no. 13584033
MDGPDGQDPKYGAPPLPMGRPKAAAAAVAASNAWLAGHAAARSDSSLQVDWGNDVYPPGGFVNYLNNSSSFSLPQQIPPPPAMTHGANFAAPLTFASQKNPITAVKKRSKRAHVEIADDAGEGKTMKRLPWTSEEEDRLMSAWLKNSNDPIGGNFKKNDKYWGDVVADYNSNTPSDRKRQVNQAMNRWHRVNKMINNFHSIHGEISGVYASGQSNQQLMEKVHKAYENRHGGPFLLESTWQVVRHYPKWSTYNAELNGLKKIDVADLGKAEDHEAADSDDIPRPPGTKTAKRDGNGNDKRKLKSEDLEELEKFLEAQKEATKSRTDVLEVQKRIAADKLESSRLILLAAKENKEAKTRGKMLEQYGKLLTQDMAGMTEFQKAEHAIALKLMREELFPNARQ

SEQ ID NO: 10142 - protein, 384 aa, Triticum aestivum
  misc_feature (1)..(384): Ceres Seq. ID no. 13584034
MGRPKAAAAAVAASNAWLAGHAAARSDSSLQVDWGNDVYPPGGFVNYLNNSSSFSLPQQIPPPPAMTHGANFAAPLTFASQKNPITAVKKRSKRAHVEIADDAGEGKTMKRLPWTSEEEDRLMSAWLKNSNDPIGGNFKKNDKYWGDVVADYNSNTPSDRKRQVNQAMNRWHRVNKMINNFHSIHGEISGVYASGQSNQQLMEKVHKAYENRHGGPFLLESTWQVVRHYPKWSTYNAELNGLKKIDVADLGKAEDHEAADSDDIPRPPGTKTAKRDGNGNDKRKLKSEDLEELEKFLEAQKEATKSRTDVLEVQKRIAADKLESSRLILLAAKENKEAKTRGKMLEQYGKLLTQDMAGMTEFQKAEHAIALKLMREELFPNARQ

SEQ ID NO: 10143 - DNA, 515 bp, Triticum aestivum
  misc_feature (1)..(515): Ceres Seq. ID no. 13584057
ataacgtttcctcgttgccggggggaagctctctcgtgtcctcctctgctcttcctcgacgagagtgaggccggccaccggcgacagggcggccatggcggcggcgcttctctccccggcctctcccctccctcgctcctcctccgcggcccatcccaggagcaagggcgcggctggtgcagcagcagggtgcgctccgccgtccaggaggagggccgtctcgtgctcgtgcgcgcccgattcgtggagcctcgggctggagaggaggcagctcgtgctctccggcctcgtctcctcctttgcaatcgccctcccgattacagtagtacaatcgtgcgctgctgccactgaggttgagcttgacgacggcgtgaagatggccatgctggtagatgagaccaacgcctactcttttctctacccggttcagctgccagggaagaaaacctccttcagatgggtggagtccaggaaatcggagcgatattcctctgcggcgccactatctcctgatg

SEQ ID NO: 10144 - protein, 140 aa, Triticum aestivum
  misc_feature (1)..(140): Ceres Seq. ID no. 13584058
MAAALLSPASPLPRSSSAAHPRSKGAAGAAAGCAPPSRRRAVSCSCAPDSWSLGLERRQLVLSGLVSSFAIALPITVVQSCAAATEVELDDGVKMAMLVDETNAYSFLYPVQLPGKKTSFRWVESRKSERYSSAAPLSPD

SEQ ID NO: 10145 - protein, 116 aa, Triticum aestivum
  misc_feature (1)..(116): Ceres Seq. ID no. 13584059
ITFPRCRGEALSCPPLLFLDESEAGHRRQGGHGGGASLPGLSPPSLLLRGPSQEQGRGWCSSRVRSAVQEEGRLVLVRARFVEPRAGEEAARALRPRLLLCNRPPDYSSTIVRCCH

SEQ ID NO: 10146 - DNA, 1750 bp, Triticum aestivum
  misc_feature (1)..(1750): Ceres Seq. ID no. 13584160
aaagtaacaacctccaactcagacacagtcaccaccctgtcccctcccctcctcttcctcggccctcgcttcgttctccgcgggagccggcgagccgccgccccactctctctctccccccgtccaccgcacgcctccgccacgccattcccatatgctcttctccggcgagggcaacagagcatgattctgtggcaaggttgaatggcggtgagttaggagactgcggagcaggggttattaataaattgtgcaagaggcgagccttggccgagatggatgccgttgttgatgttgccgatgctatgggcgctgtgactatagagaacggggcgaagctggagttgcctgacggtgtagaggagcgcggcgaagagcatgatgcgcaggccaacagagaccattcaggggagagtgaggtgatcaacccgcacgaagaggcaggtggagaagccagctcacacccagaagggaggaagatcggccgttccaagggaactgcaagtcatggtcctaaggttgcaaagacaaggagcccaaagagtggagatgaaggtctagcaaggagaggcacccctagttcctctcttcgtaaggcacccattgtgcgagtatcgcatgcagactcaggcactggctcttgtaccaatggtgatccgagtgtcgataagaaaaaatctggaaagattgagtctcgtccgtctgccaaggagacatcattgctcgaggacgcaaaatccagggagggaagtaaagctcaaaagcaatcagaccagcattcttccatcagaagagatgaagaagatttaaatagtgaaagttcaaaagctcgaaggtctggcagcactcctgcctatggattcagtttcaagtgtgatgagagagctgaaaaaagaagagagttctactcaaagcttgaggagaagattcacgcaagagagatggaaataagcaatatgcaagcgaaatcgaaggagactgaagaagctgaactcaaaatgctgagaaaaagcttaaagttcaaggctacgccgatgccaagcttctccccaccaccaaaggttgaactgaaaaagattcctcccactagagctaaatcaccaaagcttggccgttccaagaacaaatctgggctggaggctgaagaaagtaccaccccaagccatcctatccgtatgagccttgatgagaaggctactcaaaatggtgcgaagaaagtaaccccatcaaactcggtgaagaagccccagaggaagtcactcccgaaattgccatcagaggcaagcggcccacttgaggccagacagccaaaaatgccatcagaggcaagcggcccacttgaggccacacagccaaaaagcacggaggacctaaacacagataatcatcaggagtcagggtcgccagcaaagcagcttcaggaaaccgagtcgatcgccagcaacgcccaggagccgatccgagctaaagttacccccgacgaccaagaactcgacgagcaggcatccgtgtagcaacgaccatggtgaccaaatccttcgattttgtgatggcaggtgtgcatgcctctggctttgtcgcgtattgtgccatatttcgatagtgtatctagtgtcctgtgttcagtaaaccaacgctcgtctcgtctttgttgagtctagcatctgtgttgcttctgttcataatcgtaagcgaggctccagtgtcgtgtgcaactgcaaatagttttgtcctattttctactgctgct

SEQ ID NO: 10147 - protein, 503 aa, Triticum aestivum
  misc_feature (1)..(503): Ceres Seq. ID no. 13584161
SNNLQLRHSHHPVPSPPLPRPSLRSPREPASRRPTLSLPPSTARLRHAIPICSSPARATEHDSVARLNGGELGDCGAGVINKLCKRRALAEMDAVVDVADAMGAVTIENGAKLELPDGVEERGEEHDAQANRDHSGESEVINPHEEAGGEASSHPEGRKIGRSKGTASHGPKVAKTRSPKSGDEGLARRGTPSSSLRKAPIVRVSHADSGTGSCTNGDPSVDKKKSGKIESRPSAKETSLLEDAKSREGSKAQKQSDQHSSIRRDEEDLNSESSKARRSGSTPAYGFSFKCDERAEKRREFYSKLEEKIHAREMEISNMQAKSKETEEAELKMLRKSLKFKATPMPSFSPPPKVELKKIPPTRAKSPKLGRSKNKSGLEAEESTTPSHPIRMSLDEKATQNGAKKVTPSNSVKKPQRKSLPKLPSEASGPLEARQPKMPSEASGPLEATQPKSTEDLNTDNHQESGSPAKQLQETESIASNAQEPIRAKVTPDDQELDEQASV

SEQ ID NO: 10148 - protein, 412 aa, Triticum aestivum
  misc_feature (1)..(412): Ceres Seq. ID no. 13584162
MDAVVDVADAMGAVTIENGAKLELPDGVEERGEEHDAQANRDHSGESEVINPHEEAGGEASSHPEGRKIGRSKGTASHGPKVAKTRSPKSGDEGLARRGTPSSSLRKAPIVRVSHADSGTGSCTNGDPSVDKKKSGKIESRPSAKETSLLEDAKSREGSKAQKQSDQHSSIRRDEEDLNSESSKARRSGSTPAYGFSFKCDERAEKRREFYSKLEEKIHAREMEISNMQAKSKETEEAELKMLRKSLKFKATPMPSFSPPPKVELKKIPPTRAKSPKLGRSKNKSGLEAEESTTPSHPIRMSLDEKATQNGAKKVTPSNSVKKPQRKSLPKLPSEASGPLEARQPKMPSEASGPLEATQPKSTEDLNTDNHQESGSPAKQLQETESIASNAQEPIRAKVTPDDQELDEQASV

SEQ ID NO: 10149 - protein, 402 aa, Triticum aestivum
  misc_feature (1)..(402): Ceres Seq. ID no. 13584163
MGAVTIENGAKLELPDGVEERGEEHDAQANRDHSGESEVINPHEEAGGEASSHPEGRKIGRSKGTASHGPKVAKTRSPKSGDEGLARRGTPSSSLRKAPIVRVSHADSGTGSCTNGDPSVDKKKSGKIESRPSAKETSLLEDAKSREGSKAQKQSDQHSSIRRDEEDLNSESSKARRSGSTPAYGFSFKCDERAEKRREFYSKLEEKIHAREMEISNMQAKSKETEEAELKMLRKSLKFKATPMPSFSPPPKVELKKIPPTRAKSPKLGRSKNKSGLEAEESTTPSHPIRMSLDEKATQNGAKKVTPSNSVKKPQRKSLPKLPSEASGPLEARQPKMPSEASGPLEATQPKSTEDLNTDNHQESGSPAKQLQETESIASNAQEPIRAKVTPDDQELDEQASV

SEQ ID NO: 10150 - DNA, 1608 bp, Triticum aestivum
  misc_feature (1)..(1608): Ceres Seq. ID no. 13584177
ccactttcccctctccccgactgcgaatcattccgctcgtcgctcgacatggcgacggaacctgtagagtttcaggttgtggtgctcagggtgtccatccattgtgaagggtgcaaaaagaaggtgaagaaggtgctcctacatattgatggtatgcctcgctgatttgattgatcgccatgtgttgtttcagatgcctttgtagaaatttccatgctgggaactctgataggatatttgcatgtgcatctctaagcaaacactgccatactaacatgtacaaagaaggcgcaagaaccaaaataatcatggttatgctgagttactgaacaaaatttccgtttcctttgatcttgcaggcgtatacagatgtgacatcgacgcccggagaaacagggtggcggtcacagtctctccaaagatcgacgccgggatcctcgtcgcgaggctgcgcaagtctggcaaactggcggagccttggccggaggagcccaaacagcagcaggagccgcctcctcctgcagagagccaaagccaagaagccaagaaccaagcagatgatgccagcaagcctaacgaggccgccgagaagcccgccgccgagccaagcaccgcccagcctccggcgccggaacccgagaagaccgccgaagagaccccaccgccggccgaagaaagcaaagggcccgacgaggccaaggcggagacagggccgcaacaacaacccagcgaggcgaacgggaaagccaagcagcagcagcagcaccaggagcagcatgatcatcatgataagccgatgaacgccagggtgacgatggagttcgacgacgcccgcagcagaggcgtctacggctacgggggcccccaccagtacatgccagccacacggcagccgccggtgcacgtcatgagctacaacgtggcacggccgatggcgagctcgtcatactacgccgccgcgccgacgccggcggcgatgcccacgcccatggcgaggccagggccgtcgcacggcggctacatagacgagtacgcgcctccgaactactacagccggccagcgccatcggcgtacgagccctactactaccccgatccccagccgtcgccgtaccagcatcagcgttctgcggccgaggactactactacggagggccgccgccgcctccgcagaggagcgccttctcgccgccgcgggaggcctacggcgacatgttcaacgacgagaatgccaattcttgcagcgtgatgtgaaggatccattcggcaggtttagctagttaatttaatgttctttaactgaggacctctccatgtgttagagccgagattttagtagtagcagccgatgtattagcagtattgctcaggttccatgctagtactagaataaaacgagctgagcttggtgcatgcatgcatgagaggaagaacgggagggattcatggaacagctctgatcgatgcttactggagcaattttgtaatatacttcctctgtatttgaactgcaaaaacgtcttacatttaaataggagcctcttctacggaaggctctgaggagcgtgtcgaaatcatcttaattcttatacatatggttatcgttg

SEQ ID NO: 10151 - protein, 152 aa, Triticum aestivum
  misc_feature (1)..(152): Ceres Seq. ID no. 13584178
MNARVTMEFDDARSRGVYGYGGPHQYMPATRQPPVHVMSYNVARPMASSSYYAAAPTPAAMPTPMARPGPSHGGYIDEYAPPNYYSRPAPSAYEPYYYPDPQPSPYQHQRSAAEDYYYGGPPPPPQRSAFSPPREAYGDMFNDENANSCSVM

SEQ ID NO: 10152 - protein, 146 aa, Triticum aestivum
  misc_feature (1)..(146): Ceres Seq. ID no. 13584179
MEFDDARSRGVYGYGGPHQYMPATRQPPVHVMSYNVARPMASSSYYAAAPTPAAMPTPMARPGPSHGGYIDEYAPPNYYSRPAPSAYEPYYYPDPQPSPYQHQRSAAEDYYYGGPPPPPQRSAFSPPREAYGDMFNDENANSCSVM

SEQ ID NO: 10153 - protein, 126 aa, Triticum aestivum
  misc_feature (1)..(126): Ceres Seq. ID no. 13584180
MPATRQPPVHVMSYNVARPMASSSYYAAAPTPAAMPTPMARPGPSHGGYIDEYAPPNYYSRPAPSAYEPYYYPDPQPSPYQHQRSAAEDYYYGGPPPPPQRSAFSPPREAYGDMFNDENANSCSVM

SEQ ID NO: 10154 - DNA, 1205 bp, Triticum aestivum
  misc_feature (1)..(1205): Ceres Seq. ID no. 13584213
accattacctagaacattcctaatcgaaaaactagaacggtggtagtactagtgtgctccactaccaccaccaacaccacgagtgagggcggtggccaaaagacaggagataaggcgagactgtgagagggacagggcgggagacctcgacgacccctctcattgtttctttccggccgtccagcgccggcaggcagcgaagctagggcagatcgaatcaacagacgcgcgccggccgccggacaagatgatgggtcgcccggtgttcgtgctcttcggctcctccatcgtgcagtacagcttcagcaacggcggatggggagccaccctcaccgacgtctacgcccgcaaggctgatattgttctcagaggatatattgcatggaactcaaggcgagcacttcaagtcattaccaaaattttccccaaggattcagcagtgcagcctagcttggtggtagtttactttggtggcaatgattcgattgctccgcacccttctgggcttggacctcatgtgccacttgaggagtacatggacaacatgaggaagataggagagcacctcaagagcctgtccgacaagactcgtgtgatctttctgagctgcccgccgctcaacgaggagctgctcaagaaatcaacgagcactgcactgagcgagattgtgcggaccaatgaaacctgccgtctctactctgaagcatgtatatctgtatcgaaagagatgggcatcaaggtggtcgatctttggaacgccatgcagaaacgagaggactgggccacagcatgctttacggacgggctgcatttgtcagaagaggggagcaatatagttgtggaagagatcctgaggatcctcaaggaggcggagtgggatccatgcctacactggaaggcgatgccgaccgagttcggggaggactcgccctacgaccttgtcgcctctagcggcaaatccaccatcaacccatccgagtggacattccacaggaaaagatcatgggaatgaacggatcgccaggacatgtgtgagatcgagcagctgcacgtgatattttgcgccggcgctcttcggtcgctttgtgttattcatctgatggaagaacgtgataagatgtttctgaattgcaagtgtccatcgggtcgtagaattaataatgaacatgtttgagttgaacaacgttgagctgagttgggtgtgc

SEQ ID NO: 10155 - protein, 254 aa, Triticum aestivum
  misc_feature (1)..(254): Ceres Seq. ID no. 13584214
MMGRPVFVLFGSSIVQYSFSNGGWGATLTDVYARKADIVLRGYIAWNSRRALQVITKIFPKDSAVQPSLVVVYFGGNDSIAPHPSGLGPHVPLEEYMDNMRKIGEHLKSLSDKTRVIFLSCPPLNEELLKKSTSTALSEIVRTNETCRLYSEACISVSKEMGIKVVDLWNAMQKREDWATACFTDGLHLSEEGSNIVVEEILRILKEAEWDPCLHWKAMPTEFGEDSPYDLVASSGKSTINPSEWTFHRKRSWE

SEQ ID NO: 10156 - protein, 253 aa, Triticum aestivum
  misc_feature (1)..(253): Ceres Seq. ID no. 13584215
MGRPVFVLFGSSIVQYSFSNGGWGATLTDVYARKADIVLRGYIAWNSRRALQVITKIFPKDSAVQPSLVVVYFGGNDSIAPHPSGLGPHVPLEEYMDNMRKIGEHLKSLSDKTRVIFLSCPPLNEELLKKSTSTALSEIVRTNETCRLYSEACISVSKEMGIKVVDLWNAMQKREDWATACFTDGLHLSEEGSNIVVEEILRILKEAEWDPCLHWKAMPTEFGEDSPYDLVASSGKSTINPSEWTFHRKRSWE

SEQ ID NO: 10157 - protein, 158 aa, Triticum aestivum
  misc_feature (1)..(158): Ceres Seq. ID no. 13584216
MDNMRKIGEHLKSLSDKTRVIFLSCPPLNEELLKKSTSTALSEIVRTNETCRLYSEACISVSKEMGIKVVDLWNAMQKREDWATACFTDGLHLSEEGSNIVVEEILRILKEAEWDPCLHWKAMPTEFGEDSPYDLVASSGKSTINPSEWTFHRKRSWE

SEQ ID NO: 10158 - DNA, 1380 bp, Triticum aestivum
  misc_feature (1)..(1380): Ceres Seq. ID no. 13584217
acaggacgtgtaccccaagaaccagagagccaaccaacccaacccctgagcatctccggccacgcatcggctaagcacacgcaaacagccgcccccacgatactcacgaggctccttcccctccgtgcgctctcttgtttcccccatcccatggccaccccaaccacgacgccggcgacgatgcgggccgtgcagtacgacgcctgcggcggaggcgccgccggcctcaagcatgtagaagtccccgtcccttctgcaaagaagaatgaggtcctgctgaaactgcaagctgcaaccatcaacccagttgactggaagatacagaaaggggacttgaggcctctgctgcctcgtagactgccttttatcccagtgactgatgttgcaggagtagttgttgatgttggtcctggagtgaaaggtctcacagcgggtgatcaagtcgtcgccatgttgaactcttttaacggaggtggactggcagagtatgctgtagcatccgcaaacctgaccgtcaaaaggccagctgaggtttctgcagctgagggtgctgggcttcccattgctgcaggcactgcgctccaggcactaaggtccattggtgccaagtttgacggcaccggcaagccattaaacgtgttggtcaccgctgcctctggcggcgtaggcctgtacgcggtgcagcttgcaaagctagcgaaccttcatgttaccgccacctgcggcgcacgcaacatggatcttgtgaagagcttgggcgcagacgaggtgatggactacaggaccccagagggggcgagcctgcagagtccctccggcaggaagtacgacggcgtggttcactgcaccgtcggtgtcagctggtcgtctttccagccattgctcagtgatgccgggcgagtgatcgatatcacccccaacttctcggccatcctcacatctgcgctgcacaggatgacattttccaagaagcgcctggtgcccctgctcctgtcgcccaacaaggcggacctggagttattggttgggttgctcaaggaaggcaagctgaagacggtggtcgactcgaagttcccgttgagcgaggcagacaaggcgtggcagagcagtatcgatggccactggtaagattgtcgttgagatggagagctgatcgtcgtcaatgcttcctagtattaaggacttgcatacagacggtggacgtgaatacttagatgtaatcatacagactagtcacttgtgcgtttgtttattgggtgatggttcgtttattcagtttatattatattatatcttacagtatattattaaaagggtattgagaactatgagttgcaaaaaactgtatggctatcggtaaacaatagcattgtgctgtct

SEQ ID NO: 10159 - protein, 375 aa, Triticum aestivum
  misc_feature (1)..(375): Ceres Seq. ID no. 15222782
TGRVPQEPESQPTQPLSISGHASAKHTQTAAPTILTRLLPLRALSCFPHPMATPTTTPATMRAVQYDACGGGAAGLKHVEVPVPSAKKNEVLLKLQAATINPVDWKIQKGDLRPLLPRRLPFIPVTDVAGVVVDVGPGVKGLTAGDQVVAMLNSFNGGGLAEYAVASANLTVKRPAEVSAAEGAGLPIAAGTALQALRSIGAKFDGTGKPLNVLVTAASGGVGLYAVQLAKLANLHVTATCGARNMDLVKSLGADEVMDYRTPEGASLQSPSGRKYDGVVHCTVGVSWSSFQPLLSDAGRVIDITPNFSAILTSALHRMTFSKKRLVPLLLSPNKADLELLVGLLKEGKLKTVVDSKFPLSEADKAWQSSIDGHW

SEQ ID NO: 10160 - protein, 325 aa, Triticum aestivum
  misc_feature (1)..(325): Ceres Seq. ID no. 15222783
MATPTTTPATMRAVQYDACGGGAAGLKHVEVPVPSAKKNEVLLKLQAATINPVDWKIQKGDLRPLLPRRLPFIPVTDVAGVVVDVGPGVKGLTAGDQVVAMLNSFNGGGLAEYAVASANLTVKRPAEVSAAEGAGLPIAAGTALQALRSIGAKFDGTGKPLNVLVTAASGGVGLYAVQLAKLANLHVTATCGARNMDLVKSLGADEVMDYRTPEGASLQSPSGRKYDGVVHCTVGVSWSSFQPLLSDAGRVIDITPNFSAILTSALHRMTFSKKRLVPLLLSPNKADLELLVGLLKEGKLKTVVDSKFPLSEADKAWQSSIDGHW

SEQ ID NO: 10161 - protein, 315 aa, Triticum aestivum
  misc_feature (1)..(315): Ceres Seq. ID no. 15222784
MRAVQYDACGGGAAGLKHVEVPVPSAKKNEVLLKLQAATINPVDWKIQKGDLRPLLPRRLPFIPVTDVAGVVVDVGPGVKGLTAGDQVVAMLNSFNGGGLAEYAVASANLTVKRPAEVSAAEGAGLPIAAGTALQALRSIGAKFDGTGKPLNVLVTAASGGVGLYAVQLAKLANLHVTATCGARNMDLVKSLGADEVMDYRTPEGASLQSPSGRKYDGVVHCTVGVSWSSFQPLLSDAGRVIDITPNFSAILTSALHRMTFSKKRLVPLLLSPNKADLELLVGLLKEGKLKTVVDSKFPLSEADKAWQSSIDGHW

SEQ ID NO: 10162 - DNA, 1115 bp, Triticum aestivum
  misc_feature (1)..(1115): Ceres Seq. ID no. 13584234
agggtaaagcggcctggcgatggccacagcgcgactactgctccgaagcgcctccctgctccccctccgccgctcgcccctgcactcatccggcttccagccccgagccgccatggcctccgatgccgccagccagttccagaagatccagatccagcgcgaggacacgacctttgatgtctatgttgttggcaaagaaaatgctcctggagtcgtagtgttgcaagagtggtggggtgttgactatgaggtcaagaatcatgccatccatatttcccaaatcggcgatggatacagagcacttattccagatttgtaccgtgggaaggttgctttggaggtagctgaggcacaacatctgatggaaggactagactggcagggtgcaatcaaggatattcaggcttcagttaaatggctgaaggaaaatggatcgcccaaggttggtgttactggttattgcatgggaggtgctttggcggtcgcaagtggagttttggtcccagaggttgatgctgttgttgctttctacgggacgccatcttcggagcttgctgatgcttccaaggctcaggctccaatccaggctcattttggggagcttgacagttttgttgggtttgcggatgttaccgcggccaagtcattggaggagaagctcaaggcttctggagtggcacatgaagtccacatatactctggatgctcccatgccttcatgaacgcatcgcctgaggccctcaagaggaggaagggcatgggtttgactgatgagaatcagggggccattgacctggcatggtcccgcttctccacttggatgggtcgtttcctggggtctgcatgagccattaccatatccatatggtctctgaatgatgtatatggagtctgtcggctcagaagaataaaatgtttgggtgcaatatgtagccagtgcccaatctagacaagcagtgtgttttgtgttagtactactatatgttccaactcgtcatggttttgccagaacatctcggggtacttgattggaggggaaatgaaacacttacgacgctgtcatacgagtttgttttgtgttttaataggcttcagccgagtgctttctggatttt

SEQ ID NO: 10163 - protein, 275 aa, Triticum aestivum
  misc_feature (1)..(275): Ceres Seq. ID no. 13584235
MATARLLLRSASLLPLRRSPLHSSGFQPRAAMASDAASQFQKIQIQREDTTFDVYVVGKENAPGVVVLQEWWGVDYEVKNHAIHISQIGDGYRALIPDLYRGKVALEVAEAQHLMEGLDWQGAIKDIQASVKWLKENGSPKVGVTGYCMGGALAVASGVLVPEVDAVVAFYGTPSSELADASKAQAPIQAHFGELDSFVGFADVTAAKSLEEKLKASGVAHEVHIYSGCSHAFMNASPEALKRRKGMGLTDENQGAIDLAWSRFSTWMGRFLGSA

SEQ ID NO: 10164 - protein, 244 aa, Triticum aestivum
  misc_feature (1)..(244): Ceres Seq. ID no. 13584236
MASDAASQFQKIQIQREDTTFDVYVVGKENAPGVVVLQEWWGVDYEVKNHAIHISQIGDGYRALIPDLYRGKVALEVAEAQHLMEGLDWQGAIKDIQASVKWLKENGSPKVGVTGYCMGGALAVASGVLVPEVDAVVAFYGTPSSELADASKAQAPIQAHFGELDSFVGFADVTAAKSLEEKLKASGVAHEVHIYSGCSHAFMNASPEALKRRKGMGLTDENQGAIDLAWSRFSTWMGRFLGSA

SEQ ID NO: 10165 - protein, 161 aa, Triticum aestivum
  misc_feature (1)..(161): Ceres Seq. ID no. 13584237
MEGLDWQGAIKDIQASVKWLKENGSPKVGVTGYCMGGALAVASGVLVPEVDAVVAFYGTPSSELADASKAQAPIQAHFGELDSFVGFADVTAAKSLEEKLKASGVAHEVHIYSGCSHAFMNASPEALKRRKGMGLTDENQGAIDLAWSRFSTWMGRFLGSA

SEQ ID NO: 10166 - DNA, 1219 bp, Triticum aestivum
  misc_feature (1)..(1219): Ceres Seq. ID no. 13584238
atcgaaaatccatccattagcatccatctccggctagcaacacaaacgaccttctctttctcctctttcttcagggtagtcggccggagtccgggacgaagccggcggcgaagactccaaagaggatcatcatcagttcatcgcacaaatcgaccagccatgtgtaacaacagcggcggccgcggcggggcgatggcggctcggaaggggccgtggacggagaacgaggacgcccaactggtatggttcgtgcgcttgctcggcgaacgccgttgggatttcttagctcaggtctcaggtttgcgcggtggcgggtgatcgatccaacctgacctctacggccagtcaccattaatcttcttcttctccctcccctcctccggcgtgttctcggctgtgctccatgcaggtctccggcgcaccggcaagagctgccgcctccgctgggtcaactacctccacccgggcctcaagcgcggacgcatcaccgccgacgaggagcggctcatcctcagcctccacgccgagtggggctcccggtggtccaggatcgctaggaagctccccggccgcaccgacaacgagatcaagaactactggaggacgcacatgaggaagaaggcccaggaggagaagatgctggccaagaagaaggcctcatcctcgccctcctcctcctcctcctcgaccacgtcgctgacctgctcggcctcccccacggccacgtcgtcctcggcggccaccaccgaggcgccccaggagagcactactactagcatggacgacgaggccgagcaggaggccaccacgtcggcgagcgaggagaagaaggcggaggtggtgcagtactgctccgccgtggacatggaccagctctggaacgacatcgccgcgtcggagagctacccggagatgatgatgagctggggcgcagccggccacgtggccatgcccgcccccgctgtggagccctcgtcgccggtgtgggagttctgcgaggattactccctgtggaggatcgacgaccaagagtactacaacaagatcgatcaacacgctctgaattgagaggctttcgttacgtttctcttgttgttcttgttcttcctagctagctagcttaattgcatgtattactatatactaattcatgcatgtaattatatgtaaaacttgagttgtgagattatattggtgacagctttttgcgcacatgtgt

SEQ ID NO: 10167 - protein, 152 aa, Triticum aestivum
  misc_feature (1)..(152): Ceres Seq. ID no. 13584239
MRKKAQEEKMLAKKKASSSPSSSSSSTTSLTCSASPTATSSSAATTEAPQESTTTSMDDEAEQEATTSASEEKKAEVVQYCSAVDMDQLWNDIAASESYPEMMMSWGAAGHVAMPAPAVEPSSPVWEFCEDYSLWRIDDQEYYNKIDQHALN

SEQ ID NO: 10168 - protein, 143 aa, Triticum aestivum
  misc_feature (1)..(143): Ceres Seq. ID no. 13584240
MLAKKKASSSPSSSSSSTTSLTCSASPTATSSSAATTEAPQESTTTSMDDEAEQEATTSASEEKKAEVVQYCSAVDMDQLWNDIAASESYPEMMMSWGAAGHVAMPAPAVEPSSPVWEFCEDYSLWRIDDQEYYNKIDQHALN

SEQ ID NO: 10169 - protein, 105 aa, Triticum aestivum
  misc_feature (1)..(105): Ceres Seq. ID no. 13584241
IENPSISIHLRLATQTTFSFSSFFRVVGRSPGRSRRRRLQRGSSSVHRTNRPAMCNNSGGRGGAMAARKGPWTENEDAQLVWFVRLLGERRWDFLAQVSGLRGGG

SEQ ID NO: 10170 - DNA, 1061 bp, Triticum aestivum
  misc_feature (1)..(1061): Ceres Seq. ID no. 13584254
gaaaaacccacgcgaccgagaccagcagcagcaccacctcctccctccatcctgatccgatctgactgagccggccatggcggttagggtttggctctccgccatcctcctcgccttcctcctcgccgcctcccccttcgcccaagttgctagagctcagtctgaggaagatgctgctatgcaagaagttgttgatggggctgatctaggatatgtgggtgatgatactccggtttccagtgaagagcctttaagccctgctcctggtgtggagactgtttgcgtcttccccaaaaacgctgggaaaattgtaccagcaggtgaagaaactgagcttttggttggcctgcaaaatgagggtgaatcaactttgaatgttgttgctgtccattcaaccctgcatcttccttatgatcacaaaatgtatggacaaaaccttacagttcagagtttctacaacgcgtcagttcctgtctctgtgcaagcaacctttccctatacatttgccgtgagcaaattcttgcagcctggagcatatgatcttgttggttacattgtgtacgagattgatcagcacccttaccagaacgtattctacaatggcaccattgaggttgttgaggtcggagggttactgagtgttgaatctgtgttccttattacccttggaattgcacttcttggtctcctaggattgtgggcttatggtcaagtgcaacagctctcgaagaaaacaaagaaaggccccaaggtggaactcggaactggaacaactgacgccaacatggacgagtggctggagggtaccgcgtttgcaaaggacaaggccaagaaaaacaaatagattcgaggttgatgggcctagctagacatttcaggatctagaatgagacaaatcgagggtagcccttcacaagtaacctggatagatgagagagcagaggtgtttgaactagtctcgtggctgcacatcttgttgacaccattttcgaccttgctgtgtactttacagatagttttccttgaaacacaattttgttgaaggtatatgttatctatgg

SEQ ID NO: 10171 - protein, 255 aa, Triticum aestivum
  misc_feature (1)..(255): Ceres Seq. ID no. 13584255
MAVRVWLSAILLAFLLAASPFAQVARAQSEEDAAMQEVVDGADLGYVGDDTPVSSEEPLSPAPGVETVCVFPKNAGKIVPAGEETELLVGLQNEGESTLNVVAVHSTLHLPYDHKMYGQNLTVQSFYNASVPVSVQATFPYTFAVSKFLQPGAYDLVGYIVYEIDQHPYQNVFYNGTIEVVEVGGLLSVESVFLITLGIALLGLLGLWAYGQVQQLSKKTKKGPKVELGTGTTDANMDEWLEGTAFAKDKAKKNK

SEQ ID NO: 10172 - protein, 221 aa, Triticum aestivum
  misc_feature (1)..(221): Ceres Seq. ID no. 13584256
MQEVVDGADLGYVGDDTPVSSEEPLSPAPGVETVCVFPKNAGKIVPAGEETELLVGLQNEGESTLNVVAVHSTLHLPYDHKMYGQNLTVQSFYNASVPVSVQATFPYTFAVSKFLQPGAYDLVGYIVYEIDQHPYQNVFYNGTIEVVEVGGLLSVESVFLITLGIALLGLLGLWAYGQVQQLSKKTKKGPKVELGTGTTDANMDEWLEGTAFAKDKAKKNK

SEQ ID NO: 10173 - protein, 140 aa, Triticum aestivum
  misc_feature (1)..(140): Ceres Seq. ID no. 13584257
MYGQNLTVQSFYNASVPVSVQATFPYTFAVSKFLQPGAYDLVGYIVYEIDQHPYQNVFYNGTIEVVEVGGLLSVESVFLITLGIALLGLLGLWAYGQVQQLSKKTKKGPKVELGTGTTDANMDEWLEGTAFAKDKAKKNK

SEQ ID NO: 10174 - DNA, 884 bp, Triticum aestivum
  misc_feature (1)..(884): Ceres Seq. ID no. 13584263
gaagcccccgtccgattcaacaggcaaaacccccctcacgctcacgcgatgggagtcgccgcctccgccgccccccctcccccggaggccgccgcgcccgccgatccaccatccaaagaagatgcccagcatgccgctgccgccgccgccgcagcagcagcagctgcgcccgccgattcaccggcaaaggaagaggtccagtccgccgccgccgccgctcccggcggcggggcggacgcggcgggggagacggtggtcctggacgccgccgcggagggcggcgaggaggaggaaggggagtgcgggttttgcgtgtacatgaagggcggcgggtgcaaggaggagttcgtggggtgggagaagtgcgtggagcaggcggaggcggagggcagcgacgtcgtcgagcgctgccacgacgccaccgccgcgctgcgcaggtgcatggacaagttcccggactactacgagcccatcctccgcgccgagcgcgccatggccgaggatctcgaggccttcaaggccagcgaagcctccgagccctcccccgcctcgccgccgcccccggcggcsgaggaggaacagggcgacgataagaagcaggcggaggcggtggtggcgaaggaggatctcgcggcctgatcccgccgcctaggcgtgggatcttgcgattttttggtgagatttgaggcatcctagatgtgaattattttgttttacctggacgtgatctgcaaggtgggagagggcggcctctccaagaaaagttcgattcttttggtgggaattatacacttgttcacgagttctagctcgtgaactaatatggagaagtgatcttgtgctgtaataataatccaatgcatcgatactgatttgrcrcggtc

SEQ ID NO: 10175 - protein, 212 aa, Triticum aestivum
  misc_feature (1)..(212): Ceres Seq. ID no. 15222788
  misc_feature (190)..(190): Xaa is any aa, unknown or other
EAPVRFNRQNPPHAHAMGVAASAAPPPPEAAAPADPPSKEDAQHAAAAAAAAAAAAPADSPAKEEVQSAAAAAPGGGADAAGETVVLDAAAEGGEEEEGECGFCVYMKGGGCKEEFVGWEKCVEQAEAEGSDVVERCHDATAALRRCMDKFPDYYEPILRAERAMAEDLEAFKASEASEPSPASPPPPAXEEEQGDDKKQAEAVVAKEDLAA

SEQ ID NO: 10176 - protein, 196 aa, Triticum aestivum
  misc_feature (1)..(196): Ceres Seq. ID no. 15222789
  misc_feature (190)..(190): Xaa is any aa, unknown or other
SPRPIQQAKPPSRSRDGSRRLRRPPSPGGRRARRSTIQRRCPACRCRRRRSSSSCARRFTGKGRGPVRRRRRSRRRGGRGGGDGGPGRRRGGRRGGGRGVRVLRVHEGRRVQGGVRGVGEVRGAGGGGGQRRRRALPRRHRRAAQVHGQVPGLLRAHPPRRARHGRGSRGLQGQRSLRALPRLAAAPGGXGGTGRR

SEQ ID NO: 10177 - protein, 196 aa, Triticum aestivum
  misc_feature (1)..(196): Ceres Seq. ID no. 15222790
  misc_feature (174)..(174): Xaa is any aa, unknown or other
MGVAASAAPPPPEAAAPADPPSKEDAQHAAAAAAAAAAAAPADSPAKEEVQSAAAAAPGGGADAAGETVVLDAAAEGGEEEEGECGFCVYMKGGGCKEEFVGWEKCVEQAEAEGSDVVERCHDATAALRRCMDKFPDYYEPILRAERAMAEDLEAFKASEASEPSPASPPPPAXEEEQGDDKKQAEAVVAKEDLAA

SEQ ID NO: 10178 - DNA, 1488 bp, Triticum aestivum
  misc_feature (1)..(1488): Ceres Seq. ID no. 13584275
cacttgcacacaacattcttcctcgcaccactcagctagcagctgccaaacacaagctcgcaagctcacggccgggtacgtgcgaagcattgaacatgggagatgcgctgtgcgatcagctcctcgtggacgtcgacggtgagttccagctccccaccgacgccgaagacctattcagcatcctcgagacttgggaggactgcgtccacggcgccgctgcagcgttgagccccaccgccggcgccagcagccgtggtgagctgatgggcggttctgcgccggggaacaaaagcagcaagcggcgagcgcggccggacgaatgtgacggaatagcgcagacgcagaagaggcagaagtgctccccggaggagggaggcggcgcggcgccgaagacagcccacatcacggtggagcgcaaccgccggaagcagatgaacgagcacctgaccgtgctgcggtcgctcatgccctgcttctatgtcaagcgtggtgaccaagcatccatcataggaggagtggtggactacatcaaggagctgcagcaagtgaagcagtcgctggaggccaagaagcagcgcaaggcctacaccgagcacgtcctcagcccgcgtccgcccccgacgtcctacagcccacgcctacctctcagcccgctccacaaatccacgccgccgctcagcccattgctcaggtccactccgccgctcagcccgcgcctcgccgtcccgatcagccctgccaggacgccgccgacgccaggcagcccctacaagctccgccccctgccgccgccgatctccggctccacctacgtgtccccggcgatgacgccgaccggctacgagccgggctcctcctacctcccgtcgctcgacgccatcgccgccgagctgtcggtgtacgccaacaggcaggcgctgcagctgcccccgactgacccactccccgacgtgagggtggagttcgcaggcgcgaacctggtgctgaagacggtgtcgcaccgcgcgccggggcaggtggtgaagatcatcgccgcgctcgagtcacgggcgccggcgctggagattctccacgccaagatcagcaccatcgacgacactgacgtcaacgccttcaccgtcaagattggaatcgagtgttcgctcagcgctgaagagctggtgcaagagattcagcaaacgttctcgtaagcgtttagttaaggtccccgcttcgagttaaactctttcttgtttttcccaacagggctgaaactcgtcgaattagacggtgaagatgcatgtattggtaagcatgcataagtttgtgcatgtgtgtgtcttgtaagatcgaaactgaggatgagctgaggagccgggcacttgaatggtcgtggtacaggtcgtactctagctatagctaactagctagatcgatcatttcttgtgctacctgcgtacgtatgtaactgcagttgttcaatggcacgtgcatttattttcacaactc

SEQ ID NO: 10179 - protein, 395 aa, Triticum aestivum
  misc_feature (1)..(395): Ceres Seq. ID no. 13584276
LAHNILPRTTQLAAAKHKLASSRPGTCEALNMGDALCDQLLVDVDGEFQLPTDAEDLFSILETWEDCVHGAAAALSPTAGASSRGELMGGSAPGNKSSKRRARPDECDGIAQTQKRQKCSPEEGGGAAPKTAHITVERNRRKQMNEHLTVLRSLMPCFYVKRGDQASIIGGVVDYIKELQQVKQSLEAKKQRKAYTEHVLSPRPPPTSYSPRLPLSPLHKSTPPLSPLLRSTPPLSPRLAVPISPARTPPTPGSPYKLRPLPPPISGSTYVSPAMTPTGYEPGSSYLPSLDAIAAELSVYANRQALQLPPTDPLPDVRVEFAGANLVLKTVSHRAPGQVVKIIAALESRAPALEILHAKISTIDDTDVNAFTVKIGIECSLSAEELVQEIQQTFS

SEQ ID NO: 10180 - protein, 364 aa, Triticum aestivum
  misc_feature (1)..(364): Ceres Seq. ID no. 13584277
MGDALCDQLLVDVDGEFQLPTDAEDLFSILETWEDCVHGAAAALSPTAGASSRGELMGGSAPGNKSSKRRARPDECDGIAQTQKRQKCSPEEGGGAAPKTAHITVERNRRKQMNEHLTVLRSLMPCFYVKRGDQASIIGGVVDYIKELQQVKQSLEAKKQRKAYTEHVLSPRPPPTSYSPRLPLSPLHKSTPPLSPLLRSTPPLSPRLAVPISPARTPPTPGSPYKLRPLPPPISGSTYVSPAMTPTGYEPGSSYLPSLDAIAAELSVYANRQALQLPPTDPLPDVRVEFAGANLVLKTVSHRAPGQVVKIIAALESRAPALEILHAKISTIDDTDVNAFTVKIGIECSLSAEELVQEIQQTFS

SEQ ID NO: 10181 - protein, 308 aa, Triticum aestivum
  misc_feature (1)..(308): Ceres Seq. ID no. 13584278
MGGSAPGNKSSKRRARPDECDGIAQTQKRQKCSPEEGGGAAPKTAHITVERNRRKQMNEHLTVLRSLMPCFYVKRGDQASIIGGVVDYIKELQQVKQSLEAKKQRKAYTEHVLSPRPPPTSYSPRLPLSPLHKSTPPLSPLLRSTPPLSPRLAVPISPARTPPTPGSPYKLRPLPPPISGSTYVSPAMTPTGYEPGSSYLPSLDAIAAELSVYANRQALQLPPTDPLPDVRVEFAGANLVLKTVSHRAPGQVVKIIAALESRAPALEILHAKISTIDDTDVNAFTVKIGIECSLSAEELVQEIQQTFS

SEQ ID NO: 10182 - DNA, 1092 bp, Triticum aestivum
  misc_feature (1)..(1092): Ceres Seq. ID no. 13584319
ccacccacccccgattcacatccccttcacctcctctcctctcctctcctctgccgacgggatctctccctttctccgatccatgccgggatcctccgccgtgtggccgcacacgcgtgcagccctcctccaccacccgaccgaccaggcccatcccggcggccagcccgggctgctccccgccgcggcatgggggcagggcggcgcggcggccccgagggcgagcatagtggcggcgcgggcggtgcagaccaacaggcagcaggcgcgtgggaggagcagtgctgccgaagccggcgctaggaacaagctgaggaagccgccggctggaggagctggaggtgcagcggggatccacggctccgcgccctgtccccagtcagtcccctccaaatctcgccgcagccgccacagtggtttagcatggtggtgcgaaagtgttgcggcttggtttgtgagctacagaccttatcaagcagcaaagtcatctcacatatgccgacgacgaagatccatatttattggctgagggagcaacaacacaattctgatgattctgccaatatttacttgcaaggaccagagggtatgctgatgctgcgcaggcacttgagctatttacagaaggagaggacccgaccttcttcatgtcttgtggctgtgtcttcctttgattcattcgtgcaacaaagaggggacctggccttcttcatgtctcgtgcaaaaagggtgattgacactgactacgacagcctggtgggcgtcgtgctcttcaaccacttagaggtggacttcgacgtgaagcccagcgaccgcgccgcacggatgatcgtccatgtgatcacgatgccggatgtcgccgaggtggaggacctcgacgccatcttttggcgtgagggaggattcgggtcctccggcgtctgaactccgagccttggtagatacatgtagagaaataatctgtttaggctggtggtggaacactagggaaggtagccaccttcggttgtgtgtgtttaatttattttgcactggacgtgtccctgatttctatctatgaataatgcacgtaatttttattttttttaattt

SEQ ID NO: 10183 - protein, 175 aa, Triticum aestivum
  misc_feature (1)..(175): Ceres Seq. ID no. 13584320
HPPPIHIPFTSSPLLSSADGISPFLRSMPGSSAVWPHTRAALLHHPTDQAHPGGQPGLLPAAAWGQGGAAAPRASIVAARAVQTNRQQARGRSSAAEAGARNKLRKPPAGGAGGAAGIHGSAPCPQSVPSKSRRSRHSGLAWWCESVAAWFVSYRPYQAAKSSHICRRRRSIFIG

SEQ ID NO: 10184 - protein, 166 aa, Triticum aestivum
  misc_feature (1)..(166): Ceres Seq. ID no. 13584321
MVVRKCCGLVCELQTLSSSKVISHMPTTKIHIYWLREQQHNSDDSANIYLQGPEGMLMLRRHLSYLQKERTRPSSCLVAVSSFDSFVQQRGDLAFFMSRAKRVIDTDYDSLVGVVLFNHLEVDFDVKPSDRAARMIVHVITMPDVAEVEDLDAIFWREGGFGSSGV

SEQ ID NO: 10185 - protein, 148 aa, Triticum aestivum
  misc_feature (1)..(148): Ceres Seq. ID no. 13584322
MPGSSAVWPHTRAALLHHPTDQAHPGGQPGLLPAAAWGQGGAAAPRASIVAARAVQTNRQQARGRSSAAEAGARNKLRKPPAGGAGGAAGIHGSAPCPQSVPSKSRRSRHSGLAWWCESVAAWFVSYRPYQAAKSSHICRRRRSIFIG

SEQ ID NO: 10186 - DNA, 1249 bp, Triticum aestivum
  misc_feature (1)..(1249): Ceres Seq. ID no. 13584416
caaaccaaatcaagcgcttcctccgccgctgcccaacagctcgcacccggctcccattcattctcttggcaaatcgcccagttcatcctaaattaccagctctcctcggcttcccttcctccaaatcgtcggcgttttcttcctctggttctctgcctgtgtgtccgagtttcttgatcgacaagggcatggcgacgacggtggactggcgcagctataggcccgatcttcctgccgcgatgtatcacatggtggacagcagggaccaggtaatgcacgcgtttgctccggcgacggcgcagggcgcggctccgaccatctcgttcgccttcccctgccccggcgcggagcagagcgccggcctgcttcgtggcgccagctacctcactcccgcgcaaatcctccagctccagtcgcagctgcaccacgtgcgccgggcgccgggcgcggccatggccgcggtggggcagccgatgaagcggcacggcgtggcagcgctcccggcgcggccggcgaccaagctttaccgcggcgtaaggcagcggcattgggggaagtgggtcgccgagatccgcctgccccgcaaccgcacccgcctctggctcggcaccttcgacaccgccgacgaggccgcgctggcctacgacgccgccgccttccggctccgcggcgagtccgccaggctcaacttccccgagctcaggcgcggcggcgagcaccacggcccgccgctcgacgccgcgatcgacgccaagctccgctccatctgccacggggaagacatgccccagagccagagcgatgagacgccggcgccgacgacgacactgacgccgatttctttcccggacgtcaagagcgagccagtctgctccgtctccgagagctcgtcgtcggctgacggcgaggtgtcctcgtgctccgacgtcgtcccggagatgcagcttcttgatttctcggaggctccatgggacgagttcctgctgcgcaagtacccgtcgctcgagatcgactgggacgcgatcctttcttgaatcaagttcatgcttgatccacagctcgtccaaagtgattacttctgctttcattaggctcttggataggttattatgggtttggtcaagtattcatgtgtaacatcaacccctgctctgcttggtttttgaatggcattgccaggaaggaggttttatgtagaaatttaagtctgtcatgtagttttgtgattcaataaagatacactttggtt

SEQ ID NO: 10187 - protein, 343 aa, Triticum aestivum
  misc_feature (1)..(343): Ceres Seq. ID no. 15222791
NQIKRFLRRCPTARTRLPFILLANRPVHPKLPALLGFPSSKSSAFSSSGSLPVCPSFLIDKGMATTVDWRSYRPDLPAAMYHMVDSRDQVMHAFAPATAQGAAPTISFAFPCPGAEQSAGLLRGASYLTPAQILQLQSQLHHVRRAPGAAMAAVGQPMKRHGVAALPARPATKLYRGVRQRHWGKWVAEIRLPRNRTRLWLGTFDTADEAALAYDAAAFRLRGESARLNFPELRRGGEHHGPPLDAAIDAKLRSICHGEDMPQSQSDETPAPTTTLTPISFPDVKSEPVCSVSESSSSADGEVSSCSDVVPEMQLLDFSEAPWDEFLLRKYPSLEIDWDAILS

SEQ ID NO: 10188 - protein, 281 aa, Triticum aestivum
  misc_feature (1)..(281): Ceres Seq. ID no. 15222792
MATTVDWRSYRPDLPAAMYHMVDSRDQVMHAFAPATAQGAAPTISFAFPCPGAEQSAGLLRGASYLTPAQILQLQSQLHHVRRAPGAAMAAVGQPMKRHGVAALPARPATKLYRGVRQRHWGKWVAEIRLPRNRTRLWLGTFDTADEAALAYDAAAFRLRGESARLNFPELRRGGEHHGPPLDAAIDAKLRSICHGEDMPQSQSDETPAPTTTLTPISFPDVKSEPVCSVSESSSSADGEVSSCSDVVPEMQLLDFSEAPWDEFLLRKYPSLEIDWDAILS

SEQ ID NO: 10189 - protein, 264 aa, Triticum aestivum
  misc_feature (1)..(264): Ceres Seq. ID no. 15222793
MYHMVDSRDQVMHAFAPATAQGAAPTISFAFPCPGAEQSAGLLRGASYLTPAQILQLQSQLHHVRRAPGAAMAAVGQPMKRHGVAALPARPATKLYRGVRQRHWGKWVAEIRLPRNRTRLWLGTFDTADEAALAYDAAAFRLRGESARLNFPELRRGGEHHGPPLDAAIDAKLRSICHGEDMPQSQSDETPAPTTTLTPISFPDVKSEPVCSVSESSSSADGEVSSCSDVVPEMQLLDFSEAPWDEFLLRKYPSLEIDWDAILS

SEQ ID NO: 10190 - DNA, 1041 bp, Triticum aestivum
  misc_feature (1)..(1041): Ceres Seq. ID no. 13584519
cgcgttccgtaggtagcgagctccgccccggatctggccgtcgagcgatggcctcgacgagggatctcgccatagcgtccatctcggtcgccgcaggcgccgtagccgccgcggccgcgctcctgtactcctactcggcaaccaattccaagccccagagcccgcccccgcccccgccgtgcaccgagccactccccgtcaacggctgcgccgccaggcatccgccagcgcaggaccccttcaaaaccaccaagagggaagggttcatctcatgggacgactacttcatggcgattgcgttcctttcagccgagcgttcaaaggatcctaaccggcaggttggcgcatgcttggttagccaagagggcattatcctaggtataggttacaatggattcccaagaggctgttcagatgataagcttccttgggcaaagaaatctgcaagaggggatccattggagacaaaatatccttatgttgttcatgctgaagttaatgctattttaaatacaaaccatgcttcagcggctggacagaagttatacgtcactatgttcccctgtaatgagtgtgctaagattatcatccagtcaggtgtatctgaagtcatctattttgtagagaaaaggattgacaactcagatcatgtttatgttgcttctcacaacttattatcaatggctggtgtgaaggtcaggaagcatcagccacaaatggcacaaataccaatcaactttcaggatccaagggtytaatgaatgaactgtgcgcccttaggtaatgcaaatgtgcaccaatgccttaacaattatgtcagtcattcaaaggctgtcatgctgggttatatactcccccggggggcctagctgttgtatattgtaatcagtcgaattactagatcgagaaaagcacctgtaactagttgcatcctgttgcgaaatttgtatgtgctcagcatcatgaaccattyttctgtaaactgtggctgcaccatgatttaactctcactacggtcgattcttgctgtagtaaatcgtg

SEQ ID NO: 10191 - protein, 251 aa, Triticum aestivum
  misc_feature (1)..(251): Ceres Seq. ID no. 15222794
  misc_feature (251)..(251): Xaa is any aa, unknown or other
RSVGSELRPGSGRRAMASTRDLAIASISVAAGAVAAAAALLYSYSATNSKPQSPPPPPPCTEPLPVNGCAARHPPAQDPFKTTKREGFISWDDYFMAIAFLSAERSKDPNRQVGACLVSQEGIILGIGYNGFPRGCSDDKLPWAKKSARGDPLETKYPYVVHAEVNAILNTNHASAAGQKLYVTMFPCNECAKIIIQSGVSEVIYFVEKRIDNSDHVYVASHNLLSMAGVKVRKHQPQMAQIPINFQDPRX

SEQ ID NO: 10192 - protein, 236 aa, Triticum aestivum
  misc_feature (1)..(236): Ceres Seq. ID no. 15222795
  misc_feature (236)..(236): Xaa is any aa, unknown or other
MASTRDLAIASISVAAGAVAAAAALLYSYSATNSKPQSPPPPPPCTEPLPVNGCAARHPPAQDPFKTTKREGFISWDDYFMAIAFLSAERSKDPNRQVGACLVSQEGIILGIGYNGFPRGCSDDKLPWAKKSARGDPLETKYPYVVHAEVNAILNTNHASAAGQKLYVTMFPCNECAKIIIQSGVSEVIYFVEKRIDNSDHVYVASHNLLSMAGVKVRKHQPQMAQIPINFQDPRX

SEQ ID NO: 10193 - protein, 156 aa, Triticum aestivum
  misc_feature (1)..(156): Ceres Seq. ID no. 15222796
  misc_feature (156)..(156): Xaa is any aa, unknown or other
MAIAFLSAERSKDPNRQVGACLVSQEGIILGIGYNGFPRGCSDDKLPWAKKSARGDPLETKYPYVVHAEVNAILNTNHASAAGQKLYVTMFPCNECAKIIIQSGVSEVIYFVEKRIDNSDHVYVASHNLLSMAGVKVRKHQPQMAQIPINFQDPRX

SEQ ID NO: 10194 - DNA, 2159 bp, Triticum aestivum
  misc_feature (1)..(2159): Ceres Seq. ID no. 13584520
atcaacggtgaccctcgatagggtttcatcgtcagagaggaaaagccgaaaaggggatctgaggtcagagtgatgcgccgcctgccttctgccgagctccagcctcgcgccgccgcccttgcctgaggcctcctatgaggatcgagtggtgcttcagaagagacgaccggggagctgcagttcccaatcgaagtagcagctccttttcgagctgccatccgcagtcgaaggaatcaagcggctcctctccgagtcgtggtccgcaatccaagcggctccttttttcagcggcaatccggattcaaagcagtccttcccgggctgcaatcagaaacaggtcctgtttcagttttaataaagtctacgagctgttggctccctcacgtggcaggaacgtagctgctataaatctggcctggcggcaaccgtggtacccgccagttttaagaggatacgatcatctcccttcggcgagcgatggccaaaccatccgtggacggcctaggcaaatcctccctcgatatggtggaggacaatggagttgacaggctcagcaagttgcctgatgacgttttgctcaacattgtggagcgacttgatatcgctgatgttgcacgaaccaccatcctctccagacgttggaagcagatccctgctatactctcaaagatttttataatggttgcttcttttcaacccaagcatgaaggtaggaagttaacctcagatgatatagttcgggccaacaccaacgtgctggaagcaaccaggagcatactggtaaagagggctggaggtccacacaccattcacctgctgcgcatgcaattctacttgggagatgagtccattttcattggtcatgctgttgccaacaccatagcaacacacaaggttgcttcagttgagtttacaatcttgaccaaggtgcgcacaaagtttaccaataatgacctgctcactcatgggaggcagttcatgtcattccttgattcgtgtccaaacacatttggtggtcttgcacgcctcacgctagagaatttgaggttaggagaatcagactttcccaaaattttcagtatatgcaagcaactcgaggtcctctgcctctaccactgtgatatgggcattgagtctttgctggaagtggaacactcacaactcagtgaactggtgattggccgtagcgtgcttattaagagggttgatctgaagtgggtaccaaaactcacagtactgaaatttaatatgtttcgatctcaagatgaccccttctgtcttggctatgtcccacttctccagactgtgagcatcattaatactggtttttcttggcacaagatgctcaagataagcgagttgctgggtgaaaccgccataagcaacctgcatttgaacttcaaaagtgaaaagatttgggtcaagccggaaggtcgaagacaattgttaccagtgttacacaagctaaggcttgtgaatttgattaacatttctgaagaatgcgatctgacttggataatgttcatacttcaaggtgcacccacccttaaggaactacgcatcttggtgcgggaccatttatgtgaaatggtaactggggagcggagaaaaaagtatgcctttagcgaggagaaggacaagggactagagtgggaaccatctgcatctgatttcaagcaccacaaccttgctgagctcagaatctatgggaggtttgaagcagaagaaaaaatcgtgcgctttgccaggaatatcatggaagcagcggtgaatctcgaggacataaaactttataagagtccagtgtgtgagaattgcaagcacatgctccaggagtggacgttgaaggagaagtcgttgcttagctacaaactcagcaaggggatgctgtcttcgctcgtccggattcagttcccaagtttaggggaaatttttacttggccaaagtactggtcttagctgcaagctgtggttttttttttgaggggttgcaagctgcagttcacaggagttgttgtatgcatcgattaattctcactagtcaaccttttaaattattcctgttttgagattgtactgagtcgaggaggataaggagtaactcttgacattagtgtgaagtattttggcaaatgaaagtttcggatgtgttattcgtg

SEQ ID NO: 10195 - protein, 493 aa, Triticum aestivum
  misc_feature (1)..(493): Ceres Seq. ID no. 13584521
MAKPSVDGLGKSSLDMVEDNGVDRLSKLPDDVLLNIVERLDIADVARTTILSRRWKQIPAILSKIFIMVASFQPKHEGRKLTSDDIVRANTNVLEATRSILVKRAGGPHTIHLLRMQFYLGDESIFIGHAVANTIATHKVASVEFTILTKVRTKFTNNDLLTHGRQFMSFLDSCPNTFGGLARLTLENLRLGESDFPKIFSICKQLEVLCLYHCDMGIESLLEVEHSQLSELVIGRSVLIKRVDLKWVPKLTVLKFNMFRSQDDPFCLGYVPLLQTVSIINTGFSWHKMLKISELLGETAISNLHLNFKSEKIWVKPEGRRQLLPVLHKLRLVNLINISEECDLTWIMFILQGAPTLKELRILVRDHLCEMVTGERRKKYAFSEEKDKGLEWEPSASDFKHHNLAELRIYGRFEAEEKIVRFARNIMEAAVNLEDIKLYKSPVCENCKHMLQEWTLKEKSLLSYKLSKGMLSSLVRIQFPSLGEIFTWPKYWS

SEQ ID NO: 10196 - protein, 478 aa, Triticum aestivum
  misc_feature (1)..(478): Ceres Seq. ID no. 13584522
MVEDNGVDRLSKLPDDVLLNIVERLDIADVARTTILSRRWKQIPAILSKIFIMVASFQPKHEGRKLTSDDIVRANTNVLEATRSILVKRAGGPHTIHLLRMQFYLGDESIFIGHAVANTIATHKVASVEFTILTKVRTKFTNNDLLTHGRQFMSFLDSCPNTFGGLARLTLENLRLGESDFPKIFSICKQLEVLCLYHCDMGIESLLEVEHSQLSELVIGRSVLIKRVDLKWVPKLTVLKFNMFRSQDDPFCLGYVPLLQTVSIINTGFSWHKMLKISELLGETAISNLHLNFKSEKIWVKPEGRRQLLPVLHKLRLVNLINISEECDLTWIMFILQGAPTLKELRILVRDHLCEMVTGERRKKYAFSEEKDKGLEWEPSASDFKHHNLAELRIYGRFEAEEKIVRFARNIMEAAVNLEDIKLYKSPVCENCKHMLQEWTLKEKSLLSYKLSKGMLSSLVRIQFPSLGEIFTWPKYWS

SEQ ID NO: 10197 - protein, 426 aa, Triticum aestivum
  misc_feature (1)..(426): Ceres Seq. ID no. 13584523
MVASFQPKHEGRKLTSDDIVRANTNVLEATRSILVKRAGGPHTIHLLRMQFYLGDESIFIGHAVANTIATHKVASVEFTILTKVRTKFTNNDLLTHGRQFMSFLDSCPNTFGGLARLTLENLRLGESDFPKIFSICKQLEVLCLYHCDMGIESLLEVEHSQLSELVIGRSVLIKRVDLKWVPKLTVLKFNMFRSQDDPFCLGYVPLLQTVSIINTGFSWHKMLKISELLGETAISNLHLNFKSEKIWVKPEGRRQLLPVLHKLRLVNLINISEECDLTWIMFILQGAPTLKELRILVRDHLCEMVTGERRKKYAFSEEKDKGLEWEPSASDFKHHNLAELRIYGRFEAEEKIVRFARNIMEAAVNLEDIKLYKSPVCENCKHMLQEWTLKEKSLLSYKLSKGMLSSLVRIQFPSLGEIFTWPKYWS

SEQ ID NO: 10198 - DNA, 1247 bp, Triticum aestivum
  misc_feature (1)..(1247): Ceres Seq. ID no. 13584577
gtgctagctagctggcctgattcgcgtgagttcatccatccatccaccatggcctccgaccgcctcgccgccctcaaggccttcgacgagaccaaggccggcgtgaagggcctcgtggacgccggcgtcaaggccgtcccggacatcttccgccaccctcccgacccgctcccccagtgcaccaaggtcgccgccatcccggtcgtcgacctctcgggtccccgctcggaggtggtcgccgcggtgagggaggcggcgcggacggcgggcttcttccagctggtgaaccacggcgtgccggaggcggccatgtcggggatgctggcggcggtgcggcggttcaacgaggagcccgcggaggccaaggcgccctactacacgcgggacgccgcgcggcgcgtgcgctacaactgcaacgccgacctcttccggaccctggtgggcaagtggcgcgacaccatctacatggacgacgtggaccggctggcggcgggcgaggaggaggaggtcctcccgccggcgtgccggggcgtcgcgcccaagtacacggcgcagatacggatgctggggcgcgcgctcttcgagctgctgtcggaggccctgggcgtgcggcgcgggtacctggaggaggaggccggctgcctggggacgctcagcgtcgccggccactactacccggcgtgcccggagccgcacctgacgctgggcgccgtcaggcacaacgaccccggcttcctcaccgtgctgctccaggacggggtcggcggcctccaggtgctcacggacgtcgaggacggcgaagggaacgtgtccgccgcgtgggccgacgtgccggcggtgccgggggcgctggtggtgaacgtcggcgacttcctgcagctggtgtccaacgacaggttcaggagcgtcgcgcaccgcgtggtggccaacagcgtggggccccggatgtcggtggcgtgcttcttcagggccaagggagcgaccgtgtgcgccccggtggtggcggacgggggtggcccgccgcgctacaggaccgtcacggcggaggagctgctccgctcgtccgggaagcagaacgggctccgcgacgtgaggctctagctggcgagcctcaagaaagcagagagcagagacgaggcgtgaatgcatgttgggacatggtgatgaaatgcgtgtcgatgaagttggagctttgcatgaatttgcttatctttgtctgaaaaataaataaatttgcttatctgctg

SEQ ID NO: 10199 - protein, 366 aa, Triticum aestivum
  misc_feature (1)..(366): Ceres Seq. ID no. 13584578
VLASWPDSREFIHPSTMASDRLAALKAFDETKAGVKGLVDAGVKAVPDIFRHPPDPLPQCTKVAAIPVVDLSGPRSEVVAAVREAARTAGFFQLVNHGVPEAAMSGMLAAVRRFNEEPAEAKAPYYTRDAARRVRYNCNADLFRTLVGKWRDTIYMDDVDRLAAGEEEEVLPPACRGVAPKYTAQIRMLGRALFELLSEALGVRRGYLEEEAGCLGTLSVAGHYYPACPEPHLTLGAVRHNDPGFLTVLLQDGVGGLQVLTDVEDGEGNVSAAWADVPAVPGALVVNVGDFLQLVSNDRFRSVAHRVVANSVGPRMSVACFFRAKGATVCAPVVADGGGPPRYRTVTAEELLRSSGKQNGLRDVRL

SEQ ID NO: 10200 - protein, 350 aa, Triticum aestivum
  misc_feature (1)..(350): Ceres Seq. ID no. 13584579
MASDRLAALKAFDETKAGVKGLVDAGVKAVPDIFRHPPDPLPQCTKVAAIPVVDLSGPRSEVVAAVREAARTAGFFQLVNHGVPEAAMSGMLAAVRRFNEEPAEAKAPYYTRDAARRVRYNCNADLFRTLVGKWRDTIYMDDVDRLAAGEEEEVLPPACRGVAPKYTAQIRMLGRALFELLSEALGVRRGYLEEEAGCLGTLSVAGHYYPACPEPHLTLGAVRHNDPGFLTVLLQDGVGGLQVLTDVEDGEGNVSAAWADVPAVPGALVVNVGDFLQLVSNDRFRSVAHRVVANSVGPRMSVACFFRAKGATVCAPVVADGGGPPRYRTVTAEELLRSSGKQNGLRDVRL

SEQ ID NO: 10201 - protein, 263 aa, Triticum aestivum
  misc_feature (1)..(263): Ceres Seq. ID no. 13584580
MSGMLAAVRRFNEEPAEAKAPYYTRDAARRVRYNCNADLFRTLVGKWRDTIYMDDVDRLAAGEEEEVLPPACRGVAPKYTAQIRMLGRALFELLSEALGVRRGYLEEEAGCLGTLSVAGHYYPACPEPHLTLGAVRHNDPGFLTVLLQDGVGGLQVLTDVEDGEGNVSAAWADVPAVPGALVVNVGDFLQLVSNDRFRSVAHRVVANSVGPRMSVACFFRAKGATVCAPVVADGGGPPRYRTVTAEELLRSSGKQNGLRDVRL

SEQ ID NO: 10202 - DNA, 1613 bp, Triticum aestivum
  misc_feature (1)..(1613): Ceres Seq. ID no. 13584612
aaaaaccccacaaatccatcccggccgaccgccgccgccgccgttgccacccccaccgccatgaatccggcatgcgcggaggcagcagccgccaagaagtcccggcacaaggacaagaaggagaagaaaaacaagcgcaaagacaccgcggagcacctcggcggcgagcccgcgacggccgacgaggaagccgtccacaagaagaagaagaagaagcacgcgaaggaggaggaggaggcggattcgaaggggaagccgacggtgagcatcgccgtcgccggttccgtcatcgacaacgcccagtccctcgagctcgccaccctcctggccggtcagatagcccgcgcggcggccgtattccgcatcgacgagatcgttgtcttcgacagcagcccacctgcggagaacggcggcggcggtgccgaagacgaagaggagagcggtgcgcggttcctcgttcgcatactggagtatctggagacgccgcagtacctgcgccgccgtctcttcccaatgcacaagaactttaaatatgtggggttgcttccgcctctggacgcgccgcaccatgtgcgcaagcatgagtggtctgaatttcgtgaaggtgtaacattgggcggggatcgttcaaagggtacacttgttgatgttgggttaagtcagaacgttctggttgagcaaatcctagaacaaggaaaaagggtaactgtagccatgggaaccaacagagaccttacaccagcttgtataaggaaagtcgttcctccgtcctcacccagcgaagaaatgggatcatattggggctataaagtccgctatgcttcaaatttaagtggtgttatcaatgattcaccatacaaggaaggatatgatcatatcattggcacttctgagcatggtgaaaccattatttcatctgagctaatcttaccttcattcaggcaccttttaattgcgtttggtggactggctggtctggaagaaagcatcgaagaggacccaaatctgaatggcaaaggtgcaaatgatgtattcgcatcttattttaatacatgccccaaccaaggtagcagaacaataaggacagaggaggcacttctcatatcccttcagtacttccaagaccccatcaggcgagcagggatatcgaattagaaggttttatgcagacacatgcaaatacaacattgcgcttaccaaaggattggctttaacgcttggaatagacatggaagatgcaccttgggtttgtttttgatggtcaatcgctggattgtagcacctacgggttttctgctcgggtcaagcactgtaaagcaaagaggaggtgcaagaataggtgatagctttaacttctattttgaaacaggcaaggcacacattttcattattaagaagagaatttgcctggttaattagaggaaaactgggcaaaagccaagatagcttgaacattgatgctagcattggtagagttttcttaagggggcattgatagagttgagaagaagatcagtgccccccaaaagagtgtttagagagggagcataattatcgtcggggatttgttttctttgctccaaattggctgaaatgagtgttttgtttttttt

SEQ ID NO: 10203 - protein, 384 aa, Triticum aestivum
  misc_feature (1)..(384): Ceres Seq. ID no. 13584613
KNPTNPSRPTAAAAVATPTAMNPACAEAAAAKKSRHKDKKEKKNKRKDTAEHLGGEPATADEEAVHKKKKKKHAKEEEEADSKGKPTVSIAVAGSVIDNAQSLELATLLAGQIARAAAVFRIDEIVVFDSSPPAENGGGGAEDEEESGARFLVRILEYLETPQYLRRRLFPMHKNFKYVGLLPPLDAPHHVRKHEWSEFREGVTLGGDRSKGTLVDVGLSQNVLVEQILEQGKRVTVAMGTNRDLTPACIRKVVPPSSPSEEMGSYWGYKVRYASNLSGVINDSPYKEGYDHIIGTSEHGETIISSELILPSFRHLLIAFGGLAGLEESIEEDPNLNGKGANDVFASYFNTCPNQGSRTIRTEEALLISLQYFQDPIRRAGISN

SEQ ID NO: 10204 - protein, 364 aa, Triticum aestivum
  misc_feature (1)..(364): Ceres Seq. ID no. 13584614
MNPACAEAAAAKKSRHKDKKEKKNKRKDTAEHLGGEPATADEEAVHKKKKKKHAKEEEEADSKGKPTVSIAVAGSVIDNAQSLELATLLAGQIARAAAVFRIDEIVVFDSSPPAENGGGGAEDEEESGARFLVRILEYLETPQYLRRRLFPMHKNFKYVGLLPPLDAPHHVRKHEWSEFREGVTLGGDRSKGTLVDVGLSQNVLVEQILEQGKRVTVAMGTNRDLTPACIRKVVPPSSPSEEMGSYWGYKVRYASNLSGVINDSPYKEGYDHIIGTSEHGETIISSELILPSFRHLLIAFGGLAGLEESIEEDPNLNGKGANDVFASYFNTCPNQGSRTIRTEEALLISLQYFQDPIRRAGISN

SEQ ID NO: 10205 - protein, 213 aa, Triticum aestivum
  misc_feature (1)..(213): Ceres Seq. ID no. 13584615
MHKNFKYVGLLPPLDAPHHVRKHEWSEFREGVTLGGDRSKGTLVDVGLSQNVLVEQILEQGKRVTVAMGTNRDLTPACIRKVVPPSSPSEEMGSYWGYKVRYASNLSGVINDSPYKEGYDHIIGTSEHGETIISSELILPSFRHLLIAFGGLAGLEESIEEDPNLNGKGANDVFASYFNTCPNQGSRTIRTEEALLISLQYFQDPIRRAGISN

SEQ ID NO: 10206 - DNA, 1546 bp, Triticum aestivum
  misc_feature (1)..(1546): Ceres Seq. ID no. 13584616
atcccctctcccaccccaccaatctaccgtcgccggaccaggcgcgggccggggcgcgcgatgctgccgcagcagagccaggccgcggcgatgatgcagcaggcggccgcgatgcagtccatgtacgcgatgccgccgccgcctcaccaccaccacctcctcggcgccgcgccgccgcagcagatagagccaattctcactggaaatctgccacctggttttgatacaagtacatgccgcagtgtatatgtcggcaatattcatgttcaagtgactgaggcacttctccgagaggtttttcagagtgctggttcagttgacggatgcaagcttataagaaaagagaagtcctcatatggttttgttgactactacgaacgcggatcagctgccctagcaattttgacacttaacgggaagcaaatttttgggcagcctatcagagttaattgggcatatgctagcggtcagagggaggatacaacagaccatttccatatttttgttggtgatcttagccctgaggtcacggattctgcattatttgcattcttctcagcatattcccctaactgctctgatgctcgagtaatgtgggaccaaaagaccggaagatcaagaggttatggctttgtttccttcaggaatcaacaggatgcgcagagtgccataaatgacttaaatggtcagtggcttggaaatcggcagattcgttgcaactgggcaacaaaaggtgccaacagtggcgaggaccagctaacatcagattcgaaaagtatagctgatgtaaataacaatttcacagaaaatgcaaagcagaaatcaaacgaagatgctcccgagaataatccactgtacagaactgtttatgttgggaaccttgctcacgaggttactcaagacgtgcttcaccgtttcttccatgcacttggtgctggagccatcgaggaggtgcgtgtccagcatggcaaaggctttggttttgtcaagtacagcaatcatgccgaaactgcccttgcaattcagacgggtaatggtcgtattttgggtggtaaaccagtcaagtgttcctggggcaacaagcctacaccccctggtaccacctctgcgccactgccccctcctgctgctcctagccaccccgctgccgccgatctcgtagcgtatcaacgtgctattgcgatgagcaagatggcttcaacccaggcattgatgcaggctcagcatctcaggcacgcagccatggggatgggtgtaggtgcgagtcaggcgatgtacgatggtactttccagaacgtcggtgcctcgcagcagcaacagcagcagcagcagcagctcatgtactattaattccagccttggagggagctcatctttgtaatttgacccggattttattttttcttttctatcttcgtcgtgtctatatgcagtgtgacactatatgtcggtgttgccgtctggctgtgttggtagtgcaccgaatctgtgtctgtagtgatgcaagttgaccggttaatatcgaattttatgttattttctcgtg

SEQ ID NO: 10207 - protein, 449 aa, Triticum aestivum
  misc_feature (1)..(449): Ceres Seq. ID no. 13584617
IPSPTPPIYRRRTRRGPGRAMLPQQSQAAAMMQQAAAMQSMYAMPPPPHHHHLLGAAPPQQIEPILTGNLPPGFDTSTCRSVYVGNIHVQVTEALLREVFQSAGSVDGCKLIRKEKSSYGFVDYYERGSAALAILTLNGKQIFGQPIRVNWAYASGQREDTTDHFHIFVGDLSPEVTDSALFAFFSAYSPNCSDARVMWDQKTGRSRGYGFVSFRNQQDAQSAINDLNGQWLGNRQIRCNWATKGANSGEDQLTSDSKSIADVNNNFTENAKQKSNEDAPENNPLYRTVYVGNLAHEVTQDVLHRFFHALGAGAIEEVRVQHGKGFGFVKYSNHAETALAIQTGNGRILGGKPVKCSWGNKPTPPGTTSAPLPPPAAPSHPAAADLVAYQRAIAMSKMASTQALMQAQHLRHAAMGMGVGASQAMYDGTFQNVGASQQQQQQQQQLMYY

SEQ ID NO: 10208 - protein, 429 aa, Triticum aestivum
  misc_feature (1)..(429): Ceres Seq. ID no. 13584618
MLPQQSQAAAMMQQAAAMQSMYAMPPPPHHHHLLGAAPPQQIEPILTGNLPPGFDTSTCRSVYVGNIHVQVTEALLREVFQSAGSVDGCKLIRKEKSSYGFVDYYERGSAALAILTLNGKQIFGQPIRVNWAYASGQREDTTDHFHIFVGDLSPEVTDSALFAFFSAYSPNCSDARVMWDQKTGRSRGYGFVSFRNQQDAQSAINDLNGQWLGNRQIRCNWATKGANSGEDQLTSDSKSIADVNNNFTENAKQKSNEDAPENNPLYRTVYVGNLAHEVTQDVLHRFFHALGAGAIEEVRVQHGKGFGFVKYSNHAETALAIQTGNGRILGGKPVKCSWGNKPTPPGTTSAPLPPPAAPSHPAAADLVAYQRAIAMSKMASTQALMQAQHLRHAAMGMGVGASQAMYDGTFQNVGASQQQQQQQQQLMYY

SEQ ID NO: 10209 - protein, 419 aa, Triticum aestivum
  misc_feature (1)..(419): Ceres Seq. ID no. 13584619
MMQQAAAMQSMYAMPPPPHHHHLLGAAPPQQIEPILTGNLPPGFDTSTCRSVYVGNIHVQVTEALLREVFQSAGSVDGCKLIRKEKSSYGFVDYYERGSAALAILTLNGKQIFGQPIRVNWAYASGQREDTTDHFHIFVGDLSPEVTDSALFAFFSAYSPNCSDARVMWDQKTGRSRGYGFVSFRNQQDAQSAINDLNGQWLGNRQIRCNWATKGANSGEDQLTSDSKSIADVNNNFTENAKQKSNEDAPENNPLYRTVYVGNLAHEVTQDVLHRFFHALGAGAIEEVRVQHGKGFGFVKYSNHAETALAIQTGNGRILGGKPVKCSWGNKPTPPGTTSAPLPPPAAPSHPAAADLVAYQRAIAMSKMASTQALMQAQHLRHAAMGMGVGASQAMYDGTFQNVGASQQQQQQQQQLMYY

SEQ ID NO: 10210 - DNA, 1896 bp, Triticum aestivum
  misc_feature (1)..(1896): Ceres Seq. ID no. 13584620
atccagtggatcccggtgaacggcacatggcggctaccaactctcgatcccctttcttcttcctcctcgcccgaaccccagctactctccatcttgtgtaatcgctacttgatcatgtatctgtgagtgagattgccaccatatattcgagctactactattgtgtaccttatatttggtatcagtcgccaccaccatcctctccgcagcgcgctctggctcacttcatcgagacgcgccgactccgccaagcgcgcctgcaactggaacacatggatccagcggtcaagtcctacctcgacaagctctcggctacgatggaggccaacacgacggctctgacggtgatcacctcccgtctcgacgatctagcggcgtggcggcctgatctggagaagtgcgtcgccgatctaggggaagcggtggctgcgctgcagcaagggcgcccgggctccaccaacggcgagggtacacaggcgccggcaccaacggcgccactgccagcgactcgtgccacggcaagtcgtgtcgctgaaggtgcggcgggcgcaccccacgggtccattgaccatggcgagttccacctgcaacgagggtcgacggtggtgtcatcccagacgccgccgccactcccgaccaacggtcagctcaaaatcccgtccccaaattctcttccatcgccttttgcgcatgctagtcagatgttagcggggctaggacaggcgcacccatccatcgctttccctcaattctcgagggagaatccaaatctctggaaaaccatgtgtgagcagtactttaacatgtttggaatacacgaatacttttaggttccgatggtggcgctgaatttttcagggcctgctgccatttggctgcaatccatacagaaaaaactgggatcatttacatgggaatcatttgctgccttgctatgcactagatttgggcgtgatacgcaccgaaatctaatccgtcggttctacaccattaagcagacttcctcaatagctaattttattgagaaatttgagcttattacaaatcacttgagttcatattcagattcaattcacccctactatttccttactcgttttgtggagggactgaggccggacatacgcgcggtggtcatagtgcagcggccgccggacctggacacagcttgtgctctagctctgctccaggaggaggtggctgatggagcaggcctggagtcgtcgcggcagttccactaccagtcacggcctccaaaggtgaacacgcgccctcccgcggcgctgccacttccaccaccatcgggtcgcccaccaccaccagctggggcggccgatcggcgtgggactgaagccgctcgagctgaagcggcgaaaatcaagactctgcgcgactacagaagagcgcgggggctatgcttcaagtgtggcgaacgatggggtcatgaccacacctgacccacgtcagtccagctccatgtggtcgaggaactcctggagctgtttggcatcgacgcagtcacggatcagcagagcttgccagcggacgagcaacagcaagatatagtcatggcgatctcatgatctgccgtgacgggaggggtgtcatctaaagctttttagctccgtgcttggattcaaggccgcgaagtgttgatgctcgtcgactccggaagcacaacttcttcttcctcctcgcccgaaccctagttactctcgatcttgtgtaatcgctacttgatcgtgtatctgtgagtgagattgccaccatatattcgagctactactactatgtaaaaaaaaaaaaaaaaaaaaaaaaaaaaaaaaaaaaaaaaaaaaaaaaaaaaaaaaaaaaccaaaaaaaaaaaaaaaaaggtttatcaataccgccaacctc

SEQ ID NO: 10211 - protein, 206 aa, Triticum aestivum
  misc_feature (1)..(206): Ceres Seq. ID no. 13584621
MVALNFSGPAAIWLQSIQKKLGSFTWESFAALLCTRFGRDTHRNLIRRFYTIKQTSSIANFIEKFELITNHLSSYSDSIHPYYFLTRFVEGLRPDIRAVVIVQRPPDLDTACALALLQEEVADGAGLESSRQFHYQSRPPKVNTRPPAALPLPPPSGRPPPPAGAADRRGTEAARAEAAKIKTLRDYRRARGLCFKCGERWGHDHT

SEQ ID NO: 10212 - protein, 185 aa, Triticum aestivum
  misc_feature (1)..(185): Ceres Seq. ID no. 13584622
MDPAVKSYLDKLSATMEANTTALTVITSRLDDLAAWRPDLEKCVADLGEAVAALQQGRPGSTNGEGTQAPAPTAPLPATRATASRVAEGAAGAPHGSIDHGEFHLQRGSTVVSSQTPPPLPTNGQLKIPSPNSLPSPFAHASQMLAGLGQAHPSIAFPQFSRENPNLWKTMCEQYFNMFGIHEYF

SEQ ID NO: 10213 - protein, 170 aa, Triticum aestivum
  misc_feature (1)..(170): Ceres Seq. ID no. 13584623
MEANTTALTVITSRLDDLAAWRPDLEKCVADLGEAVAALQQGRPGSTNGEGTQAPAPTAPLPATRATASRVAEGAAGAPHGSIDHGEFHLQRGSTVVSSQTPPPLPTNGQLKIPSPNSLPSPFAHASQMLAGLGQAHPSIAFPQFSRENPNLWKTMCEQYFNMFGIHEYF

SEQ ID NO: 10214 - DNA, 1321 bp, Triticum aestivum
  misc_feature (1)..(1321): Ceres Seq. ID no. 13584630
aaaccgaaacactttctctctctcccttgtttctcgtgctcggaaaccctagccgcacgaagacttcgcctcgcccccacatcgcccgccgtctgacctgcctacgagggcgaacgatggccgcggagaactactggaggtacgccgacgcgcggcagcagcaggccatggtggcggctgcggcggccgcggcggggatggcccctgcagctaccgttgcgcaggccgcgacggccgcggggggcatgcagcagcaccagcaccagcaccagcaccagcaggcggcgatggcgcaacagcagcagcagcagcaacagcagcagcaggcggccgcgccgtcgcttaagcgcgcgcgcccagactatggcgatggtcctggaggacaagagatggctggatattatccgcgggaaaatgcaggttaccactcacttagagacaatgaagcaattggagcatcttacgaccgctacttacgcaatgggatgccttctgtggcagccaatgaaccaagtagggcagttgttggtgccatgggtggagctgcaatggttggtggtggaatgagtggatatcctgttgatgaccgccgtatgatgggtgtcgttggtatggacagcagagccatggggtatggtgcaagacctgagcctcctcttcccccggatgcatccaacaccttgtatattgaaggtctgcctgcaaactgcacccgtagggaggtttcacatatattccgcccttttgttggtttccgtgaagtgaggcttgtcaacaaagagtcaagacaccctggtggagatcctcatgtcctgtgtttcgttgattttgatagccctgcccaagctactattgcacttgaagccctgcaaggttataagtttgacgaacacgatcgtgaatcagcccatttaaggctgcaattctcgcgctttcctggtccgaggtcagctggcgggcctcgtggtaggcgttaagtcgtgcgggtcaggcggttgacgaacctaccgtttatacgagcgatcgaacctgcttggtgtaacgctttgcgccgaattctccgccggtggctcgtagggttcgtcagcccttgtcgtgaaagcgtgaaaaggacgatgcaataatctcgctgttcagtatccattagattctcggggtcgcatgtgtgtctgctttagtatttatggtctactgtattttgttatctcgcggcgtgacccagacaatatcagtcttttatcatgtgtaacgctaactttcttaaagcacttgctcgtttgtttagccgtgctagtaatatcaactcttttcttcgtcttgc

SEQ ID NO: 10215 - protein, 324 aa, Triticum aestivum
  misc_feature (1)..(324): Ceres Seq. ID no. 13584631
TETLSLSPLFLVLGNPSRTKTSPRPHIARRLTCLRGRTMAAENYWRYADARQQQAMVAAAAAAAGMAPAATVAQAATAAGGMQQHQHQHQHQQAAMAQQQQQQQQQQQAAAPSLKRARPDYGDGPGGQEMAGYYPRENAGYHSLRDNEAIGASYDRYLRNGMPSVAANEPSRAVVGAMGGAAMVGGGMSGYPVDDRRMMGVVGMDSRAMGYGARPEPPLPPDASNTLYIEGLPANCTRREVSHIFRPFVGFREVRLVNKESRHPGGDPHVLCFVDFDSPAQATIALEALQGYKFDEHDRESAHLRLQFSRFPGPRSAGGPRGRR

SEQ ID NO: 10216 - protein, 286 aa, Triticum aestivum
  misc_feature (1)..(286): Ceres Seq. ID no. 13584632
MAAENYWRYADARQQQAMVAAAAAAAGMAPAATVAQAATAAGGMQQHQHQHQHQQAAMAQQQQQQQQQQQAAAPSLKRARPDYGDGPGGQEMAGYYPRENAGYHSLRDNEAIGASYDRYLRNGMPSVAANEPSRAVVGAMGGAAMVGGGMSGYPVDDRRMMGVVGMDSRAMGYGARPEPPLPPDASNTLYIEGLPANCTRREVSHIFRPFVGFREVRLVNKESRHPGGDPHVLCFVDFDSPAQATIALEALQGYKFDEHDRESAHLRLQFSRFPGPRSAGGPRGRR

SEQ ID NO: 10217 - protein, 269 aa, Triticum aestivum
  misc_feature (1)..(269): Ceres Seq. ID no. 13584633
MVAAAAAAAGMAPAATVAQAATAAGGMQQHQHQHQHQQAAMAQQQQQQQQQQQAAAPSLKRARPDYGDGPGGQEMAGYYPRENAGYHSLRDNEAIGASYDRYLRNGMPSVAANEPSRAVVGAMGGAAMVGGGMSGYPVDDRRMMGVVGMDSRAMGYGARPEPPLPPDASNTLYIEGLPANCTRREVSHIFRPFVGFREVRLVNKESRHPGGDPHVLCFVDFDSPAQATIALEALQGYKFDEHDRESAHLRLQFSRFPGPRSAGGPRGRR

SEQ ID NO: 10218 - DNA, 1358 bp, Triticum aestivum
  misc_feature (1)..(1358): Ceres Seq. ID no. 13584730
ggtctcctcctccgccctcccacacccaaaaagctctagggaaacccccacgcgcgcgcctggtgccggatcggatcggggatgtgggagtcggtggcgctcacgctggccggcgccgccggcaacagcatcggcaaggtcctccagaagaagggcacccacatcctcccgcccctctccttcaagctcaaggtcatacggggctacgcgctcaacaggctctggatcagcggcttcctcctggacatgtgcggcgccgccctcatgctcactgcgctctcgcaggcgtcggtctctgtcgtgcagccgattgccggctgcggcctcgccatactctgcgtcttctcccatttttacctcaaggaggtcatgaatggccttgattggcttgccatcacaatggccggtctcggcaccataggagtcggtgtaggaggggaggagcagaaagtggaagagattccccttttcagtataccttggctggtgctcaccgttctcatcttgtttgttctgctcaacacttggcttcatatctacaaaaagcaaaggcgcgaacaagagttgactggacctgaagtgatcgaggaggtcatatacggcttagaatcaggcattttgtttgggatttcatcagtgatctctaagatgggatttgtgatgtctgaaatgggctttccgaagattgttgtgccagctgccatttcttgtagtgtggcctgcagtgctgtgggatttgtttaccagactcgaggtctcaagcatgggagggcaattgttgtgtccacgtgtacatcggtggcatctattgtgtctggtgttgtggctggtatggttgcacttgacgaacatctgccgacagctcctgcaggacgtttttttctcctgcttggatggttcttcattattacgggggtgatacttcttgttacttcaacccgattgattgcgcgcctacctaagcctgtgcagaagtttttgaagagtaatatggagcgttcacacagcatcaggaggcctggaccagcccgagggaaggatcccaaccaaagcacaacaatccatgcatcgacattacatatactaacctctacaggaaaagagaaggcctagaacagctgctggtagagcaagattgtcttaacacctttgatgggtcatgttgtcgtttaaatcattatgtggatgtacaagtctagagtagcatcttaaaagtttgggccggttgctcatatactgactgcccttgttataggtctaacagaagtttggaaaatctcctgtgaattttggtcaagttacatatcatcctgtggtgagttgtaagtggtatattcatttgttctcttccctttcgg

SEQ ID NO: 10219 - protein, 343 aa, Triticum aestivum
  misc_feature (1)..(343): Ceres Seq. ID no. 13584731
MWESVALTLAGAAGNSIGKVLQKKGTHILPPLSFKLKVIRGYALNRLWISGFLLDMCGAALMLTALSQASVSVVQPIAGCGLAILCVFSHFYLKEVMNGLDWLAITMAGLGTIGVGVGGEEQKVEEIPLFSIPWLVLTVLILFVLLNTWLHIYKKQRREQELTGPEVIEEVIYGLESGILFGISSVISKMGFVMSEMGFPKIVVPAAISCSVACSAVGFVYQTRGLKHGRAIVVSTCTSVASIVSGVVAGMVALDEHLPTAPAGRFFLLLGWFFIITGVILLVTSTRLIARLPKPVQKFLKSNMERSHSIRRPGPARGKDPNQSTTIHASTLHILTSTGKEKA

SEQ ID NO: 10220 - protein, 288 aa, Triticum aestivum
  misc_feature (1)..(288): Ceres Seq. ID no. 13584732
MCGAALMLTALSQASVSVVQPIAGCGLAILCVFSHFYLKEVMNGLDWLAITMAGLGTIGVGVGGEEQKVEEIPLFSIPWLVLTVLILFVLLNTWLHIYKKQRREQELTGPEVIEEVIYGLESGILFGISSVISKMGFVMSEMGFPKIVVPAAISCSVACSAVGFVYQTRGLKHGRAIVVSTCTSVASIVSGVVAGMVALDEHLPTAPAGRFFLLLGWFFIITGVILLVTSTRLIARLPKPVQKFLKSNMERSHSIRRPGPARGKDPNQSTTIHASTLHILTSTGKEKA

SEQ ID NO: 10221 - protein, 282 aa, Triticum aestivum
  misc_feature (1)..(282): Ceres Seq. ID no. 13584733
MLTALSQASVSVVQPIAGCGLAILCVFSHFYLKEVMNGLDWLAITMAGLGTIGVGVGGEEQKVEEIPLFSIPWLVLTVLILFVLLNTWLHIYKKQRREQELTGPEVIEEVIYGLESGILFGISSVISKMGFVMSEMGFPKIVVPAAISCSVACSAVGFVYQTRGLKHGRAIVVSTCTSVASIVSGVVAGMVALDEHLPTAPAGRFFLLLGWFFIITGVILLVTSTRLIARLPKPVQKFLKSNMERSHSIRRPGPARGKDPNQSTTIHASTLHILTSTGKEKA

SEQ ID NO: 10222 - DNA, 1801 bp, Triticum aestivum
  misc_feature (1)..(1801): Ceres Seq. ID no. 13584744
aaacgattgatcaattccctctgagaaagaaagcaattgcctaattttcccgtctgctgaggaaatccgtgctgtcctgaggaaatccgggttggggatttgccaaatttcttgatttcagccctattgttggggctgccgaggccggattatgagatgggcttcttgtcgtgcctattccggtgccccgaggaggaggagcgggtggtgaaggagcacgatgacgacgaggactccggcggaatcgaccatggagtcgcctcagagtcatcagaaagtgccccactgaagactgaatccgcacatatggaaggaatccagagaaatggcacacataatgaggcgacgatcttcactttgcgtgagcttgttgatgctaccaaaaacttcagcaaggattttcagttggggcgaggaggatttggttgtgtgtataaagcatatctgaatgatggtcaggttgttgcagtcaaacaacttgatctaaatgggcttcaggggaaccgagaattccttgtggaggttctcatgctcaacctcttgcatcaccctaaccttgtcaatttgatagggtactgtgttgacggtgatcaacgcttgcttgtttatgaatatatgccattgggatcactagaagaccatctacacgaccttccacccaataaagaacctctagattggacaacacggatgaagatagctgctggcgcagctgctggtttggaatacctacatgataaggcaaatccaccagttatttaccgagatattaagccatcaaacattcttctttctgaaaggtatcatgcgaagttgtccgactttggacttgctaaacttggtcctgtgggtgataagactcatgtgacaacccgtgtcatggggacttatggctattgtgctcctgagtacgccgcgactggacagctaacggttaagtctgacatctatagttttggtgtggtgttcctcgagctaattacaggacgaagggcactcgatagcaatcggcctcgtgaggaacaggacttggtctcatgggctcgtccattgttcaaagaccaaaggaaatttccaaagatggctgatcctttgttgcgtggccgctttccaaagaggggtttgtaccaggccttggctattgcagcgatgtgtttgcaggagaagtcaaggaatcgccctctgattagggaagttgctgctgctctctcctatttgtcatcacaaacatacgatgggaatgacgctgctgttcgccgttaccttgatggcccttcagcatcaaaagtgtcagacgatcaggttaaccaagatgatgctttggctagtcaacatggagctcaaacgtcgatgcatgaccgtatgaatgacttcgtcccagaaggaaaagaacattgcaggagtggctccaaccgtggaggacggggcagggttgttccaaacggtgtcgacagagaccgcgcacttgcagatgcgaatgtctgggccgaggcttggagacgccatgagaaggcaagcaaagtgcgtgtaaccgatgaaatcctcggatagtgagctgagctctgcttgatgttttggcatgctggcgattttgaagagagcgttgttaggagaggaggaataatgcgcagcgaggtgtgtagtactgcaccaccagagtgagcgctcgcaaggtttcaccggtggagcctgtcactgtcacgtccaccatcgtttcgctgcatacattacacggtctgaatttcacatgtaggtattgtttcaggggctttgtaaataaatgtaataacccccttaattg

SEQ ID NO: 10223 - protein, 464 aa, Triticum aestivum
  misc_feature (1)..(464): Ceres Seq. ID no. 13584745
MGFLSCLFRCPEEEERVVKEHDDDEDSGGIDHGVASESSESAPLKTESAHMEGIQRNGTHNEATIFTLRELVDATKNFSKDFQLGRGGFGCVYKAYLNDGQVVAVKQLDLNGLQGNREFLVEVLMLNLLHHPNLVNLIGYCVDGDQRLLVYEYMPLGSLEDHLHDLPPNKEPLDWTTRMKIAAGAAAGLEYLHDKANPPVIYRDIKPSNILLSERYHAKLSDFGLAKLGPVGDKTHVTTRVMGTYGYCAPEYAATGQLTVKSDIYSFGVVFLELITGRRALDSNRPREEQDLVSWARPLFKDQRKFPKMADPLLRGRFPKRGLYQALAIAAMCLQEKSRNRPLIREVAAALSYLSSQTYDGNDAAVRRYLDGPSASKVSDDQVNQDDALASQHGAQTSMHDRMNDFVPEGKEHCRSGSNRGGRGRVVPNGVDRDRALADANVWAEAWRRHEKASKVRVTDEILG

SEQ ID NO: 10224 - protein, 414 aa, Triticum aestivum
  misc_feature (1)..(414): Ceres Seq. ID no. 13584746
MEGIQRNGTHNEATIFTLRELVDATKNFSKDFQLGRGGFGCVYKAYLNDGQVVAVKQLDLNGLQGNREFLVEVLMLNLLHHPNLVNLIGYCVDGDQRLLVYEYMPLGSLEDHLHDLPPNKEPLDWTTRMKIAAGAAAGLEYLHDKANPPVIYRDIKPSNILLSERYHAKLSDFGLAKLGPVGDKTHVTTRVMGTYGYCAPEYAATGQLTVKSDIYSFGVVFLELITGRRALDSNRPREEQDLVSWARPLFKDQRKFPKMADPLLRGRFPKRGLYQALAIAAMCLQEKSRNRPLIREVAAALSYLSSQTYDGNDAAVRRYLDGPSASKVSDDQVNQDDALASQHGAQTSMHDRMNDFVPEGKEHCRSGSNRGGRGRVVPNGVDRDRALADANVWAEAWRRHEKASKVRVTDEILG

SEQ ID NO: 10225 - protein, 340 aa, Triticum aestivum
  misc_feature (1)..(340): Ceres Seq. ID no. 13584747
MLNLLHHPNLVNLIGYCVDGDQRLLVYEYMPLGSLEDHLHDLPPNKEPLDWTTRMKIAAGAAAGLEYLHDKANPPVIYRDIKPSNILLSERYHAKLSDFGLAKLGPVGDKTHVTTRVMGTYGYCAPEYAATGQLTVKSDIYSFGVVFLELITGRRALDSNRPREEQDLVSWARPLFKDQRKFPKMADPLLRGRFPKRGLYQALAIAAMCLQEKSRNRPLIREVAAALSYLSSQTYDGNDAAVRRYLDGPSASKVSDDQVNQDDALASQHGAQTSMHDRMNDFVPEGKEHCRSGSNRGGRGRVVPNGVDRDRALADANVWAEAWRRHEKASKVRVTDEILG

SEQ ID NO: 10226 - DNA, 602 bp, Triticum aestivum
  misc_feature (1)..(602): Ceres Seq. ID no. 13584789
gaaagcctccgtggtggcagctggtgcaagaaatagctaacgttcatagcgccagagcactagaagaaatcgatgaagctgttcgcgttcgtgaggcgcgctcgccggacatcggccgcggcggcgatgacagcggagccgattccggtgccggtggcgcctgtgtccgctgcggagaagcggcggcggaggccctcgtcggggccgtcgtcgtggaagccgacgctagtcgccatctccgaggacgctgcggtggccgccgccaaggccgacgccggaaaggccaagggcaaggcgaaagggaagccgggggctgccaaggccaaggcgaggccgtcgcctcgctcgctccagcctgactacgacgacttccggcgcttcggggcgcccacggtgctgccggcgttcgcgcccacggcgttcctcttctgagctcaggcgacctcgctgtggtggtgtgccgtgatggcaagtgacaacgtggtgctcaggcgacctcgctgtggtggtgtgccgtgatggcaagtgacaacgtggtggtctgaccatgaaccctctctgtgtttgtgcgcccaatatgagctcccaaagctgatgcctct

SEQ ID NO: 10227 - protein, 119 aa, Triticum aestivum
  misc_feature (1)..(119): Ceres Seq. ID no. 13584790
MKLFAFVRRARRTSAAAAMTAEPIPVPVAPVSAAEKRRRRPSSGPSSWKPTLVAISEDAAVAAAKADAGKAKGKAKGKPGAAKAKARPSPRSLQPDYDDFRRFGAPTVLPAFAPTAFLF

SEQ ID NO: 10228 - protein, 118 aa, Triticum aestivum
  misc_feature (1)..(118): Ceres Seq. ID no. 13584791
KPPWWQLVQEIANVHSARALEEIDEAVRVREARSPDIGRGGDDSGADSGAGGACVRCGEAAAEALVGAVVVEADASRHLRGRCGGRRQGRRRKGQGQGEREAGGCQGQGEAVASLAPA

SEQ ID NO: 10229 - protein, 101 aa, Triticum aestivum
  misc_feature (1)..(101): Ceres Seq. ID no. 13584792
MTAEPIPVPVAPVSAAEKRRRRPSSGPSSWKPTLVAISEDAAVAAAKADAGKAKGKAKGKPGAAKAKARPSPRSLQPDYDDFRRFGAPTVLPAFAPTAFLF

SEQ ID NO: 10230 - DNA, 1164 bp, Triticum aestivum
  misc_feature (1)..(1164): Ceres Seq. ID no. 13584797
aaaggcaactagacgctgagagctccctcctgcttacccgtgccggcggccgccgccgcaagcccagaggagggagcaacgccggcgcctggatcccccgagtgccgccgccgacccgtcccgtactccggccgtcgcccatcggctgcagcatcttggccctcgcgcgcctccgctgccgcttcctctccgccccgcctcagctgatggacatgtctggtccaagatggaagaagggcaaagacggcaaggatttcgcagctctggcagcagcccaacccatgtcaagcattgttgccaagctccagtcttcactggaaggatcaaagctcgtggcgactttatctagcaggggcggggatgcggttcttggcgtgaacccgcaggaagccgcgcttctgaaccgcgccgcctttggccgggcactggaaaatgtcggggccgagaaacagtggttccagctgggcgctgaggaggtcttctaccttcaccatgctttggagtgcatcgtggtcgagtcggcgaacaaggatctgatgagccaaggggagctgtgggatcacttgtgctccgcatcagagtcgtttcctgagatgtacagggcgtactcgcatctcaggtcgaagaactgggtggtgcggtcaggtttgcagtatggtacggatttcgtcgcttaccgtcatcaccccgcgctcgtccactcggagtttgctgtggttgtggttccggaaggatcggggttcggcggtaggtgtggccgcctgaaggtgtggtctgatctactgtgcgcgctccgagcttctggcagtgtggccaagacgctgctggttctgacaatctccagcaatgtctgtgaactgagatccccagattgtttggaacggttggttgttcatgaaagaactattacaaggtggatagcccagcagtgccgtgagcagcgatgtaaaccgtgcagagaagaagcatatacggaagaacaagatcacgcaggagaaactgtagtgttcaactattggggtctagtactaggtttcacagttctttctagcctgcttgtatacaagctgagattccgacaatcaagctaaatatttctctgtactcctattggtgatgtttaacttctcatcttattgcaatcctgtgccggtagtcttgtgc

SEQ ID NO: 10231 - protein, 362 aa, Triticum aestivum
  misc_feature (1)..(362): Ceres Seq. ID no. 13584798
RQLDAESSLLLTRAGGRRRKPRGGSNAGAWIPRVPPPTRPVLRPSPIGCSILALARLRCRFLSAPPQLMDMSGPRWKKGKDGKDFAALAAAQPMSSIVAKLQSSLEGSKLVATLSSRGGDAVLGVNPQEAALLNRAAFGRALENVGAEKQWFQLGAEEVFYLHHALECIVVESANKDLMSQGELWDHLCSASESFPEMYRAYSHLRSKNWVVRSGLQYGTDFVAYRHHPALVHSEFAVVVVPEGSGFGGRCGRLKVWSDLLCALRASGSVAKTLLVLTISSNVCELRSPDCLERLVVHERTITRWIAQQCREQRCKPCREEAYTEEQDHAGETVVFNYWGLVLGFTVLSSLLVYKLRFRQSS

SEQ ID NO: 10232 - protein, 294 aa, Triticum aestivum
  misc_feature (1)..(294): Ceres Seq. ID no. 13584799
MDMSGPRWKKGKDGKDFAALAAAQPMSSIVAKLQSSLEGSKLVATLSSRGGDAVLGVNPQEAALLNRAAFGRALENVGAEKQWFQLGAEEVFYLHHALECIVVESANKDLMSQGELWDHLCSASESFPEMYRAYSHLRSKNWVVRSGLQYGTDFVAYRHHPALVHSEFAVVVVPEGSGFGGRCGRLKVWSDLLCALRASGSVAKTLLVLTISSNVCELRSPDCLERLVVHERTITRWIAQQCREQRCKPCREEAYTEEQDHAGETVVFNYWGLVLGFTVLSSLLVYKLRFRQSS

SEQ ID NO: 10233 - protein, 292 aa, Triticum aestivum
  misc_feature (1)..(292): Ceres Seq. ID no. 13584800
MSGPRWKKGKDGKDFAALAAAQPMSSIVAKLQSSLEGSKLVATLSSRGGDAVLGVNPQEAALLNRAAFGRALENVGAEKQWFQLGAEEVFYLHHALECIVVESANKDLMSQGELWDHLCSASESFPEMYRAYSHLRSKNWVVRSGLQYGTDFVAYRHHPALVHSEFAVVVVPEGSGFGGRCGRLKVWSDLLCALRASGSVAKTLLVLTISSNVCELRSPDCLERLVVHERTITRWIAQQCREQRCKPCREEAYTEEQDHAGETVVFNYWGLVLGFTVLSSLLVYKLRFRQSS

SEQ ID NO: 10234 - DNA, 1448 bp, Triticum aestivum
  misc_feature (1)..(1448): Ceres Seq. ID no. 13584805
gtggactcctagccagccccttcacctcttcgggcttctgtggcgagccgagttttccggcggaggcgagccatggccgcagcggaggaaacggccgtgggaaccgctgcggaggggagcgacctgcgctccttcttctcgacgcgcggcgtcgccgccgatcttgctgcgttggacgaccagaccctcaaggcgctggacgagaagtacattatcgccagggacctcgacgccgccacggtgctctccaagatccaccacttggtggggcacagcgaagccagcatcgtcccctacgaagggctgtcctaccagcttccgtgccgtgacccggggcagcacgagtacgaccccacactccggcagctttgcctgcgccgcggcaaggtcgaaacttgcacggtcggcgaccccaggacctcgcgcaaggccgagatcatcacggccacgctatccttggtcaagaagaccgtcctgagtggccatcgctcgtttagcgacggtctgcgctacggcgatgaagtcttcaagcaggacaagaagaccgtggatgatgccctgctggacatctgctgcctactcgagtgcccaagggcatctctcaaaatgcttgaacttggtccgggcacggtcgttgggccactgatattcacaatggaagatggggcagagaaccattgcaggtcattcggtccgagtggagcccgggtacatgaggggatctctaatattactgtcgaacaaggcgcaacggtcaatttcatcctactagtccagagggatgatgttttttgggattttgctcggtcgcaactccgccacgaattgaattgtgtggtcatgacaggcggcgatggggaaccaaatgtcatgacacgggctttcttgcgcaaactcaaggattgtctgtctgtccctgtgtatgctctcaccgattcagatccagagggaatttcgatcttttgtacctacaagtttggatcagcagagatgccatttgacaatgtgggtcttaccattcctgatatcaagttgattgcgtatataggtgatgatgcccttcatttgagtcaccttcaaccgctggccaagcgcgacagatcgattcttaagggattgtgtgcccaaaagcatgtaataggtgatgaacaattgagggagaacatacatttcatgatgaacaggggcttaaaatgcaaaatcgaagctttatattatcttcagtaccctcctactgactacatccgcaaagcagtaggcaatctggaggacatctaagtagctcgttgtgtttaactttggtagagagacatctatgtagtttgccatgttgactttagaggataatcttctaagttagttcatgttgggtgtgcaaactatggttactactagattgtgcatgcacttatgttgtcacaatctaggttattaatgctccagattcc

SEQ ID NO: 10235 - protein, 401 aa, Triticum aestivum
  misc_feature (1)..(401): Ceres Seq. ID no. 13584806
MAAAEETAVGTAAEGSDLRSFFSTRGVAADLAALDDQTLKALDEKYIIARDLDAATVLSKIHHLVGHSEASIVPYEGLSYQLPCRDPGQHEYDPTLRQLCLRRGKVETCTVGDPRTSRKAEIITATLSLVKKTVLSGHRSFSDGLRYGDEVFKQDKKTVDDALLDICCLLECPRASLKMLELGPGTVVGPLIFTMEDGAENHCRSFGPSGARVHEGISNITVEQGATVNFILLVQRDDVFWDFARSQLRHELNCVVMTGGDGEPNVMTRAFLRKLKDCLSVPVYALTDSDPEGISIFCTYKFGSAEMPFDNVGLTIPDIKLIAYIGDDALHLSHLQPLAKRDRSILKGLCAQKHVIGDEQLRENIHFMMNRGLKCKIEALYYLQYPPTDYIRKAVGNLEDI

SEQ ID NO: 10236 - protein, 223 aa, Triticum aestivum
  misc_feature (1)..(223): Ceres Seq. ID no. 13584807
MLELGPGTVVGPLIFTMEDGAENHCRSFGPSGARVHEGISNITVEQGATVNFILLVQRDDVFWDFARSQLRHELNCVVMTGGDGEPNVMTRAFLRKLKDCLSVPVYALTDSDPEGISIFCTYKFGSAEMPFDNVGLTIPDIKLIAYIGDDALHLSHLQPLAKRDRSILKGLCAQKHVIGDEQLRENIHFMMNRGLKCKIEALYYLQYPPTDYIRKAVGNLEDI

SEQ ID NO: 10237 - protein, 207 aa, Triticum aestivum
  misc_feature (1)..(207): Ceres Seq. ID no. 13584808
MEDGAENHCRSFGPSGARVHEGISNITVEQGATVNFILLVQRDDVFWDFARSQLRHELNCVVMTGGDGEPNVMTRAFLRKLKDCLSVPVYALTDSDPEGISIFCTYKFGSAEMPFDNVGLTIPDIKLIAYIGDDALHLSHLQPLAKRDRSILKGLCAQKHVIGDEQLRENIHFMMNRGLKCKIEALYYLQYPPTDYIRKAVGNLEDI

SEQ ID NO: 10238 - DNA, 1395 bp, Triticum aestivum
  misc_feature (1)..(1395): Ceres Seq. ID no. 13584933
atctgaatgctagaaggaggtggttggacgatgaggcatcccaacacggtagaaggagttccgcctatcgaagttgagagggccaatttgaaaaaaagaaaaagttgagagggacagagagggaaacatctgggcattctcgttgcagaaagtagagcgctgtacaaacgggccttcacgaaccaagagacatccatcaaatttcatggcgtcctctccacaatcctcctcctctgcacccaaagccgacgacaaggcagcgtcccacaaagaaatctacgaccagctactagaggtcgtgtccacctacccgacggcgcctagcggcatcggccgcccgtacacccaccacccagacggctggtacgcgttcacgccggccgtcgtgaacgccatggtcatcaagcggcacctcaaggcgtgcgacaccgacgtcttcctctccacctttcccaagtccggcaccacctggctcaaggcgctcctgtttgcgaccctccgccgcaccgcggacgggccagcgatcgcggcgctcgcagcccacagcccccaccagctcatccctttcctcgaggtccaggttttcagcaacggccggatcccagacctgagctccctccctgcgccgcggctcctgatgacgcacatcccgtcccggtcgctgccggagtccgtggccgcctccggctgcaaggtggtgtacctgtgccgggaccccaaggactgcttcgtgtcgctctggcacttctggaaccggttcgcgccgtcgccgtgggacctcggtgaggcgctccagcagttctgcgacggcgtctccctgttcgggcctttctgggagcacgtgctgggctactggcgctggcatgtggagaggccggagcaggttctattcctgacctacgaggagctcgccgccgacaccctcggccagctgaagcggctcgctgcgtttctcgggcgcccgttcacgtcagaggagcgggaagccagggtagacagggagatcgtggaggcatgcgccatggagagcctggcgggactggaggtgaaccgctccgggaagacggacatgaccgagtcttcagtggcgaacaacatattcttccggcgcggcgtcgttggcgactggaagaaccacctgacgccggagatggctagaaggatcgatgagatcaccgatagcaagttcagaggatcggggttggcgttgacgccggcaaccgcagatcagaactagtgggttcatgatggcagatgctatataaataaggacgacttgcgcaacatttttataaaatattgtactattaatgtcaggcatgataacttgatcagcaaacatgcgaagggaaataacagaagtgttaccatacagtaatatacatgaatatcgtt

SEQ ID NO: 10239 - protein, 343 aa, Triticum aestivum
  misc_feature (1)..(343): Ceres Seq. ID no. 13584934
MASSPQSSSSAPKADDKAASHKEIYDQLLEVVSTYPTAPSGIGRPYTHHPDGWYAFTPAVVNAMVIKRHLKACDTDVFLSTFPKSGTTWLKALLFATLRRTADGPAIAALAAHSPHQLIPFLEVQVFSNGRIPDLSSLPAPRLLMTHIPSRSLPESVAASGCKVVYLCRDPKDCFVSLWHFWNRFAPSPWDLGEALQQFCDGVSLFGPFWEHVLGYWRWHVERPEQVLFLTYEELAADTLGQLKRLAAFLGRPFTSEEREARVDREIVEACAMESLAGLEVNRSGKTDMTESSVANNIFFRRGVVGDWKNHLTPEMARRIDEITDSKFRGSGLALTPATADQN

SEQ ID NO: 10240 - protein, 280 aa, Triticum aestivum
  misc_feature (1)..(280): Ceres Seq. ID no. 13584935
MVIKRHLKACDTDVFLSTFPKSGTTWLKALLFATLRRTADGPAIAALAAHSPHQLIPFLEVQVFSNGRIPDLSSLPAPRLLMTHIPSRSLPESVAASGCKVVYLCRDPKDCFVSLWHFWNRFAPSPWDLGEALQQFCDGVSLFGPFWEHVLGYWRWHVERPEQVLFLTYEELAADTLGQLKRLAAFLGRPFTSEEREARVDREIVEACAMESLAGLEVNRSGKTDMTESSVANNIFFRRGVVGDWKNHLTPEMARRIDEITDSKFRGSGLALTPATADQN

SEQ ID NO: 10241 - protein, 199 aa, Triticum aestivum
  misc_feature (1)..(199): Ceres Seq. ID no. 13584936
MTHIPSRSLPESVAASGCKVVYLCRDPKDCFVSLWHFWNRFAPSPWDLGEALQQFCDGVSLFGPFWEHVLGYWRWHVERPEQVLFLTYEELAADTLGQLKRLAAFLGRPFTSEEREARVDREIVEACAMESLAGLEVNRSGKTDMTESSVANNIFFRRGVVGDWKNHLTPEMARRIDEITDSKFRGSGLALTPATADQN

SEQ ID NO: 10242 - DNA, 846 bp, Triticum aestivum
  misc_feature (1)..(846): Ceres Seq. ID no. 13585022
ctcaactcaaaccaccggcattagtcactcctcttcactccaaaccagcgagtaacactccaaacagccaatggcgttccccaagcccctggcggctctcctcctcgccgtggcgctggcagcgactgccatgtccgccgccggtcaggatccccaaaactgcaagccgagccgcaaggtgacggtgcagaacctgtgcggcaaggacctttacctcggcatcgagccgctggccaacagcaagctcctctacagccctggctacctgctccgccacggcacccacgtgtcgtacgacgtgtgctcgtggacggggcgcgtgaaggtgcaggacgccgtggtgacggagtttcacatcgggtacgacggcggggcgtggtaccaggtgagcaccgaccagtcccacatgcccatccgtgtctccatcaccccccacggccaccccctgaaagaccactgccccaccgccggctgcaacagcggtggccactgcttcgagcactccgtccccggcggcaagtgccacggcgtcgacgagatcaagatcgtcttctacaacccctagatccagctgctgggcgtgtttaataagtttgcagctcggtgatcttagtcgtattgcagctgctagtcagtgaatcatctgctccaacgagctattgtcgtgtcgtgtcgtgtcgatttactgttcaattagtagttgcggtggtgaatgtgtggctagagatgtttcatagccgtgcaatgaactgcatgtcgtcagctctgtatccgtcgttggtgtgttgtgtgttttctagtttataaatccgatttaaaatgtggctgggtcaccgaactgatgtc

SEQ ID NO: 10243 - protein, 164 aa, Triticum aestivum
  misc_feature (1)..(164): Ceres Seq. ID no. 13585023
MAFPKPLAALLLAVALAATAMSAAGQDPQNCKPSRKVTVQNLCGKDLYLGIEPLANSKLLYSPGYLLRHGTHVSYDVCSWTGRVKVQDAVVTEFHIGYDGGAWYQVSTDQSHMPIRVSITPHGHPLKDHCPTAGCNSGGHCFEHSVPGGKCHGVDEIKIVFYNP

SEQ ID NO: 10244 - protein, 144 aa, Triticum aestivum
  misc_feature (1)..(144): Ceres Seq. ID no. 13585024
MSAAGQDPQNCKPSRKVTVQNLCGKDLYLGIEPLANSKLLYSPGYLLRHGTHVSYDVCSWTGRVKVQDAVVTEFHIGYDGGAWYQVSTDQSHMPIRVSITPHGHPLKDHCPTAGCNSGGHCFEHSVPGGKCHGVDEIKIVFYNP

SEQ ID NO: 10245 - DNA, 1401 bp, Triticum aestivum
  misc_feature (1)..(1401): Ceres Seq. ID no. 13585143
aaagctgagagcagttcgtcaataaataagttctccagaaaccccgaaaccccgcgaccaccgcctcgccgcttacacgaccgagtgcgccgacggacgacacctccactaccgcctgtcgcccctcgccgcgcgcgaccgacgcccaccgcgttacgatggtgaccgacgcggccgcgctggcggtcgtgaaggccgcgcgccccgtcttccgcggcgcccacgacggcgtggcgttcgccgcaaacgccgccttcctcgccgccggatactccttatgcgccgtcggccctgccgcgctcgccgaccccctccccgcagttgacgaggaggtgggaattgatgggtggaacactatggacaattgctatgcctttctgtactccaaggaggaggagggcaagaagaagcgcattttagtgaaatgtctagtgattgatgacttccttgctattgatgcgctggatcttgaggcacaacacaaggaaccctgcaatgttcagataaatgtgaaggatttcttctctgaagaacagcccaagaattataaggatatgtacaagaattttgcgggcttcatcaatacccttaactcaagcttgttagttgaattggatggtaagaatgctgctgctgctgccgcccagaagcctgatcttgagggcagttcatcaataaacagttctgaaaatgttctgccggatacaaggactactgaacctgctggcctgatatatcctccagtagctccgtttggtcatgatgacaccttccctgctcctggtgctggcttctaccctcacagtggtgggccgggtggtagtatgcacgttggcccaaatgatccacgcttctttccttcaaatccttttcctgctccttttggtggccctgggagtgttccacctggtgtccgttacgatccaatcggcccgcccgatgttccaggatttgaaccatctcgctttgtgaggcgttcgaggcatccaggtggaagcactcacccagacctcgagttcttccagcaaggcccagacttctgagactcggcttcatgccacctgcaccctgcgctgaatgactctgctttgtttgtgctgcgctcatgaactttttttcagtagaccctgcttgggaagttggaaacatgaatgtaaacttttgtatttaccttccagacaatgctttgtgacggttgactgtacaattgtatatagacctgtcttcgtatccctctgtgcttcttacctaaactattggtgcgactaccaacatctgcaatgtctgcctcgtagttatccagtagccccaaaatttgctcgcagtttctccgtatgcagtatcaccgcaaaatgttcctctgtatctacgggcgctccaagcgaaatcttgttttaatat

SEQ ID NO: 10246 - protein, 294 aa, Triticum aestivum
  misc_feature (1)..(294): Ceres Seq. ID no. 13585144
MVTDAAALAVVKAARPVFRGAHDGVAFAANAAFLAAGYSLCAVGPAALADPLPAVDEEVGIDGWNTMDNCYAFLYSKEEEGKKKRILVKCLVIDDFLAIDALDLEAQHKEPCNVQINVKDFFSEEQPKNYKDMYKNFAGFINTLNSSLLVELDGKNAAAAAAQKPDLEGSSSINSSENVLPDTRTTEPAGLIYPPVAPFGHDDTFPAPGAGFYPHSGGPGGSMHVGPNDPRFFPSNPFPAPFGGPGSVPPGVRYDPIGPPDVPGFEPSRFVRRSRHPGGSTHPDLEFFQQGPDF

SEQ ID NO: 10247 - protein, 228 aa, Triticum aestivum
  misc_feature (1)..(228): Ceres Seq. ID no. 13585145
MDNCYAFLYSKEEEGKKKRILVKCLVIDDFLAIDALDLEAQHKEPCNVQINVKDFFSEEQPKNYKDMYKNFAGFINTLNSSLLVELDGKNAAAAAAQKPDLEGSSSINSSENVLPDTRTTEPAGLIYPPVAPFGHDDTFPAPGAGFYPHSGGPGGSMHVGPNDPRFFPSNPFPAPFGGPGSVPPGVRYDPIGPPDVPGFEPSRFVRRSRHPGGSTHPDLEFFQQGPDF

SEQ ID NO: 10248 - protein, 162 aa, Triticum aestivum
  misc_feature (1)..(162): Ceres Seq. ID no. 13585146
MYKNFAGFINTLNSSLLVELDGKNAAAAAAQKPDLEGSSSINSSENVLPDTRTTEPAGLIYPPVAPFGHDDTFPAPGAGFYPHSGGPGGSMHVGPNDPRFFPSNPFPAPFGGPGSVPPGVRYDPIGPPDVPGFEPSRFVRRSRHPGGSTHPDLEFFQQGPDF

SEQ ID NO: 10249 - DNA, 545 bp, Triticum aestivum
  misc_feature (1)..(545): Ceres Seq. ID no. 13585240
gcaccaacaaccccacccaacaccgagataccccaaaggcccaaagacccgacagattcgcgagagctcgagagagtgcgaccaaaatggcgatgagatgcgcgctgacctcgctccccgcgcgcctccggtccccggcggtggtagccagcgggacgcggcgccttctgagtgacgggaaggggcgcgtgctcagcgaggaggagcgcgccaaggagaacgtctacatccagaagatggagagggagaggcaggagaagctcaagaaaaagctcgaacaggagaaggatgcggccgacaaggctaagtccggcgccgacggcaagaaggccgagggaactaactaggagcgatcttcgcctgcctgaaggtgaccccatcttggacgcatccgggggacatttgtgtttatagatgtccagagatggaagaataaattctgtaaagcgttgatagcgctatctttgctttgttttcggtttgccgcgcttgttcaggatataatccagggaccataaacattgataactgggaactttgtatct

SEQ ID NO: 10250 - protein, 114 aa, Triticum aestivum
  misc_feature (1)..(114): Ceres Seq. ID no. 13585241
TNNPTQHRDTPKAQRPDRFARARESATKMAMRCALTSLPARLRSPAVVASGTRRLLSDGKGRVLSEEERAKENVYIQKMERERQEKLKKKLEQEKDAADKAKSGADGKKAEGTN

SEQ ID NO: 10251 - protein, 86 aa, Triticum aestivum
  misc_feature (1)..(86): Ceres Seq. ID no. 13585242
MAMRCALTSLPARLRSPAVVASGTRRLLSDGKGRVLSEEERAKENVYIQKMERERQEKLKKKLEQEKDAADKAKSGADGKKAEGTN

SEQ ID NO: 10252 - protein, 84 aa, Triticum aestivum
  misc_feature (1)..(84): Ceres Seq. ID no. 13585243
MRCALTSLPARLRSPAVVASGTRRLLSDGKGRVLSEEERAKENVYIQKMERERQEKLKKKLEQEKDAADKAKSGADGKKAEGTN

SEQ ID NO: 10253 - DNA, 1340 bp, Triticum aestivum
  misc_feature (1)..(1340): Ceres Seq. ID no. 13585282
cacacccgccgccgccgccgccgtctccctccctccctctctctcccccccgacgccgccggctccaagccacatcccaccccgccccgccgtcacccggtctctcgtctcctgcggcggtccgcctccattcgcctctcgttcgcttcgcagacgcgttcttccgtccgcctagcgggctcgctggggagagcggcagcagccatggccatcgggtctctcgtcgcagccgcgtccaggtccagccgccacgccctcgcctccgccgccatctcccaggcggcttacagggcgcgccagcacgccggagtgcctcctctgctctcgcggcttgcaccactcgcccgcgccttcagctcaagccctgcagcagccgatgtcgattcagatctccctgtcatggaagtgcagaaacggcgggtgggcaaaaaggccaagggcgcgaaaagcggaaaagccatgatgttcccactccatttccactatgaagatgtgttgcgtgaggatctgttgctcaaactgaaccacaccaacaccatggaggtccctggattgtttgagatccgactggtgcccaagtctaccaccggtgccaaaatccagtttgggaaactggccatggagattctgtgcggccagaggtgcatacaggcagaactgcctgcccatctgaaagggaaggcgaccaacgcatacctggggtcccagaaagacgccgtgtccctgaggcagagcatcatccgagggcacgggatgtacaacttcctggtcagggtcctgacggtgatgtctatgctggactccaaggtggcgatcgagcaggggaactgcgtaaagttcttcatggccacggagttctgcgagttctcccccgagatagaggaccactttgagatctttgagaccatcggagggttcaacgtgaccatcgtcaccacggcctgctcgaaggaggagacctcgctgctgtggagcggcttcttgctcaaggatgaaggtgagatcagctaagtaagatgctggatgagatcatgagcattgtgactaaagacaaactctggtggaagcttctatcgttttgtgatccgatctttgctagctagagtcaatggccagcttttctttctagagcaatcttgttccggaatgaaactgagttcccctgttatgtctatcttcagaagaggctcgtttttcttctgatatgcagagattcattggtttctacggtttcaaaaaaattctagatggtgatcctcctagttttgtatcctgataggctttggtcatcctcttcatgtgaagagaactaaataataatgcatttgattaaatctgcg

SEQ ID NO: 10254 - protein, 336 aa, Triticum aestivum
  misc_feature (1)..(336): Ceres Seq. ID no. 13585283
HTRRRRRRLPPSLSLPPDAAGSKPHPTPPRRHPVSRLLRRSASIRLSFASQTRSSVRLAGSLGRAAAAMAIGSLVAAASRSSRHALASAAISQAAYRARQHAGVPPLLSRLAPLARAFSSSPAAADVDSDLPVMEVQKRRVGKKAKGAKSGKAMMFPLHFHYEDVLREDLLLKLNHTNTMEVPGLFEIRLVPKSTTGAKIQFGKLAMEILCGQRCIQAELPAHLKGKATNAYLGSQKDAVSLRQSIIRGHGMYNFLVRVLTVMSMLDSKVAIEQGNCVKFFMATEFCEFSPEIEDHFEIFETIGGFNVTIVTTACSKEETSLLWSGFLLKDEGEIS

SEQ ID NO: 10255 - protein, 268 aa, Triticum aestivum
  misc_feature (1)..(268): Ceres Seq. ID no. 13585284
MAIGSLVAAASRSSRHALASAAISQAAYRARQHAGVPPLLSRLAPLARAFSSSPAAADVDSDLPVMEVQKRRVGKKAKGAKSGKAMMFPLHFHYEDVLREDLLLKLNHTNTMEVPGLFEIRLVPKSTTGAKIQFGKLAMEILCGQRCIQAELPAHLKGKATNAYLGSQKDAVSLRQSIIRGHGMYNFLVRVLTVMSMLDSKVAIEQGNCVKFFMATEFCEFSPEIEDHFEIFETIGGFNVTIVTTACSKEETSLLWSGFLLKDEGEIS

SEQ ID NO: 10256 - protein, 203 aa, Triticum aestivum
  misc_feature (1)..(203): Ceres Seq. ID no. 13585285
MEVQKRRVGKKAKGAKSGKAMMFPLHFHYEDVLREDLLLKLNHTNTMEVPGLFEIRLVPKSTTGAKIQFGKLAMEILCGQRCIQAELPAHLKGKATNAYLGSQKDAVSLRQSIIRGHGMYNFLVRVLTVMSMLDSKVAIEQGNCVKFFMATEFCEFSPEIEDHFEIFETIGGFNVTIVTTACSKEETSLLWSGFLLKDEGEIS

SEQ ID NO: 10257 - DNA, 524 bp, Triticum aestivum
  misc_feature (1)..(524): Ceres Seq. ID no. 13585343
acgaaccaacccagtccctcctacatattcagtcagtctttgcaaccaatcctcgccaaccagacgcaagcatgaggccacaggtgctgctcgccgcgctggccgtcatcgccgtcctcgcagcagctctgcctctcgcccatagccaaggcgcgacgctgtgctgcgacaactgcggctcctgcaccaggtccatcccacctcagtgcacatgcatggacacctcaccaaccgggtgcaacccggcctgcaagacctgctcgaggtccaccgtcggcggccgcaacagcttccagtgcaaggaccgcgtcgccaacttctgcaagacccgctgcactaacgccgcgtgattggacctgttgtcgcccgaataatgccgattagcttgtgcttttcctttattttttgcagtctttaagagttccctctgcatcttgatctggtagatgcagagaagaaatgagggttcgatgcatgctcatcattccttcttgtgtctgaaataaagagcatattctttgctt

SEQ ID NO: 10258 - protein, 115 aa, Triticum aestivum
  misc_feature (1)..(115): Ceres Seq. ID no. 13585344
EPTQSLLHIQSVFATNPRQPDASMRPQVLLAALAVIAVLAAALPLAHSQGATLCCDNCGSCTRSIPPQCTCMDTSPTGCNPACKTCSRSTVGGRNSFQCKDRVANFCKTRCTNAA

SEQ ID NO: 10259 - protein, 92 aa, Triticum aestivum
  misc_feature (1)..(92): Ceres Seq. ID no. 13585345
MRPQVLLAALAVIAVLAAALPLAHSQGATLCCDNCGSCTRSIPPQCTCMDTSPTGCNPACKTCSRSTVGGRNSFQCKDRVANFCKTRCTNAA

SEQ ID NO: 10260 - DNA, 760 bp, Triticum aestivum
  misc_feature (1)..(760): Ceres Seq. ID no. 13585373
gtggaccttttgtactagtacttcagacagacagaagcagaagcaaccagccgaagctcgttcctcgtagacagttggacagtcgtctcgatccatcgtccatcccgtctcgccagcagccgaccatggccgcgcaggcgccgccgccgccgccgccggagcagaagatgatggtggccatcgacgagagcgagtgcagccactacgcgctcgagtgggccctgcgcaacctcgcgccccgccgcctcatcctcttcaccgtccagcccttctcccctctcagctacctccccgtcggctccccgcttggcccgtcggtggcgtcgccggagctcatcaggtcggtgaccgagcaccagcggcagctcgcccaggcgctcgtcgacaaggccaaggccatctgcgccgagcacggggttgatgcagagaccgtcatcgaggtgggtgatcccaaggaaaccatatgcgaagctgcggagaagttgaatgttgatctgctcatcctgggaagccacagccgtgggcctgtacaaaggtttttccttggcagtgtgagcaactactgtagccaccacgcgaagtgcccggttcttgttgtgaagaagaaagaatgaaactccgctatctactgtattcatggacatcgtgtgaagaacccttgagatgtgtatctacatgttgtttgtcacagcatctagttgcatacttgcatatgaataaacatactttgccaatttgaaaacaactatatattcagtct

SEQ ID NO: 10261 - protein, 203 aa, Triticum aestivum
  misc_feature (1)..(203): Ceres Seq. ID no. 13585374
GPFVLVLQTDRSRSNQPKLVPRRQLDSRLDPSSIPSRQQPTMAAQAPPPPPPEQKMMVAIDESECSHYALEWALRNLAPRRLILFTVQPFSPLSYLPVGSPLGPSVASPELIRSVTEHQRQLAQALVDKAKAICAEHGVDAETVIEVGDPKETICEAAEKLNVDLLILGSHSRGPVQRFFLGSVSNYCSHHAKCPVLVVKKKE

SEQ ID NO: 10262 - protein, 162 aa, Triticum aestivum
  misc_feature (1)..(162): Ceres Seq. ID no. 13585375
MAAQAPPPPPPEQKMMVAIDESECSHYALEWALRNLAPRRLILFTVQPFSPLSYLPVGSPLGPSVASPELIRSVTEHQRQLAQALVDKAKAICAEHGVDAETVIEVGDPKETICEAAEKLNVDLLILGSHSRGPVQRFFLGSVSNYCSHHAKCPVLVVKKKE

SEQ ID NO: 10263 - protein, 148 aa, Triticum aestivum
  misc_feature (1)..(148): Ceres Seq. ID no. 13585376
MMVAIDESECSHYALEWALRNLAPRRLILFTVQPFSPLSYLPVGSPLGPSVASPELIRSVTEHQRQLAQALVDKAKAICAEHGVDAETVIEVGDPKETICEAAEKLNVDLLILGSHSRGPVQRFFLGSVSNYCSHHAKCPVLVVKKKE

SEQ ID NO: 10264 - DNA, 1412 bp, Triticum aestivum
  misc_feature (1)..(1412): Ceres Seq. ID no. 13585382
gaaaatcccccttccattcctcctcccctccttgtccccaccctctctctctctctctccctccgtctgtccgtccgcgcgcgctctgcgttcttggggagggaggaaatggcggcaaagcgcgagctggtggtcagcttcggggagatgctgatagacttcgtgccgacggtggccggggtgtcgctggcggaggcgccggccttcgtcaaggcgcccgggggcgcccccgccaacgtcgccatcgccgtcgcgcgcctcggcggcggggccgccttcgtcggcaagctcggcgacgacgagttcggccgcatgctcgccaaaatcctccgcgaaaacggcgtcgacgccggcggcgtcgtcttcgactcgggcgcgcgcaccgcgctcgccttcgtcacgctccgcgccgacggggagcgcgagttcatgttctaccgcaaccccagcgccgacatgctcctcaccgccgacgagctcaaggtcgacgtcatcaagagggctgcagtcttccactatggatcaataagcttgatcgccgagccttgccggacagcgcatctgcacgccatgaaggttgccaaagaggccggcgcgcttctctcgtatgacccgaacctgagggaggcattgtggccctcccttgaggaggctcgcaccaagatcttgagcatctgggaccaggcagacattgtcaaggtcagcgaggtcgagcttgagtttttgactggcatcaactcggtggaggatgatgttgccatgaagctgtggcgccctacctttaagctcatgcttgtcactcttggagatcaaggatgcaagtactataccaaggatttccgtggaactgtcccatcctacaaggtacagcaagttgatacgacaggtgctggtgatgcatttattggttctctgctccgaaaaattgtccaagatccatcggcattgcaagataaaacaaagcttgagggggcgatcaaatttgccaatgcatgtggagcaatcaccgccacgaagaaaggggcaatcccttcattgcccaaggaagacgaggtgttgcggctgatggagaaggcgtagacgcggcttatgatttccagtagcttcgaattctgcaaattgtattgtaagctgttctggatcaggagcaaggtgtactcctcccaggatgcccctgcctttttgtttgctcccctttacgaaagggtttttgttttggaattcttctcatctgaataagcagatccttcaatattactgtgtcatttctgtaccaagtccttgatggtagtgttcttttttccttgttctgtcatcttatttgggttccaactgtattgggaatttgtggtttagcccctgaggtggtttctgttctcaattttcgacaagtgaaacgcatgtacaacgcc

SEQ ID NO: 10265 - protein, 359 aa, Triticum aestivum
  misc_feature (1)..(359): Ceres Seq. ID no. 13585383
ENPPSIPPPLLVPTLSLSLSLRLSVRARSAFLGREEMAAKRELVVSFGEMLIDFVPTVAGVSLAEAPAFVKAPGGAPANVAIAVARLGGGAAFVGKLGDDEFGRMLAKILRENGVDAGGVVFDSGARTALAFVTLRADGEREFMFYRNPSADMLLTADELKVDVIKRAAVFHYGSISLIAEPCRTAHLHAMKVAKEAGALLSYDPNLREALWPSLEEARTKILSIWDQADIVKVSEVELEFLTGINSVEDDVAMKLWRPTFKLMLVTLGDQGCKYYTKDFRGTVPSYKVQQVDTTGAGDAFIGSLLRKIVQDPSALQDKTKLEGAIKFANACGAITATKKGAIPSLPKEDEVLRLMEKA

SEQ ID NO: 10266 - protein, 323 aa, Triticum aestivum
  misc_feature (1)..(323): Ceres Seq. ID no. 13585384
MAAKRELVVSFGEMLIDFVPTVAGVSLAEAPAFVKAPGGAPANVAIAVARLGGGAAFVGKLGDDEFGRMLAKILRENGVDAGGVVFDSGARTALAFVTLRADGEREFMFYRNPSADMLLTADELKVDVIKRAAVFHYGSISLIAEPCRTAHLHAMKVAKEAGALLSYDPNLREALWPSLEEARTKILSIWDQADIVKVSEVELEFLTGINSVEDDVAMKLWRPTFKLMLVTLGDQGCKYYTKDFRGTVPSYKVQQVDTTGAGDAFIGSLLRKIVQDPSALQDKTKLEGAIKFANACGAITATKKGAIPSLPKEDEVLRLMEKA

SEQ ID NO: 10267 - protein, 310 aa, Triticum aestivum
  misc_feature (1)..(310): Ceres Seq. ID no. 13585385
MLIDFVPTVAGVSLAEAPAFVKAPGGAPANVAIAVARLGGGAAFVGKLGDDEFGRMLAKILRENGVDAGGVVFDSGARTALAFVTLRADGEREFMFYRNPSADMLLTADELKVDVIKRAAVFHYGSISLIAEPCRTAHLHAMKVAKEAGALLSYDPNLREALWPSLEEARTKILSIWDQADIVKVSEVELEFLTGINSVEDDVAMKLWRPTFKLMLVTLGDQGCKYYTKDFRGTVPSYKVQQVDTTGAGDAFIGSLLRKIVQDPSALQDKTKLEGAIKFANACGAITATKKGAIPSLPKEDEVLRLMEKA

SEQ ID NO: 10268 - DNA, 961 bp, Triticum aestivum
  misc_feature (1)..(961): Ceres Seq. ID no. 13585404
ctatcctctctctctctccagcatcctctttctctccttcctcccatggagtcggcatagccactagccggttctgcccgttgagagcgctcatataccctccacacctccagatctgtggcctgttgtagtctctgcctcctcagaacaacaagcccccgcagccgcgcccggatcggatggacaccgccatgcaccccgccggcgccgacgacggcggcctcgccgacccgctcaccggcaacgcgggcacaggcaccgagggcattatttgtggtatgccagacttcaagatgggtggaaagaggggcgatgaatctgcccctactgatgctggtgatgaagacggcgaagatgatgacggggatgaggatggtgacttcgcggagggcgaagaggaaatctcggaaggagaggagtatgacaaccccaaggccagtgacgccaagaagaaacaaataggcgagggtgaggagaatggcgaggatgatgaggaagaacaagaggagcaggagggtggaggaggtgacgacgatgatgatgacgacgacaacgacgatgacaatgaggacgacgacgatgatgacgatgatgtcgctgctgaagacgatggagatggagtagaagaggaggatgatgacgatgatgaggaggaggacgatgaggactcgctccagcccccgaagaagaggaagaagtgaagcccttcgacgcggctgctttagtcaccatgcgacgagatgtgcctgtccttcactgtgttctggaaactttccttagagttaaaaatgcccccacacgatcacaatgtgtgggcttgtaggagcgattagagggaactttgttgtcaccgttgctttgcttctgtggagttgatcgaacagatgtttcgctaacataattgtacctgagtggcgaaagcctcaagatttgaatatgtcagtcaactctttttatctcc

SEQ ID NO: 10269 - protein, 173 aa, Triticum aestivum
  misc_feature (1)..(173): Ceres Seq. ID no. 13585405
MDTAMHPAGADDGGLADPLTGNAGTGTEGIICGMPDFKMGGKRGDESAPTDAGDEDGEDDDGDEDGDFAEGEEEISEGEEYDNPKASDAKKKQIGEGEENGEDDEEEQEEQEGGGGDDDDDDDDNDDDNEDDDDDDDDVAAEDDGDGVEEEDDDDDEEEDDEDSLQPPKKRKK

SEQ ID NO: 10270 - protein, 169 aa, Triticum aestivum
  misc_feature (1)..(169): Ceres Seq. ID no. 13585406
MHPAGADDGGLADPLTGNAGTGTEGIICGMPDFKMGGKRGDESAPTDAGDEDGEDDDGDEDGDFAEGEEEISEGEEYDNPKASDAKKKQIGEGEENGEDDEEEQEEQEGGGGDDDDDDDDNDDDNEDDDDDDDDVAAEDDGDGVEEEDDDDDEEEDDEDSLQPPKKRKK

SEQ ID NO: 10271 - protein, 140 aa, Triticum aestivum
  misc_feature (1)..(140): Ceres Seq. ID no. 13585407
MPDFKMGGKRGDESAPTDAGDEDGEDDDGDEDGDFAEGEEEISEGEEYDNPKASDAKKKQIGEGEENGEDDEEEQEEQEGGGGDDDDDDDDNDDDNEDDDDDDDDVAAEDDGDGVEEEDDDDDEEEDDEDSLQPPKKRKK

SEQ ID NO: 10272 - DNA, 1277 bp, Triticum aestivum
  misc_feature (1)..(1277): Ceres Seq. ID no. 13585433
aacatcctaatcgaaaagaaagaaaaaaaaaactcctactagggaatctgctccgggcgcacgccggccggatcgccggcctcccgccgtcggcgcaccccaggaagagagatcggctcggctcatctgaggatttgcggagggcggccatggagggggcggaagctcctctccccgtccccacggagaagctctccatggatccaaatcgggatggggggaatcgaggtggtgtggtgctggtggccaccggcagcttcaatccccccacctacatgcacctgcgcatgttcgagcttgcaaaggacgagctgcagcagcgagggtactgtgttttgggtggatacatgtcgccggtgaacgacgcctacaagaagaaggacctcttgccggctgctcaccgggttcgcctctgcgaattggcgtgccgaagctcatctttcgtgatggttgatccctgggaggcaatgcagaaaggttatcagcgcaccttgaccgttctatctcgagttaagaactctctatgcaaggatggcttagctgatcaaggtggtgtcaaggtaatgcttttgtgtggttctgaccttctcgagtcattcagcacgccaggggtttggattccagatcaggtcagggccatatgtaaagactttggtgttgtctgtattcgtagggaaggaaaagatgttcaaaagctaatatccagcagcgagacactgcaagaatgcagggataacatcatttcggttgatgagattgtgccaaatcagatcagttcatccagagtaagagaatgtataagaaaacatctctcgataaagtatcttacttgcgacgaagtaatcgggtacattagagagcacagactgtacatggaaactggagagagtgataccagatcatgacaatgttgcaagcctttcggaacgaccgtcgagcatggactgtgccgccttgggcttcaatgttatgataaaatctgaactatcagcgacaagctgcgattatcatgaatgggtccgactgcctttgaagcatcatgaatggatgcaaatgtatggagaccagtaggctatacacaatacttgctactagaaggttcttgaatcttccttacattgttgtcaatgtatcggtctttcgaccaacagaatatatcgctaataaagcatttatatgacatgaaactctttgtcacagtaatattctgccatttgtttcatcctctatatgtaccaagatattattcagtaagtaatttgatgtgctacaaattc

SEQ ID NO: 10273 - protein, 300 aa, Triticum aestivum
  misc_feature (1)..(300): Ceres Seq. ID no. 13585434
HPNRKERKKKLLLGNLLRAHAGRIAGLPPSAHPRKRDRLGSSEDLRRAAMEGAEAPLPVPTEKLSMDPNRDGGNRGGVVLVATGSFNPPTYMHLRMFELAKDELQQRGYCVLGGYMSPVNDAYKKKDLLPAAHRVRLCELACRSSSFVMVDPWEAMQKGYQRTLTVLSRVKNSLCKDGLADQGGVKVMLLCGSDLLESFSTPGVWIPDQVRAICKDFGVVCIRREGKDVQKLISSSETLQECRDNIISVDEIVPNQISSSRVRECIRKHLSIKYLTCDEVIGYIREHRLYMETGESDTRS

SEQ ID NO: 10274 - protein, 251 aa, Triticum aestivum
  misc_feature (1)..(251): Ceres Seq. ID no. 13585435
MEGAEAPLPVPTEKLSMDPNRDGGNRGGVVLVATGSFNPPTYMHLRMFELAKDELQQRGYCVLGGYMSPVNDAYKKKDLLPAAHRVRLCELACRSSSFVMVDPWEAMQKGYQRTLTVLSRVKNSLCKDGLADQGGVKVMLLCGSDLLESFSTPGVWIPDQVRAICKDFGVVCIRREGKDVQKLISSSETLQECRDNIISVDEIVPNQISSSRVRECIRKHLSIKYLTCDEVIGYIREHRLYMETGESDTRS

SEQ ID NO: 10275 - protein, 235 aa, Triticum aestivum
  misc_feature (1)..(235): Ceres Seq. ID no. 13585436
MDPNRDGGNRGGVVLVATGSFNPPTYMHLRMFELAKDELQQRGYCVLGGYMSPVNDAYKKKDLLPAAHRVRLCELACRSSSFVMVDPWEAMQKGYQRTLTVLSRVKNSLCKDGLADQGGVKVMLLCGSDLLESFSTPGVWIPDQVRAICKDFGVVCIRREGKDVQKLISSSETLQECRDNIISVDEIVPNQISSSRVRECIRKHLSIKYLTCDEVIGYIREHRLYMETGESDTRS

SEQ ID NO: 10276 - DNA, 1031 bp, Triticum aestivum
  misc_feature (1)..(1031): Ceres Seq. ID no. 13585449
atttgcatttgatcacgcctctcaagtctacgcccatccgtctcacagcctctcggtctgggagacatcggctcaaagattactggagaaatggagacgagcgtgatcgtcctgtccgtcgtggtaggattgctcggggtcggaagcgccgtgctggggttcatcgccgagggcaccaagctcgagcggaatgacatcggggtgtccaagaccgagtgcgtgtaccccggcaacccggcgttcgcgctggggctggtcgcggcgctcctgctgctggcggcccagatcaccgtctcggccgccggccgctgctgcggctgctgcaagccccggggcgccgccttctccgcgtccaggcggaacatcggcgtcgtcttcgccgtcctctcatgggtggcgacggtgatcgcggagatctacttcgtgcagggcgcggcgtggaacgcgccggtgacgcgcgaggtcaacacggggtgctacttcgtcagggacggcgtgttcaggagggcggccatcctgagcatcatcgcaaccgtgctcgggatcaagtcctacttcttgcttcgcgccgctgcggccacggcggcggcggcggctgctgctgtgccaggatacccgggggccgtggcggggccgtcgttggcgggcgagcccaagcccgacgggatcgcgatgggtcaccctgctccgatgtacgggcaggcgccgtacgcgcactaccctccgcctccgaacgcgcaggggtacgggcagtacccgccccctccaaacgcgcaggggtatggacagtaccctcctcctgctcaggggtacgggcacggacactgattccagcccgctgctccccctcagggtcaaggatacgggcaagccgtgtagattgatcactggcctatgtgcaggcgtgctatgttcttctgtctctagtagaattctgctgcgtaaatcaccacacgggtcacggctcgtaggctgttcccgttgtggtgaatgatgatcgtctctgcttggaagtgcaaatttgagctttg

SEQ ID NO: 10277 - protein, 245 aa, Triticum aestivum
  misc_feature (1)..(245): Ceres Seq. ID no. 13585450
METSVIVLSVVVGLLGVGSAVLGFIAEGTKLERNDIGVSKTECVYPGNPAFALGLVAALLLLAAQITVSAAGRCCGCCKPRGAAFSASRRNIGVVFAVLSWVATVIAEIYFVQGAAWNAPVTREVNTGCYFVRDGVFRRAAILSIIATVLGIKSYFLLRAAAATAAAAAAAVPGYPGAVAGPSLAGEPKPDGIAMGHPAPMYGQAPYAHYPPPPNAQGYGQYPPPPNAQGYGQYPPPAQGYGHGH

SEQ ID NO: 10278 - protein, 164 aa, Triticum aestivum
  misc_feature (1)..(164): Ceres Seq. ID no. 13585451
MGGDGDRGDLLRAGRGVERAGDARGQHGVLLRQGRRVQEGGHPEHHRNRARDQVLLLASRRCGHGGGGGCCCARIPGGRGGAVVGGRAQARRDRDGSPCSDVRAGAVRALPSASERAGVRAVPAPSKRAGVWTVPSSCSGVRARTLIPARCSPSGSRIRASRVD

SEQ ID NO: 10279 - DNA, 1945 bp, Triticum aestivum
  misc_feature (1)..(1945): Ceres Seq. ID no. 13585454
atcactcgacacatcgacccttgactcgagtagacgcaacaacagcaccgacttgaccaaagtaacttccttctcggcatgagcggctcatcagccattgcccttgcaatccgcccaacctcgcatccctttccccgaggagtggcagagctcgcctccctcgcgtcgtcgtcctcgtcggcatgagcggtttcctcgctgtggccggcaagattgtcacgttcctgctgtgggtgctcttcctggtcctgcagacagccaccaaggttgtcgggggcctcctgcaggttgcaccgccagccgagccacaagaagagccgcaaccagaagcagcaccacgacccagatcgccgccggctgcgaggaaccgcgccggcggcggccccgcggatccatacggtccgcagtcacagctgtgggacccaccaccgcccccccacaccgctccggtgacggatgagtatcactcgtcctcgatctaccggcggcgggtgagcgccccgcaggccgctgaagatttggtggtttcctccagcagttactctcattcggccgtggcagcagcgccagcctctccggctcatgccgtctcagtgccaccagtgtcgcggacaattaagacaccggcagttgccagtaagcggcccaagctggagaggaagtactccaagattgtggaccagtaccgctccttggatgaggttattgaagcattagcgcaagctggcctcgagtcttccaatttaatcattggaattgatttcacgaaaagtaatgaatggacaggaaagagttcattcaatggtgtgagcctgcatcatattggtgatgcccccaatccttacgagcaggcaatctccatcattggacaaacactgtcagcttttgatgaggataacttaattccgtgctatggttttggagatgcatctacacatgaccaagatgtatttgccttcaaccctgacgaaagaccatgctatgggtttcaggaggctttggctcgatatagagaaattgttcctcatcttcgtctttccggtcctacatcattttctccaataattgaaatggccacaaccattgttgagcaaagcggtggccaataccatgttttagtaataattgccgatggacaagtcacacgaagtgttaacactgaatttggtcaattaagtacccaagagcagatgactgtagatgctattgtgcaagccagtgaatttcctttgtctataattctggtcggagttggagatggtccttgggacatgatgaatgaatttgatgacaacattcctgctagatcttttgacaatttccagtttgtcaacttcaccggaatcatgtcaaaaaagatcagtcaaagcaacaaggagacagagtttgctctttcagcactcatggaaatacctttgcagtacaaagcaacattacagcttggaatactggggcgtcgacttgcaaagtctccagagcgagttccacttcctcctccttttgcaagttataataccacctcaagagcagcaccatcttgggcaaataacttccgaagtgtgccttctaatcttagggaggaggcgactttagattcaacaatcacaccgtcagttacacccccaccagctgcagatgctagagcatcagaactccaattctgcccagtttgccttgccaaaccccgggacatggcatttggttgtggtcatcagacttgttcagggtgtggaccgcaggtcgtggattgccctatctgtcgaaggccaattgatacaagagtaaaactatactaacagcctcacatgcctgactaggtttgactgaagtacgctggagtgttgaaagtagaatccatggaaaagaaaaagaactccgtttgcactgtagcttgtaccataaagaaaatgaataacagttgtgtactgcacaaaaaaaaaaaaaa

SEQ ID NO: 10280 - protein, 537 aa, Triticum aestivum
  misc_feature (1)..(537): Ceres Seq. ID no. 13585455
MSGFLAVAGKIVTFLLWVLFLVLQTATKVVGGLLQVAPPAEPQEEPQPEAAPRPRSPPAARNRAGGGPADPYGPQSQLWDPPPPPHTAPVTDEYHSSSIYRRRVSAPQAAEDLVVSSSSYSHSAVAAAPASPAHAVSVPPVSRTIKTPAVASKRPKLERKYSKIVDQYRSLDEVIEALAQAGLESSNLIIGIDFTKSNEWTGKSSFNGVSLHHIGDAPNPYEQAISIIGQTLSAFDEDNLIPCYGFGDASTHDQDVFAFNPDERPCYGFQEALARYREIVPHLRLSGPTSFSPIIEMATTIVEQSGGQYHVLVIIADGQVTRSVNTEFGQLSTQEQMTVDAIVQASEFPLSIILVGVGDGPWDMMNEFDDNIPARSFDNFQFVNFTGIMSKKISQSNKETEFALSALMEIPLQYKATLQLGILGRRLAKSPERVPLPPPFASYNTTSRAAPSWANNFRSVPSNLREEATLDSTITPSVTPPPAADARASELQFCPVCLAKPRDMAFGCGHQTCSGCGPQVVDCPICRRPIDTRVKLY

SEQ ID NO: 10281 - DNA, 909 bp, Triticum aestivum
  misc_feature (1)..(909): Ceres Seq. ID no. 13585560
ctcctaccccgccgcctcattgattttcctcctcttcccctccaccgcccgcccttgccgccgccgcgtaacccaacaacgccggggcaagagaaggagcagctatccaagcttacaagggctcggagagccatgtcgtcgtcgtcggcggcgccgatcggcctgtcgtgggcgccccagctgccatcccttgcggcggccggcggcagcaagaagggctcggcgccgacatcgagcattgacgcgcaggagtccctctggaagcccagcaacgagctcgtggacgggctctacgtgcccccgagggaccccaggaaggtcaacaagatggcgaggaagaacgtcaaggacaccaccggcaagggctggttcgacatgccggcgccgagcatcactcccgagttgaagaaagaccttgagattttgcagctgaggcatgtaatggaccctaaaaggcatttcaagaggtctggtaaatccaaggctcttccgaagtatttccaagttggaacggttattgagcctgcatctgagttctactcaagtaggttgacaaagcatgaacggaagcagaccttggttgatgagctgttatctgaccaaaaactcaagaactacaggatgcgtaaggtaagggaaattcaggtggcccggacacccggaggcaaccagaagtggaagaacaagggcaagcaaacgttcaaaagggccaaggacaggcggaaataggatcaatgtaaaacaaggaagaacagaagaacggagccaaggagaaatgggcgagcacggctataggttgtgcactccactgtaatgtgttgaattcatgtaactgaacgtatggaacttttctccccgcacttagagagatgagatcagtgtttgaggggatgatggtcaaagcattgt

SEQ ID NO: 10282 - protein, 242 aa, Triticum aestivum
  misc_feature (1)..(242): Ceres Seq. ID no. 13585561
LLPRRLIDFPPLPLHRPPLPPPRNPTTPGQEKEQLSKLTRARRAMSSSSAAPIGLSWAPQLPSLAAAGGSKKGSAPTSSIDAQESLWKPSNELVDGLYVPPRDPRKVNKMARKNVKDTTGKGWFDMPAPSITPELKKDLEILQLRHVMDPKRHFKRSGKSKALPKYFQVGTVIEPASEFYSSRLTKHERKQTLVDELLSDQKLKNYRMRKVREIQVARTPGGNQKWKNKGKQTFKRAKDRRK

SEQ ID NO: 10283 - protein, 198 aa, Triticum aestivum
  misc_feature (1)..(198): Ceres Seq. ID no. 13585562
MSSSSAAPIGLSWAPQLPSLAAAGGSKKGSAPTSSIDAQESLWKPSNELVDGLYVPPRDPRKVNKMARKNVKDTTGKGWFDMPAPSITPELKKDLEILQLRHVMDPKRHFKRSGKSKALPKYFQVGTVIEPASEFYSSRLTKHERKQTLVDELLSDQKLKNYRMRKVREIQVARTPGGNQKWKNKGKQTFKRAKDRRK

SEQ ID NO: 10284 - protein, 134 aa, Triticum aestivum
  misc_feature (1)..(134): Ceres Seq. ID no. 13585563
SYPAASLIFLLFPSTARPCRRRVTQQRRGKRRSSYPSLQGLGEPCRRRRRRRSACRGRPSCHPLRRPAAARRARRRHRALTRRSPSGSPATSSWTGSTCPRGTPGRSTRWRGRTSRTPPARAGSTCRRRASLPS

SEQ ID NO: 10285 - DNA, 1121 bp, Triticum aestivum
  misc_feature (1)..(1121): Ceres Seq. ID no. 13585609
aaccatccagatccaggtccttcctcgttatctttcaccatgccttcagcagcttcccgactcgtgcggatcggccgtgccgctcgctcagctgcggcgaccacatctcgcttcgcccaattcgttgaagcagcgaccctctccacgaaggcggtggcgaccaaacctcacgctatcttaggttcagatcgtgccgcctccgtagatctgcgtatgaaccaatccactgtccatgctcctccacgcgccatggcacctgcctccctgacactcagtcacccagaagaacaaaggcaggaaggtaaggtgaagtttgtggtagaggagaaagaccttgagtcagaagcagccctttgggccttgtatgagcgctggtgcaaagatttcaaccaaaagcgtgatcatgatgagatggttcactggttcaacacattcaaggagactgtcctgcttgtccaccgtcggaacaatgctaatctgccctacaaattgggaataaacaaattcgcggatgggaagctaaggaagctctgttgctgtcatgatcctattcttaaaaagattgatgaggagtttggcgacaaaccaggtgaatttattctaggtgatggtgacaaacttctcaagcgagtcttcgctgattataaggtggttcatggcagactgtatgttcatttaccaaagggagttgatgtggaaaccatcaccaccaatcctgaatgggtcgagctggaagcgaccaccaaccctccataccgataccctacttacatctagtggtgctatcattattgctactaagctgtgcttctgccaacggttgcatactaggacttggatgttgtccttcttgctaataaaacatactccctccgtccggaaatacttgtcatcgaaatggataaaagagatgtatttagacgtattttagttttagatacatctcttttgatccattttgatgacaagtattttaggacggagggcgtatgcataataagctaaccgtgagcatatgaggattacgttaatgcttttgtaagatattttaaactttgactaaggtgttgtaatattccagattcatcgttatgtgctcattagtcaggttttttcctctc

SEQ ID NO: 10286 - protein, 258 aa, Triticum aestivum
  misc_feature (1)..(258): Ceres Seq. ID no. 13585610
NHPDPGPSSLSFTMPSAASRLVRIGRAARSAAATTSRFAQFVEAATLSTKAVATKPHAILGSDRAASVDLRMNQSTVHAPPRAMAPASLTLSHPEEQRQEGKVKFVVEEKDLESEAALWALYERWCKDFNQKRDHDEMVHWFNTFKETVLLVHRRNNANLPYKLGINKFADGKLRKLCCCHDPILKKIDEEFGDKPGEFILGDGDKLLKRVFADYKVVHGRLYVHLPKGVDVETITTNPEWVELEATTNPPYRYPTYI

SEQ ID NO: 10287 - protein, 245 aa, Triticum aestivum
  misc_feature (1)..(245): Ceres Seq. ID no. 13585611
MPSAASRLVRIGRAARSAAATTSRFAQFVEAATLSTKAVATKPHAILGSDRAASVDLRMNQSTVHAPPRAMAPASLTLSHPEEQRQEGKVKFVVEEKDLESEAALWALYERWCKDFNQKRDHDEMVHWFNTFKETVLLVHRRNNANLPYKLGINKFADGKLRKLCCCHDPILKKIDEEFGDKPGEFILGDGDKLLKRVFADYKVVHGRLYVHLPKGVDVETITTNPEWVELEATTNPPYRYPTYI

SEQ ID NO: 10288 - protein, 187 aa, Triticum aestivum
  misc_feature (1)..(187): Ceres Seq. ID no. 13585612
MNQSTVHAPPRAMAPASLTLSHPEEQRQEGKVKFVVEEKDLESEAALWALYERWCKDFNQKRDHDEMVHWFNTFKETVLLVHRRNNANLPYKLGINKFADGKLRKLCCCHDPILKKIDEEFGDKPGEFILGDGDKLLKRVFADYKVVHGRLYVHLPKGVDVETITTNPEWVELEATTNPPYRYPTYI

SEQ ID NO: 10289 - DNA, 541 bp, Triticum aestivum
  misc_feature (1)..(541): Ceres Seq. ID no. 13589020
aactcccggtcccggacgacctgcttggctgcgcgcgtctcgataccacctaccccgtcgccgtcagagcctcttcccacgcgccgctcccctgtccccgcaccccccgccgccgccgccgccgctccccgggacgagatggaggtcgctgccgctgccgccgccgtcgccgtcccgaggcacaaggtgaagaagcagattaacctcttctactgcgccgagtgcgaggagctcgccctcaaggtcgccgccgcctccgacgccatccagctccagtctatcaactggaggaacttccccgacgggttcccgaacctcttcatcaacaacgcgcacgacatccgggggcaagacgttggcnttcttggcttctttaagttggccgggaatcatttttgaacagatttccgtattcttcgcgcttgcccaagctcttnatcgcctccttcacgctcgtgctgnccttcttcccaaccggtaccttcgagcgcgtcgaggaggagggcgacgtcgccaccggcttcacgctcgcgcgcatcct

SEQ ID NO: 10290 - protein, 132 aa, Triticum aestivum
  misc_feature (1)..(132): Ceres Seq. ID no. 13589021
  misc_feature (121)..(121): Xaa is any aa, unknown or other
NSRSRTTCLAARVSIPPTPSPSEPLPTRRSPVPAPPAAAAAAPRDEMEVAAAAAAVAVPRHKVKKQINLFYCAECEELALKVAAASDAIQLQSINWRNFPDGFPNLFINNAHDIRGQDVGXLGFFKLAGNHF

SEQ ID NO: 10291 - protein, 86 aa, Triticum aestivum
  misc_feature (1)..(86): Ceres Seq. ID no. 13589022
  misc_feature (75)..(75): Xaa is any aa, unknown or other
MEVAAAAAAVAVPRHKVKKQINLFYCAECEELALKVAAASDAIQLQSINWRNFPDGFPNLFINNAHDIRGQDVGXLGFFKLAGNHF

SEQ ID NO: 10292 - protein, 66 aa, Triticum aestivum
  misc_feature (1)..(66): Ceres Seq. ID no. 13589023
LPVPDDLLGCARLDTTYPVAVRASSHAPLPCPRTPRRRRRRSPGRDGGRCRCRRRRRPEAQGEEAD

SEQ ID NO: 10293 - DNA, 1216 bp, Triticum aestivum
  misc_feature (1)..(1216): Ceres Seq. ID no. 13589061
atcgaaaagttgctcttatcttatcccatttcttcctctttcctctccctctctctctctcttacacaagttgctgctgagttggtgctgtccttgttcctggacggacacatcctacatgtcgacggcggtggcgcggccctacggcggcggcttccccggatcggggagggccaagggggacgagctgctcggcaagaagatgagcgacgggttcttcatcgaggaggaggaggaggaggaggaggaggaggcggaggaggtgctcacggagagctcctccatcggcgcgccgtcgccgtcgagctcctccatcggcgaggactcctcgtcggaggttggcggcgacggggaggacgaggaggtggagagcaagctcaaggaggagcccgggctcgggtgcctggacgccctggaggactccttgcccatcaagaacgggctgtcgagcttctacgccggaaagtcgaagtcattcaccagcctcgcggaggcggcggcgcgggacgccgtgaaggagctcgccaagccggagaaccccttcaacaagcgccgccgcatcctggccacctggtcccgccgcgcctcctgcagctcgctggccaccgccacctacctgcccccgctcctcgcccccgaccacgccctccccgagggggaggaaggcgaggaggacgacgactccgactccggctccgacgagcagcaccgcggcaagaacgggtgggaggcaccggcattgccgcccccgaggctgagcgtgaacacccagatgggcgcggcggcggcgaggaagggcggcagcttcagatcgccgaggtcctactcgctctcagatcttcgaaatggcggcgatgcgagatacaaccagtagctgcgaattcgcagccattgatctgtcttgtgtcccgtagatctgttactactacttactccttaattatatataagcaagtaatcgcaagagcatgtgtaagtgtctaagctaaattcgtcgtgctcttgtatccgtcagttggatcccgttgacctcgctcacccgacccgatgtacgcagacatgtatgaactgctccggcgaactgagttcaccgaactgatccaacaccccggccatcattaactaatgatgaaccgtcctcaagataagattagttagtttaatggcattgctcccgatccctttgtgtacaaacatatatacaatttgttgatcc

SEQ ID NO: 10294 - protein, 327 aa, Triticum aestivum
  misc_feature (1)..(327): Ceres Seq. ID no. 13589062
IEKLLLSYPISSSFLSLSLSLTQVAAELVLSLFLDGHILHVDGGGAALRRRLPRIGEGQGGRAARQEDERRVLHRGGGGGGGGGGGGGAHGELLHRRAVAVELLHRRGLLVGGWRRRGGRGGGEQAQGGARARVPGRPGGLLAHQERAVELLRRKVEVIHQPRGGGGAGRREGARQAGEPLQQAPPHPGHLVPPRLLQLAGHRHLPAPAPRPRPRPPRGGGRRGGRRLRLRLRRAAPRQERVGGTGIAAPEAEREHPDGRGGGEEGRQLQIAEVLLALRSSKWRRCEIQPVAANSQPLICLVSRRSVTTTYSLIIYKQVIARACVSV

SEQ ID NO: 10295 - protein, 290 aa, Triticum aestivum
  misc_feature (1)..(290): Ceres Seq. ID no. 13589063
SKSCSYLIPFLPLSSPSLSLLHKLLLSWCCPCSWTDTSYMSTAVARPYGGGFPGSGRAKGDELLGKKMSDGFFIEEEEEEEEEEAEEVLTESSSIGAPSPSSSSIGEDSSSEVGGDGEDEEVESKLKEEPGLGCLDALEDSLPIKNGLSSFYAGKSKSFTSLAEAAARDAVKELAKPENPFNKRRRILATWSRRASCSSLATATYLPPLLAPDHALPEGEEGEEDDDSDSGSDEQHRGKNGWEAPALPPPRLSVNTQMGAAAARKGGSFRSPRSYSLSDLRNGGDARYNQ

SEQ ID NO: 10296 - protein, 251 aa, Triticum aestivum
  misc_feature (1)..(251): Ceres Seq. ID no. 13589064
MSTAVARPYGGGFPGSGRAKGDELLGKKMSDGFFIEEEEEEEEEEAEEVLTESSSIGAPSPSSSSIGEDSSSEVGGDGEDEEVESKLKEEPGLGCLDALEDSLPIKNGLSSFYAGKSKSFTSLAEAAARDAVKELAKPENPFNKRRRILATWSRRASCSSLATATYLPPLLAPDHALPEGEEGEEDDDSDSGSDEQHRGKNGWEAPALPPPRLSVNTQMGAAAARKGGSFRSPRSYSLSDLRNGGDARYNQ

SEQ ID NO: 10297 - DNA, 1230 bp, Triticum aestivum
  misc_feature (1)..(1230): Ceres Seq. ID no. 13590233
tcgagatctccccacgggccaaggccaggagccaacaaacgcaaggccaccgccgcctctgcgcctccgcagtcgccgttctgcgcccttgcccgccaccgcccggagagatggcgaaggcgttttacgcggtgggtttctggatccgggagaccggtcaggccctcgaccgcctcggctgtcgcctccaggggaactacttcttccacgagcagatttcaaggcatcgcacacttatgaacatctttgacaaagcccctcatgttcacaaagaggcatttgtcgctccaagtgcatcccttattggcgatgttgaagttgggcaagggtcttcaatttggtacggatgcattttaagaggtgatgcaaataacgttcaagttggatctgagaccaatatacaggacaattctgttgtgcatgtggcaaaatctaatctaagtggaaaagtctttccaactatcattggagacaatgtcacagtagggcatagtgctgtattacaaggatgcactgttgaggatgaagcttttgttggtatgggggctaccctgttagatggtgttgttgtggaaaagcatgggatggtcgctgctggagcccttgtaagacagaacacgaggatcccttgtggagaggtatggggtggaaaccctgcaaaatttctgaggaagctcacagacgaggagatcgcttttattgcggaatcagctgccaactattccaacttagccaaggcacatgctgttgagaatgctaaacccttggaaaagattgattttgagaaagtgctgcgcaagaaatttgctcaccaggacaatgaacacgattccatgcttagtgtcactcgagaggtccctccagagctggcgccccccagtcctactcctgcccaataagcttttcttatcaccaccttcagtttggattcttatatctctatctgtccagtgagtttggcagtttacttttacttaagtaattttgggtcgagcaatgttctaaagctgaccatgcacttcaatttctgtattccatatgttcaagatccatggaacaaatagatccatttcgcacaaatttaccagtagcatgcgctgcgtgcatagtttactctggctgaaattgcgagatgcactggaggcagcacatgaactgttggcctgtagttaaatgcttaattgaataaatattttgataacaaaaagtactgaaggacaaattttattg

SEQ ID NO: 10298 - protein, 298 aa, Triticum aestivum
  misc_feature (1)..(298): Ceres Seq. ID no. 13590234
EISPRAKARSQQTQGHRRLCASAVAVLRPCPPPPGEMAKAFYAVGFWIRETGQALDRLGCRLQGNYFFHEQISRHRTLMNIFDKAPHVHKEAFVAPSASLIGDVEVGQGSSIWYGCILRGDANNVQVGSETNIQDNSVVHVAKSNLSGKVFPTIIGDNVTVGHSAVLQGCTVEDEAFVGMGATLLDGVVVEKHGMVAAGALVRQNTRIPCGEVWGGNPAKFLRKLTDEEIAFIAESAANYSNLAKAHAVENAKPLEKIDFEKVLRKKFAHQDNEHDSMLSVTREVPPELAPPSPTPAQ

SEQ ID NO: 10299 - protein, 262 aa, Triticum aestivum
  misc_feature (1)..(262): Ceres Seq. ID no. 13590235
MAKAFYAVGFWIRETGQALDRLGCRLQGNYFFHEQISRHRTLMNIFDKAPHVHKEAFVAPSASLIGDVEVGQGSSIWYGCILRGDANNVQVGSETNIQDNSVVHVAKSNLSGKVFPTIIGDNVTVGHSAVLQGCTVEDEAFVGMGATLLDGVVVEKHGMVAAGALVRQNTRIPCGEVWGGNPAKFLRKLTDEEIAFIAESAANYSNLAKAHAVENAKPLEKIDFEKVLRKKFAHQDNEHDSMLSVTREVPPELAPPSPTPAQ

SEQ ID NO: 10300 - protein, 220 aa, Triticum aestivum
  misc_feature (1)..(220): Ceres Seq. ID no. 13590236
MNIFDKAPHVHKEAFVAPSASLIGDVEVGQGSSIWYGCILRGDANNVQVGSETNIQDNSVVHVAKSNLSGKVFPTIIGDNVTVGHSAVLQGCTVEDEAFVGMGATLLDGVVVEKHGMVAAGALVRQNTRIPCGEVWGGNPAKFLRKLTDEEIAFIAESAANYSNLAKAHAVENAKPLEKIDFEKVLRKKFAHQDNEHDSMLSVTREVPPELAPPSPTPAQ

SEQ ID NO: 10301 - DNA, 1778 bp, Triticum aestivum
  misc_feature (1)..(1778): Ceres Seq. ID no. 13590394
aatttcctcttcgtgggcgccgcctcctcctcctcccccattctcctcctaaagccctaactaaacccatcccccctcctcgcgccgccgccgccgcaatggccgccgccgcagtgctccggggcggctcccgccgcgtcctcgcctacccggccctccgcgccgccgtgatctccggccccgccgcgctccccgacgtgcccgcggccgccgggccccagccgccgccgccctcgccgctggccgctggcctatgggcgaggtccatggccaccttcacccgcacgaagccccacgtcaacgtcggcaccatcggccacgtcgaccacggcaagaccacgctcaccgccgccatcaccaaggtgctggcggaggctgggagcgccaaggcggtggcgttcgacgagatcgacaaggctcccgaggagaaagccagaggaatcaccatctccacggctcatgtcgagtatgagaccgctaagaggcactatgctcacgtggactgtccagggcacgccgattatgtcaagaacatgatcactggtgctgctcaaatggatggtggtattcttgttgtgtcagctcctgatggccccatgccacaaactaaggagcatattcttctagctcgacaggttggtgtgccatcacttgtttgtttcttaaacaaagttgatgctgttgaagatgaagagctactagaacttgtggagatggagcttcgagagctcctcagtttctacaagttcccaggcgatgatattcctatcatccgtggatctgccttgtcagccttgaatggaacaaatgaggagattggaaagaatgctattttgaaactgatggatgccgtcgattcttacatccccgatcctgtgagggtgcttgataagtctttcttgatgccaattgaaggcattttctcaatccagggtcgtggtactgttgtgactggacgtattgaacagggggtaattaaaactggtgaggatgttgaggtcataggtttgacggagagtggtcctgtgaagactacagttactggtgttgagatgttcaaaaagatgatggatcatggagaggctggtgacaatgttggtcttcttctccgtggtcttaagcgtggtgatgtcgagcgtggccaggtggtttgcaaacccggtactgtgaagacctacaaaaagtttgaggcggaaatttacgtccttaccaaggatgaaggtggtcgccacactgcattcttctcgaattacagcccacaattctacttcaggacagctgatatctgtgggaaaatcgagttgcctccggacgtgaagatggttatgcctggtgacaacgtaaccgcaatctttgagttgatgttgcctgttccgctcgaaccaggtctaagattcgcgctgagggaaggagggaggaccgtcggcgccggagttgtcgccaaagtcatgagctaataacaataatatgttccagacctttctctttttttggcgtagtgaattttagcgaacaaatgaatgttgatatgaaggatttgtccgaccggaaacacgagataaacgagagtcgagagcaaggggactggcatggatgcatcttgtgtggatgcattcagccaaccaacttcctacggataatggtttgttaccattccgaagaattgctattttttcttctcatgttgggtagtttgctgtatcataccgcagcttgttacctagacacgcttctctggcatatattagctcggtgattcaataagaccgtcttgtttc

SEQ ID NO: 10302 - protein, 484 aa, Triticum aestivum
  misc_feature (1)..(484): Ceres Seq. ID no. 15220964
FPLRGRRLLLLPHSPPKALTKPIPPPRAAAAAMAAAAVLRGGSRRVLAYPALRAAVISGPAALPDVPAAAGPQPPPPSPLAAGLWARSMATFTRTKPHVNVGTIGHVDHGKTTLTAAITKVLAEAGSAKAVAFDEIDKAPEEKARGITISTAHVEYETAKRHYAHVDCPGHADYVKNMITGAAQMDGGILVVSAPDGPMPQTKEHILLARQVGVPSLVCFLNKVDAVEDEELLELVEMELRELLSFYKFPGDDIPIIRGSALSALNGTNEEIGKNAILKLMDAVDSYIPDPVRVLDKSFLMPIEGIFSIQGRGTVVTGRIEQGVIKTGEDVEVIGLTESGPVKTTVTGVEMFKKMMDHGEAGDNVGLLLRGLKRGDVERGQVVCKPGTVKTYKKFEAEIYVLTKDEGGRHTAFFSNYSPQFYFRTADICGKIELPPDVKMVMPGDNVTAIFELMLPVPLEPGLRFALREGGRTVGAGVVAKVMS

SEQ ID NO: 10303 - protein, 452 aa, Triticum aestivum
  misc_feature (1)..(452): Ceres Seq. ID no. 15220965
MAAAAVLRGGSRRVLAYPALRAAVISGPAALPDVPAAAGPQPPPPSPLAAGLWARSMATFTRTKPHVNVGTIGHVDHGKTTLTAAITKVLAEAGSAKAVAFDEIDKAPEEKARGITISTAHVEYETAKRHYAHVDCPGHADYVKNMITGAAQMDGGILVVSAPDGPMPQTKEHILLARQVGVPSLVCFLNKVDAVEDEELLELVEMELRELLSFYKFPGDDIPIIRGSALSALNGTNEEIGKNAILKLMDAVDSYIPDPVRVLDKSFLMPIEGIFSIQGRGTVVTGRIEQGVIKTGEDVEVIGLTESGPVKTTVTGVEMFKKMMDHGEAGDNVGLLLRGLKRGDVERGQVVCKPGTVKTYKKFEAEIYVLTKDEGGRHTAFFSNYSPQFYFRTADICGKIELPPDVKMVMPGDNVTAIFELMLPVPLEPGLRFALREGGRTVGAGVVAKVMS

SEQ ID NO: 10304 - protein, 396 aa, Triticum aestivum
  misc_feature (1)..(396): Ceres Seq. ID no. 15220966
MATFTRTKPHVNVGTIGHVDHGKTTLTAAITKVLAEAGSAKAVAFDEIDKAPEEKARGITISTAHVEYETAKRHYAHVDCPGHADYVKNMITGAAQMDGGILVVSAPDGPMPQTKEHILLARQVGVPSLVCFLNKVDAVEDEELLELVEMELRELLSFYKFPGDDIPIIRGSALSALNGTNEEIGKNAILKLMDAVDSYIPDPVRVLDKSFLMPIEGIFSIQGRGTVVTGRIEQGVIKTGEDVEVIGLTESGPVKTTVTGVEMFKKMMDHGEAGDNVGLLLRGLKRGDVERGQVVCKPGTVKTYKKFEAEIYVLTKDEGGRHTAFFSNYSPQFYFRTADICGKIELPPDVKMVMPGDNVTAIFELMLPVPLEPGLRFALREGGRTVGAGVVAKVMS

SEQ ID NO: 10305 - DNA, 1258 bp, Triticum aestivum
  misc_feature (1)..(1258): Ceres Seq. ID no. 13590516
agtgggccccacttctgtggcggcgcctccccctccgtggtacacaaaaaccctagcgcactgcccttttacggccgccccctcctctcgaccgacctcccaaaacttccctaggcgtctctcttcgtccctccccctcccgccgccgcgtcgactcggaagtagcaagcgcgccgcggcccaacccttccgatggcggacaaggagcccgtcgtggagcgccccgtcgcggaggaggaaggcgaggactccgctgccgcggccgccgccggcgaggaggaggachccggtgcccaggtcgcccccyatcgtgcggctcgaggaggtcgccgtcaccaccggcgaggaggacgaggactctctcctcgacatgaaggcgaagctatacaggttcgacaaggatgggaaccagtggaaggagaggggcacgggcaccgtcaagctgctcaagcataaggagaacggcaaggtccgccttgttatgcgccaggccaagacacttaagatctgcgccaaccacctagtgatctcgaccacgaagatgcaggaacacgccggcagcgacaagtcctgtgtctggcacgcggcagactttgctgacggagagcttaaggatgagatgtttgccatccggtttggcaccgtggagaattgcaagaagtttaaggacttggttgacgagatcgctgagtcgcttgcaaagaatgaaggcggtgaaagcgaagaaggttcttccgcagctggactgctggagaaacttagtgtaagcgaaagcaaacctgaggaaagtgcagctaaggaggaatcaactgatrmtagcaaggagacagaaaccaaastcgygacagccccctcagagtagtgggcagagcaacgcccgtcacaatgttactgctgagcattgctcggtggcaagagtcagtttgtkggtccttcctgtcgacggaagttggtagtcgttgacgatgaaatatgctgagaactttttgagacagtcagaaggtgtcttgagcacagtccatcttcaccccgctgggtgttcacgcgtctgagtatttattgttatgtaaaatatctgctcgcatggcttttggatggtgttgtcttgcttttgtcaagaactcgaaatgtagtccatgagtattgagtttcgaacattttgggtttgaattgtgggtatttgagttgcatgtgccggttatggattttatacaactataaatcatttgctatatcatttttacacatttgatatgcc

SEQ ID NO: 10306 - protein, 286 aa, Triticum aestivum
  misc_feature (1)..(286): Ceres Seq. ID no. 15220981
  misc_feature (95)..(95): Xaa is any aa, unknown or other
  misc_feature (102)..(102): Xaa is any aa, unknown or other
  misc_feature (272)..(272): Xaa is any aa, unknown or other
  misc_feature (280)..(280): Xaa is any aa, unknown or other
  misc_feature (281)..(281): Xaa is any aa, unknown or other
VGPTSVAAPPPPWYTKTLAHCPFTAAPSSRPTSQNFPRRLSSSLPLPPPRRLGSSKRAAAQPFRWRTRSPSWSAPSRRRKARTPLPRPPPARRRXPVPRSPXIVRLEEVAVTTGEEDEDSLLDMKAKLYRFDKDGNQWKERGTGTVKLLKHKENGKVRLVMRQAKTLKICANHLVISTTKMQEHAGSDKSCVWHAADFADGELKDEMFAIRFGTVENCKKFKDLVDEIAESLAKNEGGESEEGSSAAGLLEKLSVSESKPEESAAKEESTDXSKETETKXXTAPSE

SEQ ID NO: 10307 - protein, 163 aa, Triticum aestivum
  misc_feature (1)..(163): Ceres Seq. ID no. 15220982
  misc_feature (149)..(149): Xaa is any aa, unknown or other
  misc_feature (157)..(157): Xaa is any aa, unknown or other
  misc_feature (158)..(158): Xaa is any aa, unknown or other
MKAKLYRFDKDGNQWKERGTGTVKLLKHKENGKVRLVMRQAKTLKICANHLVISTTKMQEHAGSDKSCVWHAADFADGELKDEMFAIRFGTVENCKKFKDLVDEIAESLAKNEGGESEEGSSAAGLLEKLSVSESKPEESAAKEESTDXSKETETKXXTAPSE

SEQ ID NO: 10308 - DNA, 1875 bp, Triticum aestivum
  misc_feature (1)..(1875): Ceres Seq. ID no. 13590644
ccctctgaagcctcctcccacccccctcaacgccgccgccgcaacccggaaaccctaaccaaaccccccagcgccacaccatggcgtccgcctacgaccgggaggacggcctcgcgccgccgcagccgcacggcggcggccccgccgacgcctacgatcccaactacgtcccggactcggtgaagaccttcgtggtgcacctgtaccgccacatccgcgacaagaacgtctacgagatccaccagatgtacgagggcggcttccagcgcctctccgaccgcctcttccgcgacacgccctggccgtcggccgaggccgtggcgccctactgcgacggcgaccacgtcttcctcctcctctaccgcgagctctggtaccgccacgcctacgcgcgcctctcccccctcaccgccagccaccgctccgagtcctggaacaactactgcgacctcttcagcgtcgtcctccacggcgtcgtcaacatgcagctgcctaaccagtggctgtgggacatggtggacgagttcgtctaccagttccagagcttctgccagtaccgcgccaagctcaagaacaagacggaagacgagctccagcagctaaagcagtttgacaaggcatggaatgtctatggggttctcaattacctgcaagcactcgttgagaagtccatgatcgcacagattctggagagggagaaagaggggctggagtcgtttaccgccaccgacgggtatgactaccagggtgggagcaatgtgctcaaggtcctgggttactacagcatgattgggcttctcaggatacactgccttcttggtgattaccacactggcctcaagtgcttggcaccgatcaaccttaaccagcagggggtctacaccattgtgattgggagtcacatctcgacaatctatcattatggatttgcaaaccttatgatgcgcaggtatgtcgatgctaccaaggaattcaacaaaattctgctttacattataaagtataagcagtaccatcagaaatcccctcagtatgaccagattctgaagaaaaatgagcagatgtatgcgctgctggcaatttgcctatctctgtgtccgcagaacaaactcatagatgaaaatgttagcgcccagctgaaagaaaagtacaatgacaaaatgacaaagatgcagaggtttgatgatgaagcatatgctgcctacgatgagctattttcgtatgcctgccccaagtttattacgccatcacctccagttctggaccagccacttacaaattataaccaggacgcctatcggcttcaattgaagctgttcctgtatgaagtgaagcagcaacagctgctttctgggatccggagctatctaaagttatactcagcaataactatcaccaaacttgcccagtatatggaaatggatgaggcaacacttaggtctatccttatgacgtacaagcacaaaatgcatgcagttgacagtaatgggaaaattgtatccagtgcagactttgatttctacattaatgaggatgttattcatgtcgtggagtccaagtcgaccaagcgccatggtgactactttttgagacagattttaaagtttgaagaaaccattgctgaattggacaaggtacagcttgactgagcatggtagagatcatggaggagagaaacgtcccaggatcctgttttccttttcttttttcctattgtgagaggcagttgtgatggctactgttagcagagcattagttgtgccttctggtacactttttgactcagtgaagcattggcaattcactgtattatcccgtttctagttcctgtwtgctatttgacgagtaatccgtcggttacgaattgagaacttg

SEQ ID NO: 10309 - protein, 522 aa, Triticum aestivum
  misc_feature (1)..(522): Ceres Seq. ID no. 15220986
MASAYDREDGLAPPQPHGGGPADAYDPNYVPDSVKTFVVHLYRHIRDKNVYEIHQMYEGGFQRLSDRLFRDTPWPSAEAVAPYCDGDHVFLLLYRELWYRHAYARLSPLTASHRSESWNNYCDLFSVVLHGVVNMQLPNQWLWDMVDEFVYQFQSFCQYRAKLKNKTEDELQQLKQFDKAWNVYGVLNYLQALVEKSMIAQILEREKEGLESFTATDGYDYQGGSNVLKVLGYYSMIGLLRIHCLLGDYHTGLKCLAPINLNQQGVYTIVIGSHISTIYHYGFANLMMRRYVDATKEFNKILLYIIKYKQYHQKSPQYDQILKKNEQMYALLAICLSLCPQNKLIDENVSAQLKEKYNDKMTKMQRFDDEAYAAYDELFSYACPKFITPSPPVLDQPLTNYNQDAYRLQLKLFLYEVKQQQLLSGIRSYLKLYSAITITKLAQYMEMDEATLRSILMTYKHKMHAVDSNGKIVSSADFDFYINEDVIHVVESKSTKRHGDYFLRQILKFEETIAELDKVQLD

SEQ ID NO: 10310 - protein, 467 aa, Triticum aestivum
  misc_feature (1)..(467): Ceres Seq. ID no. 15220987
MYEGGFQRLSDRLFRDTPWPSAEAVAPYCDGDHVFLLLYRELWYRHAYARLSPLTASHRSESWNNYCDLFSVVLHGVVNMQLPNQWLWDMVDEFVYQFQSFCQYRAKLKNKTEDELQQLKQFDKAWNVYGVLNYLQALVEKSMIAQILEREKEGLESFTATDGYDYQGGSNVLKVLGYYSMIGLLRIHCLLGDYHTGLKCLAPINLNQQGVYTIVIGSHISTIYHYGFANLMMRRYVDATKEFNKILLYIIKYKQYHQKSPQYDQILKKNEQMYALLAICLSLCPQNKLIDENVSAQLKEKYNDKMTKMQRFDDEAYAAYDELFSYACPKFITPSPPVLDQPLTNYNQDAYRLQLKLFLYEVKQQQLLSGIRSYLKLYSAITITKLAQYMEMDEATLRSILMTYKHKMHAVDSNGKIVSSADFDFYINEDVIHVVESKSTKRHGDYFLRQILKFEETIAELDKVQLD

SEQ ID NO: 10311 - protein, 388 aa, Triticum aestivum
  misc_feature (1)..(388): Ceres Seq. ID no. 15220988
MQLPNQWLWDMVDEFVYQFQSFCQYRAKLKNKTEDELQQLKQFDKAWNVYGVLNYLQALVEKSMIAQILEREKEGLESFTATDGYDYQGGSNVLKVLGYYSMIGLLRIHCLLGDYHTGLKCLAPINLNQQGVYTIVIGSHISTIYHYGFANLMMRRYVDATKEFNKILLYIIKYKQYHQKSPQYDQILKKNEQMYALLAICLSLCPQNKLIDENVSAQLKEKYNDKMTKMQRFDDEAYAAYDELFSYACPKFITPSPPVLDQPLTNYNQDAYRLQLKLFLYEVKQQQLLSGIRSYLKLYSAITITKLAQYMEMDEATLRSILMTYKHKMHAVDSNGKIVSSADFDFYINEDVIHVVESKSTKRHGDYFLRQILKFEETIAELDKVQLD

SEQ ID NO: 10312 - DNA, 1753 bp, Triticum aestivum
  misc_feature (1)..(1753): Ceres Seq. ID no. 13590666
atttttccactctcactccccgcagtcccccgctcgaagcctccaaaaccctaccgaactccgccccgccagccatggcgccgccccccacctccggcccgcagcagcggcggctcctccaggcggcggccgacggcgacctccgcctcttcaagagcatcgcgagcgcgctggacggcgggaagggccgcgtcaaggaggcggtggaggccgtcaggaattgcggcgccggggcgctgcacaccgccgccggccgcgggaggaccccgatgtgcgcgtacttggtggaggagcttggcgtggacgtcaatgctgcagacgacaaaggtgctacacctctgacttatgcacttcgttggcgggctgtggatactgtgaggtatctctttgatcatggtgccgatgcagaaaagcctggtgaacaaggttttacccctcttcatgtggcagctggagcaggattgtgtgaaatgatagaagtcttgctctcaaaaggagctgatgttaattgcttttcttaccgtgggacactactgcattctgctattatcggaaagcaggttgctgccgtgaagctcttgttggatcatcatgcggattgtaacaagccagtgtccctacattatacacctcttatcgctgctctccatgcccgctcgctgaaatgtgtgaagcttctgattgaggcgggtgctgatgcgaagggtgttcctccgctaacccccttagtagttgctgcaaatgacggtttaactgatttctacgaacctttacttcgggttggtgctgatcctgatgttcgtgatgatggaggtcagctgccaatagagattgctgcacgtaacaatagacggaaagatgttgagatcctttttccagtaacatctcatattccctatgtgcgtgattggagtgttgatgggatacttgcttatgtcaaatcagtgccgaaggaggaggatgacccgttatacaaaatggggccagcttatctgaaactggaaggaaccaaggcttacaagagaaaagattatgtttctgcaataaatttctactccatggcaatcaagcttaaccctggagatgtaaccttgcattcaaataagagcctttgctggattaacctgggggaaggagacaaggccttggaggacgccgagttttgcaggatgatacggcctgattggccaaaggcctgttacaggcaaggggctgcccaaatgttattgaagaactatgaaaaggcatgtgaagcattccaagatggtctgaagttggacccaacaaatgttgagattgagaatgcattacgtgtgcggttcagggaaccggaggtgagacaatgcgacatgaagcaggctagtatggacgtactcctccttgcgtattccggtgtggttgcagtaaggcctgtgaaatgcccaacacacagtgctcaagacccgatttgcggcagcgtggatgaatgtgtccaagaatgcggcgatgaaggctaccattttgggatgtgcagccattgcaaatgtttctgcttcaactgcacctcatcacttgacgctaaaccggcacccggagccttgagtccttgaacgagtacgcacctaatctaaaaagctgcatcaataaacaaaaattgatatccttttcctttgtttttcttctttggtcctttgtatgtggatggtcaaagaggatcttgtgttctatatatattaacgtgggatagcggaacccattcagccgatttgtatgg

SEQ ID NO: 10313 - protein, 528 aa, Triticum aestivum
  misc_feature (1)..(528): Ceres Seq. ID no. 15220995
FSTLTPRSPPLEASKTLPNSAPPAMAPPPTSGPQQRRLLQAAADGDLRLFKSIASALDGGKGRVKEAVEAVRNCGAGALHTAAGRGRTPMCAYLVEELGVDVNAADDKGATPLTYALRWRAVDTVRYLFDHGADAEKPGEQGFTPLHVAAGAGLCEMIEVLLSKGADVNCFSYRGTLLHSAIIGKQVAAVKLLLDHHADCNKPVSLHYTPLIAALHARSLKCVKLLIEAGADAKGVPPLTPLVVAANDGLTDFYEPLLRVGADPDVRDDGGQLPIEIAARNNRRKDVEILFPVTSHIPYVRDWSVDGILAYVKSVPKEEDDPLYKMGPAYLKLEGTKAYKRKDYVSAINFYSMAIKLNPGDVTLHSNKSLCWINLGEGDKALEDAEFCRMIRPDWPKACYRQGAAQMLLKNYEKACEAFQDGLKLDPTNVEIENALRVRFREPEVRQCDMKQASMDVLLLAYSGVVAVRPVKCPTHSAQDPICGSVDECVQECGDEGYHFGMCSHCKCFCFNCTSSLDAKPAPGALSP

SEQ ID NO: 10314 - protein, 504 aa, Triticum aestivum
  misc_feature (1)..(504): Ceres Seq. ID no. 15220996
MAPPPTSGPQQRRLLQAAADGDLRLFKSIASALDGGKGRVKEAVEAVRNCGAGALHTAAGRGRTPMCAYLVEELGVDVNAADDKGATPLTYALRWRAVDTVRYLFDHGADAEKPGEQGFTPLHVAAGAGLCEMIEVLLSKGADVNCFSYRGTLLHSAIIGKQVAAVKLLLDHHADCNKPVSLHYTPLIAALHARSLKCVKLLIEAGADAKGVPPLTPLVVAANDGLTDFYEPLLRVGADPDVRDDGGQLPIEIAARNNRRKDVEILFPVTSHIPYVRDWSVDGILAYVKSVPKEEDDPLYKMGPAYLKLEGTKAYKRKDYVSAINFYSMAIKLNPGDVTLHSNKSLCWINLGEGDKALEDAEFCRMIRPDWPKACYRQGAAQMLLKNYEKACEAFQDGLKLDPTNVEIENALRVRFREPEVRQCDMKQASMDVLLLAYSGVVAVRPVKCPTHSAQDPICGSVDECVQECGDEGYHFGMCSHCKCFCFNCTSSLDAKPAPGALSP

SEQ ID NO: 10315 - protein, 439 aa, Triticum aestivum
  misc_feature (1)..(439): Ceres Seq. ID no. 15220997
MCAYLVEELGVDVNAADDKGATPLTYALRWRAVDTVRYLFDHGADAEKPGEQGFTPLHVAAGAGLCEMIEVLLSKGADVNCFSYRGTLLHSAIIGKQVAAVKLLLDHHADCNKPVSLHYTPLIAALHARSLKCVKLLIEAGADAKGVPPLTPLVVAANDGLTDFYEPLLRVGADPDVRDDGGQLPIEIAARNNRRKDVEILFPVTSHIPYVRDWSVDGILAYVKSVPKEEDDPLYKMGPAYLKLEGTKAYKRKDYVSAINFYSMAIKLNPGDVTLHSNKSLCWINLGEGDKALEDAEFCRMIRPDWPKACYRQGAAQMLLKNYEKACEAFQDGLKLDPTNVEIENALRVRFREPEVRQCDMKQASMDVLLLAYSGVVAVRPVKCPTHSAQDPICGSVDECVQECGDEGYHFGMCSHCKCFCFNCTSSLDAKPAPGALSP

SEQ ID NO: 10316 - DNA, 2258 bp, Triticum aestivum
  misc_feature (1)..(2258): Ceres Seq. ID no. 13590780
aaacaaacccttcyswwaaccagccgccgccactatatgcttatctgcctccgacgaggcctctccctcctccggcagcgccagccccggctcccgccccgcctcctcctccacctctccgccgagccgatgggcgacccggccgtcgcgccggacgccgcctacctggaggcggtgacgcagaagcggatccgcatcttcgaggagatccaggcccggcaggccctcgagcgcctcaacatcggcggcgaccccatcagagtaactttgcctgatggtgcgataaaggaaggcaagaagtggatatcgaccccgatggatatcgcctcggggatatcaactgggctggccgctagctgcctgatagcgcaggtgaatggtgtgctctgggacatgacgaggccattggaaggcgactgtgacttgaagctgttcaagttcgacagcaacgaagggcgtgacacgttctggcactcgagtgctcatattcttggagagtccatcgagagggtgtatggctgcaagttgtgcattggaccttgtactacaagaggagagggtttttactacgacgcccactacaaggacttgacactgaatgatacacactttggtctcattgacaagcaagctaaaaaggctgttgcggagaagcaaccatttgaacgcattgaagtctccagagcagaagctcttgaagtttttgcggaaaatgaatttaaggttgaaataattaacgaattgcccgaggacaagaccattacagtatacagatgtggtcctttggtcgacctttgccgtggcccgcacatcccaaatacttcctttgttaaagctttcgcttgcctcaaggcttcagcatcatactggagaggaaaagcagaccgtgaaagcctgcagagagtatatggaatctctttccctgattctaaacgtctcaaggaatatcaacatatgatagaggaagctaagaaacgcgatcataggttattggggcagtcccagaaactcttctttttccatccacttagcccaggtagctgcttcttccttccaaatggcgctataatatataacaaattgatggattttttgcgcaaggagtatagagagagaggctaccaagaggttctgagtccaaatatttacaacatgcaactttgggaaacctctggacatgctgcaaactacaaggacaacatgtttgtttttgagatcgagaaacaagaatttggccttaagccaatgaattgtcctggccattgcctaatgtttggacacgaggttcgatcgtatagagagttgcctctccgcatggctgattttggagttctgcacagaaatgaacttagtggtgcacttacaggtttgacacgtgtcagaagattccaacaggacgatgcccatattttttgcacggagagccaaatcaaggatgaagttcggtcttgcttggagttcattgattatgtttataaaatatttgggtttgaatacgagctggagttatcaacgagaccagagaagtatttaggtgacattgagacctggaacaaagcagagcaacaactgacagaagcattgaatgagtttgggaagccatggaagataaatgaagcagatggtgctttctatggcccgaaaatagatattggtgtgtttgatgccctcaagaggaaatttcagtgtgcaactctacagctcgattttcagctgccacttcgcttcaagttgacttattctgcagaggacgaagccaagcttgagaggcctgtaatgatacacagggcaatactaggatcagttgaaaggatgtttgccattcttttggagcactataacggtaaatggccgttgtggttaagcccccgacaagccattgtttgctgtgtatctgccaattcactaacatatgcaaaagaggttcatgctcagatacgtgcagctggttttcatgttgacattgacatgactgatagaacaattcaaaagaaggtgcgggaggctcagttagcccaattcaactatattctagtcgtcggcgcaaaagaggcagagtctggaaaggtctctctgagggtaagagacagggcagacctatccacagagaacattgctgacgtcatcgcacgttttaatgatgaagttgcgtctttccagtgatttttaagtcgcttcatcttcttttgttaagacatctactgcacaacccacattgtaatttggtgaagtgtgaggtgaatgaaaatcgtgatact

SEQ ID NO: 10317 - protein, 720 aa, Triticum aestivum
  misc_feature (1)..(720): Ceres Seq. ID no. 15221007
  misc_feature (5)..(5): Xaa is any aa, unknown or other
  misc_feature (6)..(6): Xaa is any aa, unknown or other
KQTLXXTSRRHYMLICLRRGLSLLRQRQPRLPPRLLLHLSAEPMGDPAVAPDAAYLEAVTQKRIRIFEEIQARQALERLNIGGDPIRVTLPDGAIKEGKKWISTPMDIASGISTGLAASCLIAQVNGVLWDMTRPLEGDCDLKLFKFDSNEGRDTFWHSSAHILGESIERVYGCKLCIGPCTTRGEGFYYDAHYKDLTLNDTHFGLIDKQAKKAVAEKQPFERIEVSRAEALEVFAENEFKVEIINELPEDKTITVYRCGPLVDLCRGPHIPNTSFVKAFACLKASASYWRGKADRESLQRVYGISFPDSKRLKEYQHMIEEAKKRDHRLLGQSQKLFFFHPLSPGSCFFLPNGAIIYNKLMDFLRKEYRERGYQEVLSPNIYNMQLWETSGHAANYKDNMFVFEIEKQEFGLKPMNCPGHCLMFGHEVRSYRELPLRMADFGVLHRNELSGALTGLTRVRRFQQDDAHIFCTESQIKDEVRSCLEFIDYVYKIFGFEYELELSTRPEKYLGDIETWNKAEQQLTEALNEFGKPWKINEADGAFYGPKIDIGVFDALKRKFQCATLQLDFQLPLRFKLTYSAEDEAKLERPVMIHRAILGSVERMFAILLEHYNGKWPLWLSPRQAIVCCVSANSLTYAKEVHAQIRAAGFHVDIDMTDRTIQKKVREAQLAQFNYILVVGAKEAESGKVSLRVRDRADLSTENIADVIARFNDEVASFQ

SEQ ID NO: 10318 - protein, 708 aa, Triticum aestivum
  misc_feature (1)..(708): Ceres Seq. ID no. 15221008
MLICLRRGLSLLRQRQPRLPPRLLLHLSAEPMGDPAVAPDAAYLEAVTQKRIRIFEEIQARQALERLNIGGDPIRVTLPDGAIKEGKKWISTPMDIASGISTGLAASCLIAQVNGVLWDMTRPLEGDCDLKLFKFDSNEGRDTFWHSSAHILGESIERVYGCKLCIGPCTTRGEGFYYDAHYKDLTLNDTHFGLIDKQAKKAVAEKQPFERIEVSRAEALEVFAENEFKVEIINELPEDKTITVYRCGPLVDLCRGPHIPNTSFVKAFACLKASASYWRGKADRESLQRVYGISFPDSKRLKEYQHMIEEAKKRDHRLLGQSQKLFFFHPLSPGSCFFLPNGAIIYNKLMDFLRKEYRERGYQEVLSPNIYNMQLWETSGHAANYKDNMFVFEIEKQEFGLKPMNCPGHCLMFGHEVRSYRELPLRMADFGVLHRNELSGALTGLTRVRRFQQDDAHIFCTESQIKDEVRSCLEFIDYVYKIFGFEYELELSTRPEKYLGDIETWNKAEQQLTEALNEFGKPWKINEADGAFYGPKIDIGVFDALKRKFQCATLQLDFQLPLRFKLTYSAEDEAKLERPVMIHRAILGSVERMFAILLEHYNGKWPLWLSPRQAIVCCVSANSLTYAKEVHAQIRAAGFHVDIDMTDRTIQKKVREAQLAQFNYILVVGAKEAESGKVSLRVRDRADLSTENIADVIARFNDEVASFQ

SEQ ID NO: 10319 - protein, 677 aa, Triticum aestivum
  misc_feature (1)..(677): Ceres Seq. ID no. 15221009
MGDPAVAPDAAYLEAVTQKRIRIFEEIQARQALERLNIGGDPIRVTLPDGAIKEGKKWISTPMDIASGISTGLAASCLIAQVNGVLWDMTRPLEGDCDLKLFKFDSNEGRDTFWHSSAHILGESIERVYGCKLCIGPCTTRGEGFYYDAHYKDLTLNDTHFGLIDKQAKKAVAEKQPFERIEVSRAEALEVFAENEFKVEIINELPEDKTITVYRCGPLVDLCRGPHIPNTSFVKAFACLKASASYWRGKADRESLQRVYGISFPDSKRLKEYQHMIEEAKKRDHRLLGQSQKLFFFHPLSPGSCFFLPNGAIIYNKLMDFLRKEYRERGYQEVLSPNIYNMQLWETSGHAANYKDNMFVFEIEKQEFGLKPMNCPGHCLMFGHEVRSYRELPLRMADFGVLHRNELSGALTGLTRVRRFQQDDAHIFCTESQIKDEVRSCLEFIDYVYKIFGFEYELELSTRPEKYLGDIETWNKAEQQLTEALNEFGKPWKINEADGAFYGPKIDIGVFDALKRKFQCATLQLDFQLPLRFKLTYSAEDEAKLERPVMIHRAILGSVERMFAILLEHYNGKWPLWLSPRQAIVCCVSANSLTYAKEVHAQIRAAGFHVDIDMTDRTIQKKVREAQLAQFNYILVVGAKEAESGKVSLRVRDRADLSTENIADVIARFNDEVASFQ

SEQ ID NO: 10320 - DNA, 686 bp, Triticum aestivum
  misc_feature (1)..(686): Ceres Seq. ID no. 13590885
atcacttcaccaccaccacaaaccctatccccattaacccgctccaaaaccctgagctgcgcacccaccggcgatgtcggcgacggccatccgctccggcgagctcctcgcttttcccgccgcgctgaggcgtggcctgcccgtggcttctgcctcggtggtcgcgttccggttgagggcgccagtggccgggcgcgtggcggtcagggttgtcgcggcggcggcggagggggcaggggcggaggcggaggcggaagggaagccgaagccgaagaagaagagggcagcgagcgggatcatgaagcctaagccgatttctccggagctaagggagtttgtcggaggcgcggcggagctgccccggacagaggcgctcaagatcatctgggcgcacatcaagggaaacaacctccaggatcccgagaacaagaagataatagtctgcgatgagaaactgaagaagatatttggagggcgtgaccgtgttgggtttcttgagatctctgggctcctcaatccccatttccagaaatgatagggtttatgtagatgttgcactttttctgtattagctaagacagttgtatcagcatatttagctgaacctggtatggagggtccgtaattctggtttgagaatggtacgtctagtatttgcagtaaatggctttgctggtttttggccc

SEQ ID NO: 10321 - protein, 153 aa, Triticum aestivum
  misc_feature (1)..(153): Ceres Seq. ID no. 13590886
MSATAIRSGELLAFPAALRRGLPVASASVVAFRLRAPVAGRVAVRVVAAAAEGAGAEAEAEGKPKPKKKRAASGIMKPKPISPELREFVGGAAELPRTEALKIIWAHIKGNNLQDPENKKIIVCDEKLKKIFGGRDRVGFLEISGLLNPHFQK

SEQ ID NO: 10322 - protein, 102 aa, Triticum aestivum
  misc_feature (1)..(102): Ceres Seq. ID no. 13590887
ITSPPPQTLSPLTRSKTLSCAPTGDVGDGHPLRRAPRFSRRAEAWPARGFCLGGRVPVEGASGRARGGQGCRGGGGGGRGGGGGGREAEAEEEEGSERDHEA

SEQ ID NO: 10323 - protein, 78 aa, Triticum aestivum
  misc_feature (1)..(78): Ceres Seq. ID no. 13590888
MKPKPISPELREFVGGAAELPRTEALKIIWAHIKGNNLQDPENKKIIVCDEKLKKIFGGRDRVGFLEISGLLNPHFQK

SEQ ID NO: 10324 - DNA, 1174 bp, Triticum aestivum
  misc_feature (1)..(1174): Ceres Seq. ID no. 13590940
acccctttcccttcgcctccaaaccccagcggcagaaccttatcccctgcgagtcttatccccctctgcaatggcggccaccctcttctccaccgcgctctcgcaccacttcatcccgctcccctccgccgccaggcccgccgccgcctcggcctccttcgcctgcggcccgctgcgcgccgtgtcggcgctgctggcgccgcggaggcggctcctgctgcccgtggccgtggccgtgtcgtccgagttcgggacggaggacgccgaggaggagcagagcgagggcgagggcggcggcgactccgaggccgagtactccgaggacctcaaggtcttcgtcggcaacctccccttcaccgtggacagcgcgcagctcgccgggctcttcgagcaggccggctccgtcgagatggtcgaggttgtatacgatagaatgaccggacggagccgtggatttggattcgtcacaatgggttcagctgaggaagttgctgccgccgttgagcaattcaatggctatacgttccaaggaagacctctcagggttaactccggaccaccaccacccagagatgaattcgcacccagaacaccgaggaccatgggcggcggtggcggcggcggcagctttgattcagctaacaagctctacgtcggaaacctatcctggggtgttgacaactcaacgctcgagaacctgttcagcgaacaaggaaaggtgcttgatgctaaggtcatctatgaccgcgacagtggcaggtcgaggggtttcggtttcgtcacctatggctctgccgacgaggtcaacaatgcgatctcaaacctcgacggcgtggaccttgacggcaggcagatccgggttaccgtcgcagagtcgaagccgagggagcaaaggcggttttaagagatcctgacgctggttagagattaatcatgtgttccgtaagtgttagtttgtagtttctactactattttctcgcggttgatgagagagactgggaagtgaatttgtataccggaagatttttgtcagccgtgcaactcgttgcgcctcttgatagaaaaagtagaaattttgtcaaagtcattcttatatgcttagcagcagagatgatgtacgataccattaaaaacccatctgaatgtttgttgatgctgtgtatggctctctcc

SEQ ID NO: 10325 - protein, 300 aa, Triticum aestivum
  misc_feature (1)..(300): Ceres Seq. ID no. 15221016
PLSLRLQTPAAEPYPLRVLSPSAMAATLFSTALSHHFIPLPSAARPAAASASFACGPLRAVSALLAPRRRLLLPVAVAVSSEFGTEDAEEEQSEGEGGGDSEAEYSEDLKVFVGNLPFTVDSAQLAGLFEQAGSVEMVEVVYDRMTGRSRGFGFVTMGSAEEVAAAVEQFNGYTFQGRPLRVNSGPPPPRDEFAPRTPRTMGGGGGGGSFDSANKLYVGNLSWGVDNSTLENLFSEQGKVLDAKVIYDRDSGRSRGFGFVTYGSADEVNNAISNLDGVDLDGRQIRVTVAESKPREQRRF

SEQ ID NO: 10326 - protein, 277 aa, Triticum aestivum
  misc_feature (1)..(277): Ceres Seq. ID no. 15221017
MAATLFSTALSHHFIPLPSAARPAAASASFACGPLRAVSALLAPRRRLLLPVAVAVSSEFGTEDAEEEQSEGEGGGDSEAEYSEDLKVFVGNLPFTVDSAQLAGLFEQAGSVEMVEVVYDRMTGRSRGFGFVTMGSAEEVAAAVEQFNGYTFQGRPLRVNSGPPPPRDEFAPRTPRTMGGGGGGGSFDSANKLYVGNLSWGVDNSTLENLFSEQGKVLDAKVIYDRDSGRSRGFGFVTYGSADEVNNAISNLDGVDLDGRQIRVTVAESKPREQRRF

SEQ ID NO: 10327 - protein, 164 aa, Triticum aestivum
  misc_feature (1)..(164): Ceres Seq. ID no. 15221018
MVEVVYDRMTGRSRGFGFVTMGSAEEVAAAVEQFNGYTFQGRPLRVNSGPPPPRDEFAPRTPRTMGGGGGGGSFDSANKLYVGNLSWGVDNSTLENLFSEQGKVLDAKVIYDRDSGRSRGFGFVTYGSADEVNNAISNLDGVDLDGRQIRVTVAESKPREQRRF

SEQ ID NO: 10328 - DNA, 1112 bp, Triticum aestivum
  misc_feature (1)..(1112): Ceres Seq. ID no. 13591076
tttctcttccttcgttcgttctggtcgtttcggtgaatcgatctcgcccaccaaacccgaccacccgatcccccggacagccggagagcgaggcgaagcggcgaggcgtaccgcaaccatgctcagggtcgcaggtcgacgcatatcctcccacctcgcatggcgccccgccgcggccgcctccgccggcagcagccccctcgccggcggcctccctggcgacgacttcccccgggaccagaatccgcgcttcgccatcgaatcacccttctacgtcgctgccagaggcttttcggctgaatctcttgttccgaggaaccaggatgtagagttggctgagctcacaccaactacggcagctctgaagaatccctgtgccaaaattgtgtacgatgagtataaccacgagaggtacccacctggtgaccccagcaagcgtgcctttgcctactttgtgttgagtggtgggagatttgtgtacgcatccttgttgcgtttgctcgtcttaaagtttgtcctgagtatgtcagcaagtaaggatgtgcttgccctcgcttcccttgaggttgacctgtcaagtattgagcccggtaccactgtgactgtaaagtggcggggcaagccagttttcatcaggcgcaggaccgaagatgatgtgaagctggccaacagcgttgatgttacatctctccgtgacccacaggaggatgcggtgcgtgtcaagaaccctgagtggcttgttgtcattggtgtctgcactcacttgggctgcattcccctccccaactctggggacttcggtggctggttctgcccatgtcatggctcacactacgacatctcaggtagaatcaggaagggcccagcaccatacaacctggaggtcccgacctacagtttcttggaagataacaaaatgcttattggctaagagcactggccgtaagattaatccctatggtgctgtgctgccattttgtgttggtttgaccattcgtcttcttgttgctcggatagtcctatgatggactgttatcttagtgcagtactcttactagcactggatagtaaagaataatctgctgctactttggtacttttaattaatttcc

SEQ ID NO: 10329 - protein, 309 aa, Triticum aestivum
  misc_feature (1)..(309): Ceres Seq. ID no. 13591077
FSSFVRSGRFGESISPTKPDHPIPRTAGERGEAARRTATMLRVAGRRISSHLAWRPAAAASAGSSPLAGGLPGDDFPRDQNPRFAIESPFYVAARGFSAESLVPRNQDVELAELTPTTAALKNPCAKIVYDEYNHERYPPGDPSKRAFAYFVLSGGRFVYASLLRLLVLKFVLSMSASKDVLALASLEVDLSSIEPGTTVTVKWRGKPVFIRRRTEDDVKLANSVDVTSLRDPQEDAVRVKNPEWLVVIGVCTHLGCIPLPNSGDFGGWFCPCHGSHYDISGRIRKGPAPYNLEVPTYSFLEDNKMLIG

SEQ ID NO: 10330 - protein, 270 aa, Triticum aestivum
  misc_feature (1)..(270): Ceres Seq. ID no. 13591078
MLRVAGRRISSHLAWRPAAAASAGSSPLAGGLPGDDFPRDQNPRFAIESPFYVAARGFSAESLVPRNQDVELAELTPTTAALKNPCAKIVYDEYNHERYPPGDPSKRAFAYFVLSGGRFVYASLLRLLVLKFVLSMSASKDVLALASLEVDLSSIEPGTTVTVKWRGKPVFIRRRTEDDVKLANSVDVTSLRDPQEDAVRVKNPEWLVVIGVCTHLGCIPLPNSGDFGGWFCPCHGSHYDISGRIRKGPAPYNLEVPTYSFLEDNKMLIG

SEQ ID NO: 10331 - DNA, 1666 bp, Triticum aestivum
  misc_feature (1)..(1666): Ceres Seq. ID no. 13591174
aacgatcccttctccctcttccagatccattcctctcccagccccaggcctcgctcgcctcccccgttgggacggagagagctcggaagggcagggagccatgggttcctgggtccttcttgctgtggttctcgggtccttggtgggagctgcgcgcggctccgagccgtggtcgaacggcacgcaggtctactccaccaatgccaactccggcagcggcagcaacggcgccttcgtcgccctcactctcatccagtccgcggccgccaagggagccgtatgcttggatggaagtttaccgggttaccacctacaccggggatctggatcagggtcaaacaattggcttgtcaatctggagggtggaggatggtgcaatgatgttaaaagctgtgtgttccgcaagggcagtcggcgtgggtcatcgaaccacatggagaggcaactccagtttacaggcataatgagtaacaggcctgaagaaaatcctgatttctacaactggaacagagtgaaggttcggtattgtgatggtggatccttcaccggtgatggggctgacgcggcttcaggcctttatttccgaggtcagcgtatttggcaggctgctatcgatgacttgatggcccaaggaatgcgttctgctagtcaggcccttctttcgggatgctctgctgggggtgcttctgccatacttcactgtgatgagttccgtggaatgtttccatcaaataccagagtcaagtgcctcgctgatgctggaatgttccttgactctgttgacattgcgggtcgtcgagaaatgagagatttgttcaatggcattgtgagattgcagggttctggaagaagcttgcctcggtcttgtacctctcgcatggataaaacctcatgctttttcccgcagaacgtgttgccaaatattcaaactccgacttttatcttgaacactgcttacgacgtgtggcagcttcaagagagtttggctcccagaacggctgatccccggggtctatggcaaagttgcaagcagaattacgcctcttgcaatagcaatcagcttcagtttttaaatggcttcaggaatgaaatgcttaacgctgtgaagggtttctctgggtcagggcagaatggggtgtttatcaactcttgtttcgcccactgccagagcgagagacaggatacatggtactcaagcaagtctcctcgtcttggcaacaagagaatcgcagaagcggtcggtgactggttcttcgagaggggcaacgccaagtacaccgactgcgcgtacccttgtgacggcacgtgccatcaccttgtgttcaaagggaggcatctctaatacgatcatatcctttgataccagcagctgaagtgctgaaaacccagcgagtgggtacaaccgaaaaaaggaaggtatagatagaagaagatgggtgcaagttggtggcttgcccggcgtccatcgcctcagatatgatagggcagggcctcacatgcaaacgcgatgaggtcctctgcgttattttagtttcatatatcgtcgattctttccattgccaattgctactccctcgatgtatctgaatatttgaaccacactggtgtataaccttacatgttcatgtattgaatgtggtaatatgaaattatgaataatgtgctt

SEQ ID NO: 10332 - protein, 446 aa, Triticum aestivum
  misc_feature (1)..(446): Ceres Seq. ID no. 15221028
TIPSPSSRSIPLPAPGLARLPRWDGESSEGQGAMGSWVLLAVVLGSLVGAARGSEPWSNGTQVYSTNANSGSGSNGAFVALTLIQSAAAKGAVCLDGSLPGYHLHRGSGSGSNNWLVNLEGGGWCNDVKSCVFRKGSRRGSSNHMERQLQFTGIMSNRPEENPDFYNWNRVKVRYCDGGSFTGDGADAASGLYFRGQRIWQAAIDDLMAQGMRSASQALLSGCSAGGASAILHCDEFRGMFPSNTRVKCLADAGMFLDSVDIAGRREMRDLFNGIVRLQGSGRSLPRSCTSRMDKTSCFFPQNVLPNIQTPTFILNTAYDVWQLQESLAPRTADPRGLWQSCKQNYASCNSNQLQFLNGFRNEMLNAVKGFSGSGQNGVFINSCFAHCQSERQDTWYSSKSPRLGNKRIAEAVGDWFFERGNAKYTDCAYPCDGTCHHLVFKGRHL

SEQ ID NO: 10333 - protein, 413 aa, Triticum aestivum
  misc_feature (1)..(413): Ceres Seq. ID no. 15221029
MGSWVLLAVVLGSLVGAARGSEPWSNGTQVYSTNANSGSGSNGAFVALTLIQSAAAKGAVCLDGSLPGYHLHRGSGSGSNNWLVNLEGGGWCNDVKSCVFRKGSRRGSSNHMERQLQFTGIMSNRPEENPDFYNWNRVKVRYCDGGSFTGDGADAASGLYFRGQRIWQAAIDDLMAQGMRSASQALLSGCSAGGASAILHCDEFRGMFPSNTRVKCLADAGMFLDSVDIAGRREMRDLFNGIVRLQGSGRSLPRSCTSRMDKTSCFFPQNVLPNIQTPTFILNTAYDVWQLQESLAPRTADPRGLWQSCKQNYASCNSNQLQFLNGFRNEMLNAVKGFSGSGQNGVFINSCFAHCQSERQDTWYSSKSPRLGNKRIAEAVGDWFFERGNAKYTDCAYPCDGTCHHLVFKGRHL

SEQ ID NO: 10334 - protein, 302 aa, Triticum aestivum
  misc_feature (1)..(302): Ceres Seq. ID no. 15221030
MERQLQFTGIMSNRPEENPDFYNWNRVKVRYCDGGSFTGDGADAASGLYFRGQRIWQAAIDDLMAQGMRSASQALLSGCSAGGASAILHCDEFRGMFPSNTRVKCLADAGMFLDSVDIAGRREMRDLFNGIVRLQGSGRSLPRSCTSRMDKTSCFFPQNVLPNIQTPTFILNTAYDVWQLQESLAPRTADPRGLWQSCKQNYASCNSNQLQFLNGFRNEMLNAVKGFSGSGQNGVFINSCFAHCQSERQDTWYSSKSPRLGNKRIAEAVGDWFFERGNAKYTDCAYPCDGTCHHLVFKGRHL

SEQ ID NO: 10335 - DNA, 1139 bp, Triticum aestivum
  misc_feature (1)..(1139): Ceres Seq. ID no. 13591175
acatgcggctgatcaccgcagacggtgagaggcaaaacatggactttgtcttcgggtgtgcacatgatcagcaaggaaagcttctggactcaccagcaagtactgatgggatccttggcctcagcaatggggcaatgagcctccctacccagctagccaagcaagggatcatttccaacgttttcggccattgcatcgccacggatcccagcagtagtggctacatgtttctcggtgatgattacgttcccagatggggaatgacatgggttcccgtccgcaatggtccagaggacgtgtacagcacggtagtacagaaggtgaactatggaggtcaggagcttaatgtgcgagagcaggctgggaagctgactcaagtgatcttcgacagcgggagctcatacacttattttccacatgaaatatacacaagcctgattgcttcgcttgaagcggcctctccaggctttgcacgcgatgaatcagatcaaacgctgcctttctgcatgaagcctaattttccagtgaggtctgtggatgatgtgaagcaactgttcaagccattgcttctgcatttcagcaaaacatggtttgtgatcccaagaacgttcgcaattgctcccgagaactacttgatcatcagcgacaagggcaatgtctgcctaggggtgcttgatggaactgagattggccacagctcaacaatagtaattggagatgtttccctctgtgggaagttggttgcgtatgacaacgacgagaatcagatcggatgggctcagtcaggctgcaccaggccacagaaagcaagcagggttccgttcttcctttcgagagcattgcgcagtcaacttctttaaatggcacagacagatgatcaccccgtgttcgcctgaccatgcgctcaccttttcgacgcgcaattctgcgaccgaagctgccataatcatataatggatgtagttaaacaagggatataggaaaaccaaattggaagaaaggtgaatagatatagccagtacctgtaatttttctctgctgtatatataccaaagaagcagaactctgcatatctatggatatgctgtagagtatatctcatccacttgtaagactaagtggtgaagcatatcaatttc

SEQ ID NO: 10336 - protein, 285 aa, Triticum aestivum
  misc_feature (1)..(285): Ceres Seq. ID no. 13591176
MRLITADGERQNMDFVFGCAHDQQGKLLDSPASTDGILGLSNGAMSLPTQLAKQGIISNVFGHCIATDPSSSGYMFLGDDYVPRWGMTWVPVRNGPEDVYSTVVQKVNYGGQELNVREQAGKLTQVIFDSGSSYTYFPHEIYTSLIASLEAASPGFARDESDQTLPFCMKPNFPVRSVDDVKQLFKPLLLHFSKTWFVIPRTFAIAPENYLIISDKGNVCLGVLDGTEIGHSSTIVIGDVSLCGKLVAYDNDENQIGWAQSGCTRPQKASRVPFFLSRALRSQLL

SEQ ID NO: 10337 - protein, 273 aa, Triticum aestivum
  misc_feature (1)..(273): Ceres Seq. ID no. 13591177
MDFVFGCAHDQQGKLLDSPASTDGILGLSNGAMSLPTQLAKQGIISNVFGHCIATDPSSSGYMFLGDDYVPRWGMTWVPVRNGPEDVYSTVVQKVNYGGQELNVREQAGKLTQVIFDSGSSYTYFPHEIYTSLIASLEAASPGFARDESDQTLPFCMKPNFPVRSVDDVKQLFKPLLLHFSKTWFVIPRTFAIAPENYLIISDKGNVCLGVLDGTEIGHSSTIVIGDVSLCGKLVAYDNDENQIGWAQSGCTRPQKASRVPFFLSRALRSQLL

SEQ ID NO: 10338 - protein, 241 aa, Triticum aestivum
  misc_feature (1)..(241): Ceres Seq. ID no. 13591178
MSLPTQLAKQGIISNVFGHCIATDPSSSGYMFLGDDYVPRWGMTWVPVRNGPEDVYSTVVQKVNYGGQELNVREQAGKLTQVIFDSGSSYTYFPHEIYTSLIASLEAASPGFARDESDQTLPFCMKPNFPVRSVDDVKQLFKPLLLHFSKTWFVIPRTFAIAPENYLIISDKGNVCLGVLDGTEIGHSSTIVIGDVSLCGKLVAYDNDENQIGWAQSGCTRPQKASRVPFFLSRALRSQLL

SEQ ID NO: 10339 - DNA, 1949 bp, Triticum aestivum
  misc_feature (1)..(1949): Ceres Seq. ID no. 13595871
acacatgcacatcagccattcacccccggcacaacaagaggccgcacaaaaccctcctctctgatcctccaaagcggcggcgcggtgggcatggatggtgccggtatggcgacactgccggaggccaacacgtcgcccgcgcccaacggcggcggctgcggcgggatcagggttgagaattgctacgtcttcaagagcaggctgcaggagtacgcgcagaaagccggcctcatgacgccagagtaccaaaccctcaaggaggggccttcccatgagccaatcttcaagtcctccgtcgtgataaacaacaccaagtatgattctttgcctgggttcttcagccggaaggctgcagagcagtcggctgccgaagtcgcgctcatggaaatcggcaagtctgtggtgttaccaaccaatgcaaccatccccgcagtccaagaaactggtctgtgcaagaatcttcttcaggagtatgctcagaagatgaattatgctattccatcttatatttgcaacaaacaaggtccatacatatgcaccgtagagattggtggaatacaatacattggtgctacagcacggacaaagaaagaggcagagataaaagctgcccgaactgctcttcttgcaatccaagttgcaggccaatcagagggttgtgcaaatggtaccacaaaatatattgttgtgcctggcaaaaggcaaggtaaggagatcgagaaaaagcctgttgaaactccaaaatcacttaagaccaagaaaggtggtttcaagaagcaacggaacaagaataaattcatcaagaagaatggccaagaagttaacgaggaaaaggatgagactggagtgcctggagatgctcatcattcagatgtccctatgaagccagctgtaacaacagaagatccagtgaccaacactgtaatgatccagcctgatgaagcttggccattcgaacatgaaccaaccggtgacactgcaatgctgcaacctattgaagacgcttggccatccaaacatgaaccgaccggtgagactgcaatgctgcaacctgatggcgaagctacaaaagtggaacaggagcaactcagtgacacagcaatgctgcaacctgatgatgaaggtggaagagtagaacatgagccactcagcaacgctccaatggtgctacgtaatgaggaagctagaaatgtaaagcaggaagcactcatcagcactgcaatgccacaacctcacatggaagatagaagagtgggagcagagccacctagagatgctgcaatggtgcaacctaatgatgaagctagatgcataaagcaggagctactaattgacgctgcaatgcctctccccaatgaggaggccggagcagctgcaaatcctgtgccattgagtgactccataacagcgcaacctaatgcagtgactacaaatataaatgaggagtcactgaggaatgcagcatcagtgcaacataatgaagaagctaggaccgtaaaccaggagccacccagcagtgcttcactacagcagccaaaggaacccagagtcgagaacggtgaatttgtttctgaaaacaaggaccaaactctgggagatgcatctcgtgaggcaaataggtccaacgaagatgtgccagaaaagtgctcagataattcatctgcttttacaagtgtggaatgatatgtgctgtttgaatcaaatgcaatggccttccagttttacatcttgattttgcaaactagtaaaacctgaatagctggtttctcattttagaaatataattgcataacagatggatgtacgtggaccgaccgaggtccggttggtggtccatgttggccattagttattaggaagcttgcatgcctgatggtatgatcttggatccatggatgatgtatctcaagttgcttatctgatcaatgaactattagtgaactattatt

SEQ ID NO: 10340 - protein, 560 aa, Triticum aestivum
  misc_feature (1)..(560): Ceres Seq. ID no. 15221678
THAHQPFTPGTTRGRTKPSSLILQSGGAVGMDGAGMATLPEANTSPAPNGGGCGGIRVENCYVFKSRLQEYAQKAGLMTPEYQTLKEGPSHEPIFKSSVVINNTKYDSLPGFFSRKAAEQSAAEVALMEIGKSVVLPTNATIPAVQETGLCKNLLQEYAQKMNYAIPSYICNKQGPYICTVEIGGIQYIGATARTKKEAEIKAARTALLAIQVAGQSEGCANGTTKYIVVPGKRQGKEIEKKPVETPKSLKTKKGGFKKQRNKNKFIKKNGQEVNEEKDETGVPGDAHHSDVPMKPAVTTEDPVTNTVMIQPDEAWPFEHEPTGDTAMLQPIEDAWPSKHEPTGETAMLQPDGEATKVEQEQLSDTAMLQPDDEGGRVEHEPLSNAPMVLRNEEARNVKQEALISTAMPQPHMEDRRVGAEPPRDAAMVQPNDEARCIKQELLIDAAMPLPNEEAGAAANPVPLSDSITAQPNAVTTNINEESLRNAASVQHNEEARTVNQEPPSSASLQQPKEPRVENGEFVSENKDQTLGDASREANRSNEDVPEKCSDNSSAFTSVE

SEQ ID NO: 10341 - protein, 530 aa, Triticum aestivum
  misc_feature (1)..(530): Ceres Seq. ID no. 15221679
MDGAGMATLPEANTSPAPNGGGCGGIRVENCYVFKSRLQEYAQKAGLMTPEYQTLKEGPSHEPIFKSSVVINNTKYDSLPGFFSRKAAEQSAAEVALMEIGKSVVLPTNATIPAVQETGLCKNLLQEYAQKMNYAIPSYICNKQGPYICTVEIGGIQYIGATARTKKEAEIKAARTALLAIQVAGQSEGCANGTTKYIVVPGKRQGKEIEKKPVETPKSLKTKKGGFKKQRNKNKFIKKNGQEVNEEKDETGVPGDAHHSDVPMKPAVTTEDPVTNTVMIQPDEAWPFEHEPTGDTAMLQPIEDAWPSKHEPTGETAMLQPDGEATKVEQEQLSDTAMLQPDDEGGRVEHEPLSNAPMVLRNEEARNVKQEALISTAMPQPHMEDRRVGAEPPRDAAMVQPNDEARCIKQELLIDAAMPLPNEEAGAAANPVPLSDSITAQPNAVTTNINEESLRNAASVQHNEEARTVNQEPPSSASLQQPKEPRVENGEFVSENKDQTLGDASREANRSNEDVPEKCSDNSSAFTSVE

SEQ ID NO: 10342 - protein, 525 aa, Triticum aestivum
  misc_feature (1)..(525): Ceres Seq. ID no. 15221680
MATLPEANTSPAPNGGGCGGIRVENCYVFKSRLQEYAQKAGLMTPEYQTLKEGPSHEPIFKSSVVINNTKYDSLPGFFSRKAAEQSAAEVALMEIGKSVVLPTNATIPAVQETGLCKNLLQEYAQKMNYAIPSYICNKQGPYICTVEIGGIQYIGATARTKKEAEIKAARTALLAIQVAGQSEGCANGTTKYIVVPGKRQGKEIEKKPVETPKSLKTKKGGFKKQRNKNKFIKKNGQEVNEEKDETGVPGDAHHSDVPMKPAVTTEDPVTNTVMIQPDEAWPFEHEPTGDTAMLQPIEDAWPSKHEPTGETAMLQPDGEATKVEQEQLSDTAMLQPDDEGGRVEHEPLSNAPMVLRNEEARNVKQEALISTAMPQPHMEDRRVGAEPPRDAAMVQPNDEARCIKQELLIDAAMPLPNEEAGAAANPVPLSDSITAQPNAVTTNINEESLRNAASVQHNEEARTVNQEPPSSASLQQPKEPRVENGEFVSENKDQTLGDASREANRSNEDVPEKCSDNSSAFTSVE

SEQ ID NO: 10343 - DNA, 796 bp, Triticum aestivum
  misc_feature (1)..(796): Ceres Seq. ID no. 13595872
cctatcaaaaattcgcacgtctggcgagctctcgcagccatccaatatcaacaactctggtgcccaagcagcaagcagtgagcgtgctcttcttgagacccaaagtcgccaagttagaagctgcacaaaggtaattatgacgggaatggcagttggaagagcagtggacttgacaaagctatatgggtatgttgatcttcactgcaagttggaggagatgtttgatatacagggggagctatgttccacactcaagaaatggcaggttgtttatgccgatgaagaggatgatatgatgcttgttggggacgatccttgggacgagttttgcaacatggcgaaaagaatttacatttatacatatgaggaggccaagcaattggcaccaaaggccaccaagctcagccgtgtgaactcatcacatgaatcggtcactccgcagagtggctcagactatccagcctcgtttgccaatgcagattgctgaatgctaagttgctaactttgctctaattacgctctttcttcctttgatcattcggggaaattgcccatgatcatccgctctactcaggagagctatgattgcttcacggacaaaagacattgtgtgcgttgctgtggtgggtttggtcctgtgtcagcaaagaggcattctggcatttcgtgacgtttagtcgccagttgttttatgcgagaactggcggtgagccgcagtatgcatattgccgtagactttgccttcgttgcttgctacagtagtaaataggcgtatgtatatattgatcttttgggt

SEQ ID NO: 10344 - protein, 161 aa, Triticum aestivum
  misc_feature (1)..(161): Ceres Seq. ID no. 13595873
LSKIRTSGELSQPSNINNSGAQAASSERALLETQSRQVRSCTKVIMTGMAVGRAVDLTKLYGYVDLHCKLEEMFDIQGELCSTLKKWQVVYADEEDDMMLVGDDPWDEFCNMAKRIYIYTYEEAKQLAPKATKLSRVNSSHESVTPQSGSDYPASFANADC

SEQ ID NO: 10345 - protein, 116 aa, Triticum aestivum
  misc_feature (1)..(116): Ceres Seq. ID no. 13595874
MTGMAVGRAVDLTKLYGYVDLHCKLEEMFDIQGELCSTLKKWQVVYADEEDDMMLVGDDPWDEFCNMAKRIYIYTYEEAKQLAPKATKLSRVNSSHESVTPQSGSDYPASFANADC

SEQ ID NO: 10346 - protein, 113 aa, Triticum aestivum
  misc_feature (1)..(113): Ceres Seq. ID no. 13595875
MAVGRAVDLTKLYGYVDLHCKLEEMFDIQGELCSTLKKWQVVYADEEDDMMLVGDDPWDEFCNMAKRIYIYTYEEAKQLAPKATKLSRVNSSHESVTPQSGSDYPASFANADC

SEQ ID NO: 10347 - DNA, 1305 bp, Triticum aestivum
  misc_feature (1)..(1305): Ceres Seq. ID no. 13595877
attccaagctgcctaccgcacacactagccgcgagcagtaccatcactactggccaaaacgtgaccccctccagtcaacttcctcgtcgccaccacacgaccgcacctctcccatggcgtcctcctcgccgccgcacgtcgtggaggacgtgcccccgttcctgcagctcctcagcgacggcacggtgatccgcttcactgacgcctacccgctccccatcccgtcgccgccgcccggccagcccgtcgtcgactggaaggacgttctgtacgacgccagccacggcctcaagctccgcatctacaggccggcggcggcctcctcctccgggaacaagctcccggtgatcgtctacttccacggcggcgggtacagcatcggtagcttcgacatgcccaacttccatgcgtgctgcgtccgcctcgccggcgagctccccgctttggtgctctctgcagactaccgcctcgcccccgagcaccgcttccccgcgggtctcgacgacgcggcgaacgtcgtgtcctgggtgcgcgcccaggcagcggctgttggggacaacgccgacccatggctctcggagacggcgaacttcggccgggtgttcgtcgccggggactcggccggcgggggcgtcgtccaccacacggccgtccgcctcgcgtcgggccggctaggccccctcgaccccgttcgcgtcgccgggtgcgcgatgctctgcccgatgttcggcggggaggagaggacggcgtcggaggcggagttcccgccgggcccgttcctgtcgctgccggcggtcgaccaggcgtggcgcctggtgctgccgcctgggtccacgagggaccacccgctggccaacccgttcggcccggacagcccggcccttgacggcgtcgcgctgcctccgatgctcgttgtggccgccgcgcgcgacctgctgcgcgaccgcgccgcggactatgccgcgaggctcaaggccatggggaagccggtggagctcgtggagttcgaggggcagcaccacgggttcttcgcggtcgagccgtacggcgacgccggcagcgaggtggtccggctcgtcaaacggtttgtctacggcaacggcggcgcctccgactaaattggagatcgagcaaagctgttgagggctcctttgattcaaaggatatctttagaatttttgaaggattgaaatttttaggaattttttttatattggccttttgattcatagaattggatcctataggaatttatcctatgaaatcttttgtattacatttcataggaaatctaacatccacttc

SEQ ID NO: 10348 - protein, 371 aa, Triticum aestivum
  misc_feature (1)..(371): Ceres Seq. ID no. 13595878
SKLPTAHTSREQYHHYWPKRDPLQSTSSSPPHDRTSPMASSSPPHVVEDVPPFLQLLSDGTVIRFTDAYPLPIPSPPPGQPVVDWKDVLYDASHGLKLRIYRPAAASSSGNKLPVIVYFHGGGYSIGSFDMPNFHACCVRLAGELPALVLSADYRLAPEHRFPAGLDDAANVVSWVRAQAAAVGDNADPWLSETANFGRVFVAGDSAGGGVVHHTAVRLASGRLGPLDPVRVAGCAMLCPMFGGEERTASEAEFPPGPFLSLPAVDQAWRLVLPPGSTRDHPLANPFGPDSPALDGVALPPMLVVAAARDLLRDRAADYAARLKAMGKPVELVEFEGQHHGFFAVEPYGDAGSEVVRLVKRFVYGNGGASD

SEQ ID NO: 10349 - protein, 334 aa, Triticum aestivum
  misc_feature (1)..(334): Ceres Seq. ID no. 13595879
MASSSPPHVVEDVPPFLQLLSDGTVIRFTDAYPLPIPSPPPGQPVVDWKDVLYDASHGLKLRIYRPAAASSSGNKLPVIVYFHGGGYSIGSFDMPNFHACCVRLAGELPALVLSADYRLAPEHRFPAGLDDAANVVSWVRAQAAAVGDNADPWLSETANFGRVFVAGDSAGGGVVHHTAVRLASGRLGPLDPVRVAGCAMLCPMFGGEERTASEAEFPPGPFLSLPAVDQAWRLVLPPGSTRDHPLANPFGPDSPALDGVALPPMLVVAAARDLLRDRAADYAARLKAMGKPVELVEFEGQHHGFFAVEPYGDAGSEVVRLVKRFVYGNGGASD

SEQ ID NO: 10350 - protein, 241 aa, Triticum aestivum
  misc_feature (1)..(241): Ceres Seq. ID no. 13595880
MPNFHACCVRLAGELPALVLSADYRLAPEHRFPAGLDDAANVVSWVRAQAAAVGDNADPWLSETANFGRVFVAGDSAGGGVVHHTAVRLASGRLGPLDPVRVAGCAMLCPMFGGEERTASEAEFPPGPFLSLPAVDQAWRLVLPPGSTRDHPLANPFGPDSPALDGVALPPMLVVAAARDLLRDRAADYAARLKAMGKPVELVEFEGQHHGFFAVEPYGDAGSEVVRLVKRFVYGNGGASD

SEQ ID NO: 10351 - DNA, 1705 bp, Triticum aestivum
  misc_feature (1)..(1705): Ceres Seq. ID no. 13595885
ctaatcgaaaaacccgcttttccctttttctctcatctagaacccccaagaccgggctcactcgccccctcggacctgctagggatggcacgcgccgctgccgccaacctgcgtggcctggtcggcattgcagcggcgggccggaggcgggtgaccgcctccgtcgcgccaccccgcgcgtcgcccggcgggcgcgcattccgggccgtggcctcaggctccgggggcaggacgactcctgaatcctcctcttcgtcctcgccggccctaccacagctgcagccgcggcgcggcttggcgacgagacgagcggtgctgcgtaacttgattagcggcggcttagagagtgaggatggtaagctgagctgcggatattcaagttttaaagggaggagacctactatggaggatcgctacgatgtaaagttcgctaaaatgaagggacagtcagttagcttgtttggtgtatttgatggtcatgcaggagcacttgccgctgaatatctaaaggaacatctgcttgacaaccttatcgagcatcctcagttcctgagaaacccaaagcttgctctgaagacgaccttcctgaaaactgatgctgatttcttagagtcggtaaccactccttatagggaggatggttcgactgctttggctgctgttctggttggtgaccaaatttatgtagcaaatgttggtgattcacgtgctatcgctttaaaaggtggcaaagctatcccactctcagatgaccataaacctaacttaaaggatgagagaacgagaattgagaatgctggaggtggtgttagttatgatggttttacttggagggttgatggaattctggcaatgtcccgtgcatttggcaaccgttcattgaagaattatgtgatagcagagcctgacattcaggaaacgcaggtcagcagtgacttggaatacctggttctcgctacagatggtctttgggatgtcgtgcaaaatgaggatgttatttcacttatgagagcaacggacgagcctgaggtggcggcagtgaagctgacggaaatggcccactctcggcacagctcagacaacattacatgcattgtggtgggatttcaccactgaacagcgtatgatacgtgaccgatattggtggcagtgaagttttttcacttcctctctgatctatggctggtataagacttccaacggctgtgaaagaaactggccaattgttggatctttttgtagggaattttttgcatctgattatcacttagtgaaattgcatcagatccgttaggagttgggtccacaaaatcaacaaaatggagaaggcctagggcatactactactaccactacaccacaacatcatcatatctttataattgaaggagtgtggagtattttctttagtgttttgtgttcagtttagtttattcacaaaaccgaggtctacatggcatactcatgtcatgagatcctaaattggatctagaacttgcaaactacatatttctttgttgcttttatgcaccacgctgaaatatgtatatctgaagtacaaagattatccggaatcttttactctagtattttttttgcgaataaatcttttactctagtatgctggacaaaattcaaaaattaacactagacatgtgttattcagattcgcaccttctgattgtactctatttatttcaaagtg

SEQ ID NO: 10352 - protein, 371 aa, Triticum aestivum
  misc_feature (1)..(371): Ceres Seq. ID no. 13595886
LIEKPAFPFFSHLEPPRPGSLAPSDLLGMARAAAANLRGLVGIAAAGRRRVTASVAPPRASPGGRAFRAVASGSGGRTTPESSSSSSPALPQLQPRRGLATRRAVLRNLISGGLESEDGKLSCGYSSFKGRRPTMEDRYDVKFAKMKGQSVSLFGVFDGHAGALAAEYLKEHLLDNLIEHPQFLRNPKLALKTTFLKTDADFLESVTTPYREDGSTALAAVLVGDQIYVANVGDSRAIALKGGKAIPLSDDHKPNLKDERTRIENAGGGVSYDGFTWRVDGILAMSRAFGNRSLKNYVIAEPDIQETQVSSDLEYLVLATDGLWDVVQNEDVISLMRATDEPEVAAVKLTEMAHSRHSSDNITCIVVGFHH

SEQ ID NO: 10353 - protein, 343 aa, Triticum aestivum
  misc_feature (1)..(343): Ceres Seq. ID no. 13595887
MARAAAANLRGLVGIAAAGRRRVTASVAPPRASPGGRAFRAVASGSGGRTTPESSSSSSPALPQLQPRRGLATRRAVLRNLISGGLESEDGKLSCGYSSFKGRRPTMEDRYDVKFAKMKGQSVSLFGVFDGHAGALAAEYLKEHLLDNLIEHPQFLRNPKLALKTTFLKTDADFLESVTTPYREDGSTALAAVLVGDQIYVANVGDSRAIALKGGKAIPLSDDHKPNLKDERTRIENAGGGVSYDGFTWRVDGILAMSRAFGNRSLKNYVIAEPDIQETQVSSDLEYLVLATDGLWDVVQNEDVISLMRATDEPEVAAVKLTEMAHSRHSSDNITCIVVGFHH

SEQ ID NO: 10354 - protein, 237 aa, Triticum aestivum
  misc_feature (1)..(237): Ceres Seq. ID no. 13595888
MEDRYDVKFAKMKGQSVSLFGVFDGHAGALAAEYLKEHLLDNLIEHPQFLRNPKLALKTTFLKTDADFLESVTTPYREDGSTALAAVLVGDQIYVANVGDSRAIALKGGKAIPLSDDHKPNLKDERTRIENAGGGVSYDGFTWRVDGILAMSRAFGNRSLKNYVIAEPDIQETQVSSDLEYLVLATDGLWDVVQNEDVISLMRATDEPEVAAVKLTEMAHSRHSSDNITCIVVGFHH

SEQ ID NO: 10355 - DNA, 1314 bp, Triticum aestivum
  misc_feature (1)..(1314): Ceres Seq. ID no. 13595922
aaaaaccggcagcgcgcgttcttgctcgggtctcgtctcggaagaaagattccagcaccgagagctcgaggccgacgactcaccttttggaaaggcggggttcttctgaggaccttgcatctccagtagatcgggcgcgtccactgttcccaggaccagagcatcgcacttggcaaagcagaggagaagatggacgctcgcggcggagacgcatcggccattgccctgctgctgtgcgcttgctttctcaccgcccttgcatgtgacagcaatggtgccaagtttgcgtacagcggtcctcttggccccgatcactgggggggattggaccccaacttcacgcgctgcgccatggggacgtaccagtctccggttgatatcaagaccagcgacgtggtttacaacccgatgctggggcctcttcacagggaatacaccgctgcgaatgctaccctcgtagacaacatcttcaacatcgcgctgcgatgcgaggatgctgctgggacggtgcagatcgacggggtgaagtacaagctggacaatatccattggcactctccttcagagcacaccatcaacggcgagaggtttgcggtggagcagcacatggttcacttcagtgacgacggcaacatatccgttgtgtcgatcctgtaccggctcggcaggccagaccctttcctcatgcagctgcaggataagctatcggagctctacgtggaggcctgcagggccgagaaaggtgctccgatccccaccggagtagtaaacatgtggcagctgcggcgttacgccaacatgtactaccggtacgtcgggtcgctgaccacgccgccgtgcaccgagaacatcatctggaacatccacggcagggtgagggagatggcgttggggcaggctgccgccctgatcgcgcccctggaggaaggctaccggcgcaacaacaggccgacgcagccgctcaacggccgcaccgtgcagttctaccgcaggttctggaagaagaaggggagcgggaagccgtaagggctggtcgatgcgcctcgatcgatgtttggagatgatgatgatgctgcagtctctctcgtctttgctctcggttcaggacaaagttatagtagtcgtttatctatctgcaagtcgtgttagcatataggtctgctttataggtttgctttatcgcttatcggtcttactctgaatttggttaagtgttaggtctttcgtgtctgtaaatgcgtccgggagggttgatgtgatcgatccttcttttgtctacaaaaaaagttaagctaatcaagaaagtttcactcc

SEQ ID NO: 10356 - protein, 278 aa, Triticum aestivum
  misc_feature (1)..(278): Ceres Seq. ID no. 13595923
MDARGGDASAIALLLCACFLTALACDSNGAKFAYSGPLGPDHWGGLDPNFTRCAMGTYQSPVDIKTSDVVYNPMLGPLHREYTAANATLVDNIFNIALRCEDAAGTVQIDGVKYKLDNIHWHSPSEHTINGERFAVEQHMVHFSDDGNISVVSILYRLGRPDPFLMQLQDKLSELYVEACRAEKGAPIPTGVVNMWQLRRYANMYYRYVGSLTTPPCTENIIWNIHGRVREMALGQAAALIAPLEEGYRRNNRPTQPLNGRTVQFYRRFWKKKGSGKP

SEQ ID NO: 10357 - protein, 224 aa, Triticum aestivum
  misc_feature (1)..(224): Ceres Seq. ID no. 13595924
MGTYQSPVDIKTSDVVYNPMLGPLHREYTAANATLVDNIFNIALRCEDAAGTVQIDGVKYKLDNIHWHSPSEHTINGERFAVEQHMVHFSDDGNISVVSILYRLGRPDPFLMQLQDKLSELYVEACRAEKGAPIPTGVVNMWQLRRYANMYYRYVGSLTTPPCTENIIWNIHGRVREMALGQAAALIAPLEEGYRRNNRPTQPLNGRTVQFYRRFWKKKGSGKP

SEQ ID NO: 10358 - protein, 205 aa, Triticum aestivum
  misc_feature (1)..(205): Ceres Seq. ID no. 13595925
MLGPLHREYTAANATLVDNIFNIALRCEDAAGTVQIDGVKYKLDNIHWHSPSEHTINGERFAVEQHMVHFSDDGNISVVSILYRLGRPDPFLMQLQDKLSELYVEACRAEKGAPIPTGVVNMWQLRRYANMYYRYVGSLTTPPCTENIIWNIHGRVREMALGQAAALIAPLEEGYRRNNRPTQPLNGRTVQFYRRFWKKKGSGKP

SEQ ID NO: 10359 - DNA, 1540 bp, Triticum aestivum
  misc_feature (1)..(1540): Ceres Seq. ID no. 13595932
gaaattttccattcccccacccgcccttcacttcccttcacccgtcgctctcagccccgcagcgctagctagggttgggatcgatttggggcctagggttaggtcagtttctccatggcggcggcggcggcggcggaggggtccggggcagagggccgcggcgaggccgccgccggcggcaggcggcagcagcagcaggggctggcggagcgccggatgctccggtcccagtaccacgccatgaagaccctcatcaacgaggagagggatgacatggcgaaggaggactccgacaagttcgcctccatcatcacgcaggtggagagcttgcacgagcaagtgcagagacccagggagcaagtagcggatgcagaggctctgctagatattacaaccacgctggtaaaatccgtgaggtcccagtcaagtgaaggaatcacaccttctgatttcgtaacagcattgctgaagaaatttgggcagcaagcaacccttgattccgagcctgtctcgttgcgctgggctgatgttgggctttctgcttcacatgtcttcagggctgcgcctggatgctgcaccatgcttggacccatggatacagaagtaaagcagcggaagctttcagttgttagtagaaaaagaagtgccaggccaactgaaaatacttgtcctgaagagcttgctgattcttctgagggagcaaagacagacactgaccggaatgtgactgttgtatttgatatcctgaggaaaaataagcgtgcgaggctggagacccttgttttgaacagacaatcatttgcccaaacggttgagaatgtttttgcattgtctttcctagttaaagatggcagggtggcaataaacattgatgacaatgggcaccatatagtctatccacgaaatgcacctgctgctagtgccatagcgtcaggagaagtgtcctacagccattttgttttcagatatgattacagagattggaagcttatgaaagaagtcgttcctgaagggcaagaactgatgccgcacaggaccgcgcacagcctctcttctgaagagcgagaacagctggagccgtgtgcgcaacgaacaccgataaggaaactttgccggaaccggggtttggttcttcaggagcagatggttgttgcagagacacccgaggaggacagaagctccaaacgcaagcgtctattcatagatcaggagtgatcatgcctgcttgaaatgccttgtgccgcggtctacgctgtgtctgtatgtaggaggtatttgcctgattaacgtacccattgtagaacaaggtgtgccatagcaccgcttgtgctagttcttaccttgagacgagattcctccgggagaggaaagagggcaatagaaatgtaagctcaatagaaatgctactgtagttctttagatcagtcggcttaaataatgttcttggaatcggacttgtataatgtcgctcagagtaatatgcttgtgctgatagagaaaaagaaaaggtttgcttctagctgagccaaagttcctattc

SEQ ID NO: 10360 - protein, 366 aa, Triticum aestivum
  misc_feature (1)..(366): Ceres Seq. ID no. 13595933
MAAAAAAEGSGAEGRGEAAAGGRRQQQQGLAERRMLRSQYHAMKTLINEERDDMAKEDSDKFASIITQVESLHEQVQRPREQVADAEALLDITTTLVKSVRSQSSEGITPSDFVTALLKKFGQQATLDSEPVSLRWADVGLSASHVFRAAPGCCTMLGPMDTEVKQRKLSVVSRKRSARPTENTCPEELADSSEGAKTDTDRNVTVVFDILRKNKRARLETLVLNRQSFAQTVENVFALSFLVKDGRVAINIDDNGHHIVYPRNAPAASAIASGEVSYSHFVFRYDYRDWKLMKEVVPEGQELMPHRTAHSLSSEEREQLEPCAQRTPIRKLCRNRGLVLQEQMVVAETPEEDRSSKRKRLFIDQE

SEQ ID NO: 10361 - protein, 332 aa, Triticum aestivum
  misc_feature (1)..(332): Ceres Seq. ID no. 13595934
MLRSQYHAMKTLINEERDDMAKEDSDKFASIITQVESLHEQVQRPREQVADAEALLDITTTLVKSVRSQSSEGITPSDFVTALLKKFGQQATLDSEPVSLRWADVGLSASHVFRAAPGCCTMLGPMDTEVKQRKLSVVSRKRSARPTENTCPEELADSSEGAKTDTDRNVTVVFDILRKNKRARLETLVLNRQSFAQTVENVFALSFLVKDGRVAINIDDNGHHIVYPRNAPAASAIASGEVSYSHFVFRYDYRDWKLMKEVVPEGQELMPHRTAHSLSSEEREQLEPCAQRTPIRKLCRNRGLVLQEQMVVAETPEEDRSSKRKRLFIDQE

SEQ ID NO: 10362 - protein, 324 aa, Triticum aestivum
  misc_feature (1)..(324): Ceres Seq. ID no. 13595935
MKTLINEERDDMAKEDSDKFASIITQVESLHEQVQRPREQVADAEALLDITTTLVKSVRSQSSEGITPSDFVTALLKKFGQQATLDSEPVSLRWADVGLSASHVFRAAPGCCTMLGPMDTEVKQRKLSVVSRKRSARPTENTCPEELADSSEGAKTDTDRNVTVVFDILRKNKRARLETLVLNRQSFAQTVENVFALSFLVKDGRVAINIDDNGHHIVYPRNAPAASAIASGEVSYSHFVFRYDYRDWKLMKEVVPEGQELMPHRTAHSLSSEEREQLEPCAQRTPIRKLCRNRGLVLQEQMVVAETPEEDRSSKRKRLFIDQE

SEQ ID NO: 10363 - DNA, 1351 bp, Triticum aestivum
  misc_feature (1)..(1351): Ceres Seq. ID no. 13595944
gctacacctttgttaacgaaccgcactgccgccgtccccgtctgcctccggccatcaaccatggcgaggagttccatggccgcggtgctcgccgtcctggccgtggcggcgctccggtgcgcgccggccgccgcggagctcccgctggtggagcacccggccaagaacgacgggtcgctcagcctgctcgtcatcggggactggggccgcaacggcacctacaaccaatccagggtcgcggaccagatggggaaggtcggggagaggctggacatcgacttcgtggtctccaccggcgacaacttctacgaggacggcctcacgggcgttcatgaccagcagttcgaggaatccttcaccaatatctacaccgcccagagcttgcagaagccgtggtatctcgttcttggaaaccatgactaccggggcaatgcgcttgcacagcttgacccagtcatgcgcaagctcgatgagcgattcgtttgcatgagatcattcattgtcaatgcagagatcgtggagttcttcttcatcgacactactccattccagctcaagtactggactcaccctaaagacagtcactatgactggagaggagtggcgcctcgagaaaactacatagctaatctgctgaaggatttggatgaggcaatgaagaaatcaactgcaaagtggaagatcgctattgggcatcataccatcaggagcgtcagtgatcatggggacaccaaggagctcctgcaattgcttcttccagtcctcaaggttaacggcatcgacttctacatcaatgggcacgaccactgcctggaacacattagcagcagagacagtccgatccaatacttcactagcggaggcggttcaaaagcatggaggggagtctaccagccaaatgatgataagctccagttcttttatgatgggcaagggttcatgtccctccagctaaaccaggaccaagctgacttcatcttttatgatgtttctgggaaagtcttgtacaagtggagctcgcgcaaaacaaactacttccagccctccatctatgtcactgcagaatgagggagatgcagatcatggcaggagaattagtttggtagcgctatttgtgaaagaaattgaatgtgccactgtggtaacagtggtaaaggtaatagattggtatttagtatggtgtgtggttcagcgctgaagaaatattgaactggctgtgaattgtctacaataaaggagcagagatgctcagtatggtgtccattggttctgatgcatacataagtcgcagggatctattgatgcgatgtgcatttagagaaatatatgcataaactctaatattgtaccc

SEQ ID NO: 10364 - protein, 355 aa, Triticum aestivum
  misc_feature (1)..(355): Ceres Seq. ID no. 15221712
ATPLLTNRTAAVPVCLRPSTMARSSMAAVLAVLAVAALRCAPAAAELPLVEHPAKNDGSLSLLVIGDWGRNGTYNQSRVADQMGKVGERLDIDFVVSTGDNFYEDGLTGVHDQQFEESFTNIYTAQSLQKPWYLVLGNHDYRGNALAQLDPVMRKLDERFVCMRSFIVNAEIVEFFFIDTTPFQLKYWTHPKDSHYDWRGVAPRENYIANLLKDLDEAMKKSTAKWKIAIGHHTIRSVSDHGDTKELLQLLLPVLKVNGIDFYINGHDHCLEHISSRDSPIQYFTSGGGSKAWRGVYQPNDDKLQFFYDGQGFMSLQLNQDQADFIFYDVSGKVLYKWSSRKTNYFQPSIYVTAE

SEQ ID NO: 10365 - protein, 335 aa, Triticum aestivum
  misc_feature (1)..(335): Ceres Seq. ID no. 15221713
MARSSMAAVLAVLAVAALRCAPAAAELPLVEHPAKNDGSLSLLVIGDWGRNGTYNQSRVADQMGKVGERLDIDFVVSTGDNFYEDGLTGVHDQQFEESFTNIYTAQSLQKPWYLVLGNHDYRGNALAQLDPVMRKLDERFVCMRSFIVNAEIVEFFFIDTTPFQLKYWTHPKDSHYDWRGVAPRENYIANLLKDLDEAMKKSTAKWKIAIGHHTIRSVSDHGDTKELLQLLLPVLKVNGIDFYINGHDHCLEHISSRDSPIQYFTSGGGSKAWRGVYQPNDDKLQFFYDGQGFMSLQLNQDQADFIFYDVSGKVLYKWSSRKTNYFQPSIYVTAE

SEQ ID NO: 10366 - protein, 330 aa, Triticum aestivum
  misc_feature (1)..(330): Ceres Seq. ID no. 15221714
MAAVLAVLAVAALRCAPAAAELPLVEHPAKNDGSLSLLVIGDWGRNGTYNQSRVADQMGKVGERLDIDFVVSTGDNFYEDGLTGVHDQQFEESFTNIYTAQSLQKPWYLVLGNHDYRGNALAQLDPVMRKLDERFVCMRSFIVNAEIVEFFFIDTTPFQLKYWTHPKDSHYDWRGVAPRENYIANLLKDLDEAMKKSTAKWKIAIGHHTIRSVSDHGDTKELLQLLLPVLKVNGIDFYINGHDHCLEHISSRDSPIQYFTSGGGSKAWRGVYQPNDDKLQFFYDGQGFMSLQLNQDQADFIFYDVSGKVLYKWSSRKTNYFQPSIYVTAE

SEQ ID NO: 10367 - DNA, 1654 bp, Triticum aestivum
  misc_feature (1)..(1654): Ceres Seq. ID no. 13595961
accaagcaaagctgaatcagaacactccaatgtcaacgccaagaagggtggtcgtcgtcgccggccagagcctaagccacctcatctccatgctggagttcgccgcgatgtgcctccgtcgcggcctcgcggtgaccgtcgccgtcccggacccgtccctcaccgccccggccttccgctccaccatcggccggtacgcctcccggctccccaccctctccgtccactccctccctccccctcccgccctcgacgccgcctccgctgccgcccacccgttcatccgcatgcaggccgcctcccgctcccaggcacctgtcctgcgggacttcctccatagcctccccgacgtccacgcgctcgtggccgacatgctcgccgtctgtgacctcgacgtagccacggagctgggcatcccggggcacctgttcttctccacaggcgccgccagcctctccgtcttcctccaattgcctttgttttgctccgggcgcgccggaaacttgaaagatctcggcgacacgcccgtgtcgttccccggcatgtccccgatgccggcgtctcacttggtcgacgcggtgctcgacagagggacggacctctacgcgactgtgctggacgtattcggtcggatcgcgggtgcgcgcggcattctggtgaataccttcgacgcgctggagggctcagcggtgtcggcgcttagagacgggcgctgcctgcgcggccgcgccacgccgccagtttactgcgtcgggccgttgatcgcggagggggaagaggaggaggaaagacacccatgcctcccgtggctggacgcgcagcccgagcgtagcgtcgtgttcctctgcttcggcagccgatgcacggtgtcgctccagcagatcggtgagatggccaaggggctggagaagtccgggcacaggttcttgtgggtgctgcgcgcgcctcctgccttcgccgcagccggcggcggaccggacgcggcgctgtctcttctcccggaggggttcttggcccggaccgcggacaggggcttcgtggtgactgcgtcctgggtgcctcaggtggaggtgctgcgtcactcatccactggtgcgttcgtaacccactgtggatggaactcgacgctggaggcggtggtcgccggtgtgccaatggtgtgctggccgttggtagccgagcagtggatgaacaaggtgtacattgtccaagatatgaaggttggcgtggaggtgagagggtataagcgcgggggccttgtcagggccgacgatgttgacgcggcggttaggcagatcatggacatggagccggagagacggcgagcactcgaggaacggatcatggcggtaaagaagagcgctcaagcagtatggaaggaagatggctcctcctgtaccgcgttcaccgagtttatgatgcaaacggagtaaccattgtaatcattagcagcaactatccatgaagcaaatggagtgatcattagtttatgaagcaaagggacatcagcagcagatgcttaggtgtgggtaaggatatgtaagttgcacgttgcagcattgcgcaccattgggttgtaattaagcttgaattatatgagtatagtccaatctgttggtccaaaaaaaaaaaaaaaaaagcttatcgataccgt

SEQ ID NO: 10368 - protein, 476 aa, Triticum aestivum
  misc_feature (1)..(476): Ceres Seq. ID no. 13595962
QAKLNQNTPMSTPRRVVVVAGQSLSHLISMLEFAAMCLRRGLAVTVAVPDPSLTAPAFRSTIGRYASRLPTLSVHSLPPPPALDAASAAAHPFIRMQAASRSQAPVLRDFLHSLPDVHALVADMLAVCDLDVATELGIPGHLFFSTGAASLSVFLQLPLFCSGRAGNLKDLGDTPVSFPGMSPMPASHLVDAVLDRGTDLYATVLDVFGRIAGARGILVNTFDALEGSAVSALRDGRCLRGRATPPVYCVGPLIAEGEEEEERHPCLPWLDAQPERSVVFLCFGSRCTVSLQQIGEMAKGLEKSGHRFLWVLRAPPAFAAAGGGPDAALSLLPEGFLARTADRGFVVTASWVPQVEVLRHSSTGAFVTHCGWNSTLEAVVAGVPMVCWPLVAEQWMNKVYIVQDMKVGVEVRGYKRGGLVRADDVDAAVRQIMDMEPERRRALEERIMAVKKSAQAVWKEDGSSCTAFTEFMMQTE

SEQ ID NO: 10369 - protein, 467 aa, Triticum aestivum
  misc_feature (1)..(467): Ceres Seq. ID no. 13595963
MSTPRRVVVVAGQSLSHLISMLEFAAMCLRRGLAVTVAVPDPSLTAPAFRSTIGRYASRLPTLSVHSLPPPPALDAASAAAHPFIRMQAASRSQAPVLRDFLHSLPDVHALVADMLAVCDLDVATELGIPGHLFFSTGAASLSVFLQLPLFCSGRAGNLKDLGDTPVSFPGMSPMPASHLVDAVLDRGTDLYATVLDVFGRIAGARGILVNTFDALEGSAVSALRDGRCLRGRATPPVYCVGPLIAEGEEEEERHPCLPWLDAQPERSVVFLCFGSRCTVSLQQIGEMAKGLEKSGHRFLWVLRAPPAFAAAGGGPDAALSLLPEGFLARTADRGFVVTASWVPQVEVLRHSSTGAFVTHCGWNSTLEAVVAGVPMVCWPLVAEQWMNKVYIVQDMKVGVEVRGYKRGGLVRADDVDAAVRQIMDMEPERRRALEERIMAVKKSAQAVWKEDGSSCTAFTEFMMQTE

SEQ ID NO: 10370 - protein, 447 aa, Triticum aestivum
  misc_feature (1)..(447): Ceres Seq. ID no. 13595964
MLEFAAMCLRRGLAVTVAVPDPSLTAPAFRSTIGRYASRLPTLSVHSLPPPPALDAASAAAHPFIRMQAASRSQAPVLRDFLHSLPDVHALVADMLAVCDLDVATELGIPGHLFFSTGAASLSVFLQLPLFCSGRAGNLKDLGDTPVSFPGMSPMPASHLVDAVLDRGTDLYATVLDVFGRIAGARGILVNTFDALEGSAVSALRDGRCLRGRATPPVYCVGPLIAEGEEEEERHPCLPWLDAQPERSVVFLCFGSRCTVSLQQIGEMAKGLEKSGHRFLWVLRAPPAFAAAGGGPDAALSLLPEGFLARTADRGFVVTASWVPQVEVLRHSSTGAFVTHCGWNSTLEAVVAGVPMVCWPLVAEQWMNKVYIVQDMKVGVEVRGYKRGGLVRADDVDAAVRQIMDMEPERRRALEERIMAVKKSAQAVWKEDGSSCTAFTEFMMQTE

SEQ ID NO: 10371 - DNA, 1325 bp, Triticum aestivum
  misc_feature (1)..(1325): Ceres Seq. ID no. 13595969
attcgcacgagaccattacctagaacatcctaattgaaaaaaggtttccatacgtaccatggctgcccggctcgtcgtcctccttctagcgctcgtccacgccggcgtgtccgccgaagacgtcatccggcaggtgacggacggcggccacggcgctggacgccccggtctgctcccggaggcgcagttcgcggcgttcgtgcggcgacacggcaagcagtactcgggccccgaggagtacgcgcgccggctgcgcgtgttcgcggccaacgtggcccgcgcagccgcccaccaggcgctcgacccgggcgcgcgccacggcgtcacgcccttctccgacctcacccgggaggagttcgaggcgcgcctcaccggcctcgccggcgccggcgacgtcctgcgcagcgtgcgggggatgcccgccgcggcgccggccacggaggaggaggtcgccgcgctgcccgccagcttcgactggcgcgacaagggcgccgtcaccgatgtgaagatgcagggcgtgtgcggctcgtgctgggcgttcagcacaaccggcgtcgtggagggcgccaacttcgtcgccacggggaagctcctcaacctcagcgagcagcagctggtcgactgcgaccacacgtgcgacgcggtggcgaagaccgagtgcaacagcggctgctccggcggactgatgacgaacgcttacaagtacctgatgagctccggcgggctgatggagcaggcggcgtacccctacacgggagcgcaggggacgtgccggttcgacaggagcaaggtggcagtccgcgtggccaacttcaccgccgtgccgctcgacgaggaccagatgcgggcggcgctcgtccgcggcgggcccctggcggtgggcctgaacgcggcgttcatgcagacgtacgtcggcggcgtgtcctgcccgctcatctgcccgcgggcgctggtgaaccacggcgtgctcctcgtcggctacggcgcgcgcggcttctcggcgctgcggctcgggtaccggccctactggctcatcaagaactcgtgggggcagcagtggggggagggcgggtactacaagctctgccgcggccgcaacgtctgcggcgtcgacagcatggtctccgccgtcgccgtcgccccgtgatcggcaaacgacgacgacgaccggcgtagtacgtgttcatgtagttgttcgttagcctaacggtatattagtagggcttaatcagtggacactgcactcaataatgccacttcaaagttcaaacatactagaagcgcttgtatacgttctctcttggatgccgtggaggtctcaagtc

SEQ ID NO: 10372 - protein, 362 aa, Triticum aestivum
  misc_feature (1)..(362): Ceres Seq. ID no. 13595970
MAARLVVLLLALVHAGVSAEDVIRQVTDGGHGAGRPGLLPEAQFAAFVRRHGKQYSGPEEYARRLRVFAANVARAAAHQALDPGARHGVTPFSDLTREEFEARLTGLAGAGDVLRSVRGMPAAAPATEEEVAALPASFDWRDKGAVTDVKMQGVCGSCWAFSTTGVVEGANFVATGKLLNLSEQQLVDCDHTCDAVAKTECNSGCSGGLMTNAYKYLMSSGGLMEQAAYPYTGAQGTCRFDRSKVAVRVANFTAVPLDEDQMRAALVRGGPLAVGLNAAFMQTYVGGVSCPLICPRALVNHGVLLVGYGARGFSALRLGYRPYWLIKNSWGQQWGEGGYYKLCRGRNVCGVDSMVSAVAVAP

SEQ ID NO: 10373 - protein, 243 aa, Triticum aestivum
  misc_feature (1)..(243): Ceres Seq. ID no. 13595971
MPAAAPATEEEVAALPASFDWRDKGAVTDVKMQGVCGSCWAFSTTGVVEGANFVATGKLLNLSEQQLVDCDHTCDAVAKTECNSGCSGGLMTNAYKYLMSSGGLMEQAAYPYTGAQGTCRFDRSKVAVRVANFTAVPLDEDQMRAALVRGGPLAVGLNAAFMQTYVGGVSCPLICPRALVNHGVLLVGYGARGFSALRLGYRPYWLIKNSWGQQWGEGGYYKLCRGRNVCGVDSMVSAVAVAP

SEQ ID NO: 10374 - protein, 212 aa, Triticum aestivum
  misc_feature (1)..(212): Ceres Seq. ID no. 13595972
MQGVCGSCWAFSTTGVVEGANFVATGKLLNLSEQQLVDCDHTCDAVAKTECNSGCSGGLMTNAYKYLMSSGGLMEQAAYPYTGAQGTCRFDRSKVAVRVANFTAVPLDEDQMRAALVRGGPLAVGLNAAFMQTYVGGVSCPLICPRALVNHGVLLVGYGARGFSALRLGYRPYWLIKNSWGQQWGEGGYYKLCRGRNVCGVDSMVSAVAVAP

SEQ ID NO: 10375 - DNA, 1235 bp, Triticum aestivum
  misc_feature (1)..(1235): Ceres Seq. ID no. 13595983
gtcgtgctgcaattgagatcgactcgtcggtggccgacccctcggcggcgagcaccggggttagggtttaggggcctggatccatggctcggcccatgggatccagcggcttcgaggctgccctagccgtgtgccccgccgccgcccaggcctactccaagtactgcggtattgtatctggatgcacaaatgcgaacccaagggaagggttggcggatctttcacgaactatagataatatggaaggaatgagggatggaatatttggtgatattcacaagctcatgtcagttcttgagttcgatgatgtgagccaattcaattccttctatgattttgtcttcttcatttctcgtgaaaatggccaaaagaatattactgttcagaaggctcttgcagcatggaggatagttcttgttggaaggttccgattgcttgaccggtggtgtaactttgttgagaagtaccaacgtcacaacatttctgaggacgcctggcagcagctactagctttcagcaggtgtgtaaacgaggatctggaaggttatgatccaaaaggtgcttggcctgtcataattgatgattttgtggagcacatgcacagaatctaccgccctagtgactgctccagtgcaatggaatcacaatgcagcatttccaatacatttagaggtctaaatctattacctggatcaaagaggaaatgccctactcagtttaactccagtgaagagagcgtagagctctcagaagctcttagacactctgtccaacttaccccgtcgaagcgacttaaggaaagttctgcgcctactagatatggtgtttgggagcgagacgcaagtacccctttctttaacagcacaccagattgtcgcgaggacatgaatttacagaactcaagaggctgccttcagaactcacctcgtgttattgaggatggtttttcaaaagggttcgaaggttgcatttcaatgaaatgctcattttagtgcaatgaggaatgcatggcatcatcatttatgactgcccgttactccatatatttctgttttgcgtcaacaccattttgtatttgtacttaaagtcagtttcccagtggtgatattattttgtacacaaacagtgatgttatacatgtctgctatcgcagagaaaacggcttgtgattgttctttccaaaaaaaaaaaaaaaaaagsttatcgataccgtcgacctccaggaggcacccgcc

SEQ ID NO: 10376 - protein, 302 aa, Triticum aestivum
  misc_feature (1)..(302): Ceres Seq. ID no. 15221718
MARPMGSSGFEAALAVCPAAAQAYSKYCGIVSGCTNANPREGLADLSRTIDNMEGMRDGIFGDIHKLMSVLEFDDVSQFNSFYDFVFFISRENGQKNITVQKALAAWRIVLVGRFRLLDRWCNFVEKYQRHNISEDAWQQLLAFSRCVNEDLEGYDPKGAWPVIIDDFVEHMHRIYRPSDCSSAMESQCSISNTFRGLNLLPGSKRKCPTQFNSSEESVELSEALRHSVQLTPSKRLKESSAPTRYGVWERDASTPFFNSTPDCREDMNLQNSRGCLQNSPRVIEDGFSKGFEGCISMKCSF

SEQ ID NO: 10377 - protein, 298 aa, Triticum aestivum
  misc_feature (1)..(298): Ceres Seq. ID no. 15221719
MGSSGFEAALAVCPAAAQAYSKYCGIVSGCTNANPREGLADLSRTIDNMEGMRDGIFGDIHKLMSVLEFDDVSQFNSFYDFVFFISRENGQKNITVQKALAAWRIVLVGRFRLLDRWCNFVEKYQRHNISEDAWQQLLAFSRCVNEDLEGYDPKGAWPVIIDDFVEHMHRIYRPSDCSSAMESQCSISNTFRGLNLLPGSKRKCPTQFNSSEESVELSEALRHSVQLTPSKRLKESSAPTRYGVWERDASTPFFNSTPDCREDMNLQNSRGCLQNSPRVIEDGFSKGFEGCISMKCSF

SEQ ID NO: 10378 - protein, 250 aa, Triticum aestivum
  misc_feature (1)..(250): Ceres Seq. ID no. 15221720
MEGMRDGIFGDIHKLMSVLEFDDVSQFNSFYDFVFFISRENGQKNITVQKALAAWRIVLVGRFRLLDRWCNFVEKYQRHNISEDAWQQLLAFSRCVNEDLEGYDPKGAWPVIIDDFVEHMHRIYRPSDCSSAMESQCSISNTFRGLNLLPGSKRKCPTQFNSSEESVELSEALRHSVQLTPSKRLKESSAPTRYGVWERDASTPFFNSTPDCREDMNLQNSRGCLQNSPRVIEDGFSKGFEGCISMKCSF

SEQ ID NO: 10379 - DNA, 1491 bp, Triticum aestivum
  misc_feature (1)..(1491): Ceres Seq. ID no. 13595984
gctcgtctctgccgatacttcacacaagaaagatgagatcgccggcaactcttccactactatcttccgatcgtttggtcgccatggcgccgtgacctcgccgtgcttcagcgatggccccgcgctggacctctgatgaccagacaagacggaccgaccgcaccgtgactccgacagccactccgtggtggtaatcagtggagtgccgccaccgtcgatcaaaatctttgacctcccgcatccaccgccagttctgtctccctgcaagcaaatctcagccgccattgctcagcttctgagcagcggagcggatccgagatggagcccatccctctgctcacgccgtacaagatgggccagttcgagctgtcgcaccgggtcgtgctggcgcccatgacgcggcagcgcgcctacggcggcgtgccgcagccgcacgccgccctctactactcccagcgcgccacccccggcggcctcctcatctccgaggccacgcgcgtcgcgccggcaaggcaggacgaggagccggcctcgttcagggacatgccgggggtctgggcgccggagcaggtcgaggcgtggaggcccgtggtcgacgccgtgcacgccgagggcgccgtcttcttctgccagctctggcacgccgcggccgcccccggcgacgccgtcagggaaaggcagcaggtgagcccgcagatgagctatgatggccgccgcgaggagctcacgtcgccgaggagggtggcagctgaggacgcgcccggcgtcgtcgacgcgttcagacgcgccgccaggaacgccatcgatgccggcttcgacggcgtcgagctccaaggcaccaacggctacttcgtcgtcgacggcggtggcccggagagtcgctgccggttcgcgctggaggtggtggacgccgtggcgcgggagatcggcggccaccgcctgggcctgcgactggaccagttcaccgcagagccggacgagcacgcgctggcgctccatgtcgtcagccggctcaacgacctcggcgtgctctactgccacatgatcgagcccaaggtggacggccggcggcgcgtgtcccggcggctgctgccttacagggaggcgttcggcggcacgttcatcgccagcggcgggtacgggcgggaggagggcgacgcggccgtcggcgaggggtacgccgacctggtggcgtacgggcggctcttcctggcgaacccggacctgccgaggaggttcgagctcggcgcgccgctcaacgactgcgtcagcgccaccttctacggcgccggcgccggcgccgcccaccccgccgtcggatacactgattacccgttcctagaatgatcgatgattgtgctcggatgttcttttcggcgtaaacaatcgaccatgatttgcctcctcagtgttgtatatatgatagtactaattttatggggattaagttcatcaaaaaaaaaaaaaaaaaagcttatcgataccgtcgac

SEQ ID NO: 10380 - protein, 342 aa, Triticum aestivum
  misc_feature (1)..(342): Ceres Seq. ID no. 13595985
MEPIPLLTPYKMGQFELSHRVVLAPMTRQRAYGGVPQPHAALYYSQRATPGGLLISEATRVAPARQDEEPASFRDMPGVWAPEQVEAWRPVVDAVHAEGAVFFCQLWHAAAAPGDAVRERQQVSPQMSYDGRREELTSPRRVAAEDAPGVVDAFRRAARNAIDAGFDGVELQGTNGYFVVDGGGPESRCRFALEVVDAVAREIGGHRLGLRLDQFTAEPDEHALALHVVSRLNDLGVLYCHMIEPKVDGRRRVSRRLLPYREAFGGTFIASGGYGREEGDAAVGEGYADLVAYGRLFLANPDLPRRFELGAPLNDCVSATFYGAGAGAAHPAVGYTDYPFLE

SEQ ID NO: 10381 - protein, 331 aa, Triticum aestivum
  misc_feature (1)..(331): Ceres Seq. ID no. 13595986
MGQFELSHRVVLAPMTRQRAYGGVPQPHAALYYSQRATPGGLLISEATRVAPARQDEEPASFRDMPGVWAPEQVEAWRPVVDAVHAEGAVFFCQLWHAAAAPGDAVRERQQVSPQMSYDGRREELTSPRRVAAEDAPGVVDAFRRAARNAIDAGFDGVELQGTNGYFVVDGGGPESRCRFALEVVDAVAREIGGHRLGLRLDQFTAEPDEHALALHVVSRLNDLGVLYCHMIEPKVDGRRRVSRRLLPYREAFGGTFIASGGYGREEGDAAVGEGYADLVAYGRLFLANPDLPRRFELGAPLNDCVSATFYGAGAGAAHPAVGYTDYPFLE

SEQ ID NO: 10382 - protein, 317 aa, Triticum aestivum
  misc_feature (1)..(317): Ceres Seq. ID no. 13595987
MTRQRAYGGVPQPHAALYYSQRATPGGLLISEATRVAPARQDEEPASFRDMPGVWAPEQVEAWRPVVDAVHAEGAVFFCQLWHAAAAPGDAVRERQQVSPQMSYDGRREELTSPRRVAAEDAPGVVDAFRRAARNAIDAGFDGVELQGTNGYFVVDGGGPESRCRFALEVVDAVAREIGGHRLGLRLDQFTAEPDEHALALHVVSRLNDLGVLYCHMIEPKVDGRRRVSRRLLPYREAFGGTFIASGGYGREEGDAAVGEGYADLVAYGRLFLANPDLPRRFELGAPLNDCVSATFYGAGAGAAHPAVGYTDYPFLE

SEQ ID NO: 10383 - DNA, 1257 bp, Triticum aestivum
  misc_feature (1)..(1257): Ceres Seq. ID no. 13595992
acctaacccattcaagtcgatcaatcatcagcaaaaaaaacactatagtaacaactgacagcgtgagggcgctcgcaatggcgagccgtttgggagtcgtgctggctttagcggctgtcgtccttcttgccgccgcgggggccgccgccgggcaatccacgccacggccacccaacgcccagggcccgaagccgaagccgaagccgatgaaggtcaagtgcaccgagaaccgcaaggagaacccctactgtttcaaccggaacatggactgccccgccaactgcccccagtcctgctaccccgactgcaacacatgcaaacccgtctgcgtctgcaacaccccgggggcgtgcggcgacccgcggttcataggtggtgacggcaacgccttctacttccacggacgcagggacgccgacttctgcgtcgtctccgaccgcgaccttcacatcaacgcgcacttcatcggcaagagcggccacagtggcatgtcccgggacttcacctggatccaggccatcgctgtgctcttcgacggccaccgcctctacctcggcgccaggaagaccggcacctgggacgacgccgtcgagcacctggacatcaccctggacggcgagcctgtctaccttcccgctgacctcatcgaaggcgccaagtggacgtccagccgcgtgcccgagctgtcggtgacccgcaccaaggcggccaacggcgtcctcgtcaccgtcgccggaaagttcagcgtcagggccaacgccgtgcccatcaccgaggaggaatcgagggtgcaccgctacggtgtcaccgccgatgactgcctcgcgcacctcgagctggcgttcaagttcgacgcgctcaccgacgacgtccacggtgtggtcggacagacgtaccgctccgactacgtcaaccatttcgacgtgagggcctccatgcccaccatgggaggagatgccaccttcaccacctccagcctgttcgccgccgactgcagcgtggcgcgctatggagtcagccgtggaaacgacggtgccgcggtgctatctgagctcgctggtgtcacctgcgccagcggcatggacggcaaaggtgtcgtgtgcaagaagtaaaacgcttctgccatgcatatggcgagtgcccgtgtatgtctgcatgcatgcatggttgacaagtacacacagaaataagcaaaggacatacattaatgtgtttggaacttgtaactttatcaagaaatagtatgcgtccgtttgc

SEQ ID NO: 10384 - protein, 369 aa, Triticum aestivum
  misc_feature (1)..(369): Ceres Seq. ID no. 15221721
LTHSSRSIISKKNTIVTTDSVRALAMASRLGVVLALAAVVLLAAAGAAAGQSTPRPPNAQGPKPKPKPMKVKCTENRKENPYCFNRNMDCPANCPQSCYPDCNTCKPVCVCNTPGACGDPRFIGGDGNAFYFHGRRDADFCVVSDRDLHINAHFIGKSGHSGMSRDFTWIQAIAVLFDGHRLYLGARKTGTWDDAVEHLDITLDGEPVYLPADLIEGAKWTSSRVPELSVTRTKAANGVLVTVAGKFSVRANAVPITEEESRVHRYGVTADDCLAHLELAFKFDALTDDVHGVVGQTYRSDYVNHFDVRASMPTMGGDATFTTSSLFAADCSVARYGVSRGNDGAAVLSELAGVTCASGMDGKGVVCKK

SEQ ID NO: 10385 - protein, 344 aa, Triticum aestivum
  misc_feature (1)..(344): Ceres Seq. ID no. 15221722
MASRLGVVLALAAVVLLAAAGAAAGQSTPRPPNAQGPKPKPKPMKVKCTENRKENPYCFNRNMDCPANCPQSCYPDCNTCKPVCVCNTPGACGDPRFIGGDGNAFYFHGRRDADFCVVSDRDLHINAHFIGKSGHSGMSRDFTWIQAIAVLFDGHRLYLGARKTGTWDDAVEHLDITLDGEPVYLPADLIEGAKWTSSRVPELSVTRTKAANGVLVTVAGKFSVRANAVPITEEESRVHRYGVTADDCLAHLELAFKFDALTDDVHGVVGQTYRSDYVNHFDVRASMPTMGGDATFTTSSLFAADCSVARYGVSRGNDGAAVLSELAGVTCASGMDGKGVVCKK

SEQ ID NO: 10386 - protein, 301 aa, Triticum aestivum
  misc_feature (1)..(301): Ceres Seq. ID no. 15221723
MKVKCTENRKENPYCFNRNMDCPANCPQSCYPDCNTCKPVCVCNTPGACGDPRFIGGDGNAFYFHGRRDADFCVVSDRDLHINAHFIGKSGHSGMSRDFTWIQAIAVLFDGHRLYLGARKTGTWDDAVEHLDITLDGEPVYLPADLIEGAKWTSSRVPELSVTRTKAANGVLVTVAGKFSVRANAVPITEEESRVHRYGVTADDCLAHLELAFKFDALTDDVHGVVGQTYRSDYVNHFDVRASMPTMGGDATFTTSSLFAADCSVARYGVSRGNDGAAVLSELAGVTCASGMDGKGVVCKK

SEQ ID NO: 10387 - DNA, 1083 bp, Triticum aestivum
  misc_feature (1)..(1083): Ceres Seq. ID no. 13595993
acctagaacatcctaatcgaaaaaacaaaaacaaacgcgagcgagacccttgcctcaagacctcctccgccccacctccctcctcctactcggcccgtcgtccacgccgagggagccgtcgggcatggcggcgacggcagatccgcgggcgaagccgccggccgcgccctcgacgcaccacctcgagccgtgggcgcgcccgcagcagccgccgcctctaccccaccgcgttgagtcgccctcggggggtgcgtcgggcgcccgcgatcgccgccgctcgtcgtctcactcccaccgcggggccgacgccggagacgacggcgggatcgaggggctccgcgtgaagctcatgggccacctgcgcgacgcggccgaccggcttcgcgtgccccagaaaagtcctcccctgcccccgccgcccccaccgaccaagccgaaggagcccgagccagaccgcatggcgcggcctccaccccccacggagccgccacaggagaacgtcgcggacaagccgtggaagctgcgggaacgcacgcggcggcggccggccgcgctgtcgtcgtcatggccggcggcgccgactccgccgtcgcgacggcgcaagcgggcccctttctcggtggccctggagccggaggagatcgaggaggacatctacgcgctgacgggcggccggccgcggcggcggccgaggaagcggccgcgcgccgtacagcggcagctcgattcgctcttccccgggctctggctggccgaggtcaccgccgacgactacaaggtgcccgacgacgagtagccgctccctcccgccggcgactacaaggttccgacgacgaagctcatggcatcacctccgcgcgtcgtaggacaggtagcccgaatttatagtaacttggagtagctaggcgtagacgcgtggtcgcgtggagcgagccggtcatgtactcgtgttcaccagttattattaagtttattacaacaaaaaaaaaactccagctaccgactttccttgtcataaaaaaaaaaaaaaaaaagcttatcgatacacgtcgactgtttaaacacaatmragggggggcccgg

SEQ ID NO: 10388 - protein, 223 aa, Triticum aestivum
  misc_feature (1)..(223): Ceres Seq. ID no. 15221724
MAATADPRAKPPAAPSTHHLEPWARPQQPPPLPHRVESPSGGASGARDRRRSSSHSHRGADAGDDGGIEGLRVKLMGHLRDAADRLRVPQKSPPLPPPPPPTKPKEPEPDRMARPPPPTEPPQENVADKPWKLRERTRRRPAALSSSWPAAPTPPSRRRKRAPFSVALEPEEIEEDIYALTGGRPRRRPRKRPRAVQRQLDSLFPGLWLAEVTADDYKVPDDE

SEQ ID NO: 10389 - protein, 148 aa, Triticum aestivum
  misc_feature (1)..(148): Ceres Seq. ID no. 15221725
MGHLRDAADRLRVPQKSPPLPPPPPPTKPKEPEPDRMARPPPPTEPPQENVADKPWKLRERTRRRPAALSSSWPAAPTPPSRRRKRAPFSVALEPEEIEEDIYALTGGRPRRRPRKRPRAVQRQLDSLFPGLWLAEVTADDYKVPDDE

SEQ ID NO: 10390 - protein, 113 aa, Triticum aestivum
  misc_feature (1)..(113): Ceres Seq. ID no. 15221726
LEHPNRKNKNKRERDPCLKTSSAPPPSSYSARRPRRGSRRAWRRRQIRGRSRRPRPRRTTSSRGRARSSRRLYPTALSRPRGVRRAPAIAAARRLTPTAGPTPETTAGSRGSA

SEQ ID NO: 10391 - DNA, 1728 bp, Triticum aestivum
  misc_feature (1)..(1728): Ceres Seq. ID no. 13596013
attacctagagcatcctaatcgaaaaattgtcgattcccctcaaccctagccgccagcggcggccagattttgctagtaacaagtgcttattagcttcacctccccctccagctgccgccgcctgccatctccggcgacgagcagggcggagaaggagaactagccatggcctcggtggcgccggaggttgagaagaaggaggaggaggagcaggtggtgaacccgtgggaggtgtcggcggggaagggcggcatcgactacgacaagctggtcgaccagttcggctgccagcgcctggacgccccgctcatcgaccgcatcgcgcgactcaccggccgccccccgcaccgcttcctccgccgcggcctcttcttcgcccaccgggatttgaacgagatactggacatctacgagaagggggacaagttctacctctacacggggagagggccctcctcagaggcgttgcatctcggacacctcgtccccttcatgttcaccaaatatttgcaggatgctttcaaggttcctctggtgatacagctaactgatgatgagaagttcctgtggaaaaatttgacggtagaggaaagtaaaaggcttgcgcgtgaaaatgcaaaagacattatagcatgcggatttgatgttgaaaggacttttatattctctgattttaattttgttggcggtgccttttacgaaaacatggttaaagtggccagatgtgtgacatataataaagttgtcggaatatttggattcactccagaggatcacattggaaagattagctttcctcctgtgcaagcagttccatcattcccttcttcatttcccaaacacttttctggcaatgaccaactacggtgcctgataccttgtgcaatagaccaggatccttatttcaggatgacccgtgatgttgctccaagaattggttaccagaagccagcactgattgagtcaagatttttccctgcccttcagggggagaacacgaaaatgtcagctagtgatccaaattctgctatatatgtgaccgatagtactaaatatataaagacaaaggtgaataaatatgcattctcaggtggccaggactctgtagaacttcatagaaaacttggagctaaccttgaggttgatgtctcaattaagtacctgaacttcttccttgaagacgatgatgagctcgagcgcataaagaaggcgtacaaggaaggaaggatgctgacgggtgaagtgaagcagcttctggttacggttctttctgagatggttgaaaggcacaaaagagctagagctcgagttaccgaggagatggtcgacgccttcatggctgtgaggcctcttcccaacatgtttggctgagcattgggtgggaagttcataccctttctgtgtggattttattgaattccaggagcaacatatgaagtttcaggatttagttgtaactattaatgtcaacctggccgctcaatcctgtatggcagccactgattttgcaaaatcagcatgtgatatgtttgttttcaagcttgctcgatcactgcaaagatttctatttattggaattagggaacacacacgtgttttttttgaaaccgaggcaaaagatttgcctcgtatattaattaagaggggagagagtacaacacatggcagttacaactttgcttgtcagattgggacatacaacgtaaaaagactactctcgcggcatc

SEQ ID NO: 10392 - protein, 401 aa, Triticum aestivum
  misc_feature (1)..(401): Ceres Seq. ID no. 13596014
MASVAPEVEKKEEEEQVVNPWEVSAGKGGIDYDKLVDQFGCQRLDAPLIDRIARLTGRPPHRFLRRGLFFAHRDLNEILDIYEKGDKFYLYTGRGPSSEALHLGHLVPFMFTKYLQDAFKVPLVIQLTDDEKFLWKNLTVEESKRLARENAKDIIACGFDVERTFIFSDFNFVGGAFYENMVKVARCVTYNKVVGIFGFTPEDHIGKISFPPVQAVPSFPSSFPKHFSGNDQLRCLIPCAIDQDPYFRMTRDVAPRIGYQKPALIESRFFPALQGENTKMSASDPNSAIYVTDSTKYIKTKVNKYAFSGGQDSVELHRKLGANLEVDVSIKYLNFFLEDDDELERIKKAYKEGRMLTGEVKQLLVTVLSEMVERHKRARARVTEEMVDAFMAVRPLPNMFG

SEQ ID NO: 10393 - protein, 292 aa, Triticum aestivum
  misc_feature (1)..(292): Ceres Seq. ID no. 13596015
MFTKYLQDAFKVPLVIQLTDDEKFLWKNLTVEESKRLARENAKDIIACGFDVERTFIFSDFNFVGGAFYENMVKVARCVTYNKVVGIFGFTPEDHIGKISFPPVQAVPSFPSSFPKHFSGNDQLRCLIPCAIDQDPYFRMTRDVAPRIGYQKPALIESRFFPALQGENTKMSASDPNSAIYVTDSTKYIKTKVNKYAFSGGQDSVELHRKLGANLEVDVSIKYLNFFLEDDDELERIKKAYKEGRMLTGEVKQLLVTVLSEMVERHKRARARVTEEMVDAFMAVRPLPNMFG

SEQ ID NO: 10394 - protein, 221 aa, Triticum aestivum
  misc_feature (1)..(221): Ceres Seq. ID no. 13596016
MVKVARCVTYNKVVGIFGFTPEDHIGKISFPPVQAVPSFPSSFPKHFSGNDQLRCLIPCAIDQDPYFRMTRDVAPRIGYQKPALIESRFFPALQGENTKMSASDPNSAIYVTDSTKYIKTKVNKYAFSGGQDSVELHRKLGANLEVDVSIKYLNFFLEDDDELERIKKAYKEGRMLTGEVKQLLVTVLSEMVERHKRARARVTEEMVDAFMAVRPLPNMFG

SEQ ID NO: 10395 - DNA, 1798 bp, Triticum aestivum
  misc_feature (1)..(1798): Ceres Seq. ID no. 13596021
cacacaaacccgcaaaaacaatccatcccccaaaaccccaccgccccgcggcggcggcggcggcgtcgcgatggacccttcctcggccggcgctggcggcaactcgctgccgtcggtcggccccgacgggcagaagcggcgcgtgtgctacttctacgactcggaggtgggcaactactactacgggcagggccacccgatgaagccgcaccgcatccgcatgacccactcgctgctggcgcagtacggcctcctcgaccagatgcaggtgctgcgccccaaccccgcccgcgaccgcgacctctgccgcttccacgccgacgactacatctccttcctccgctccgtcacgcccgagacgcagcaggaccagatccgggccctcaagcgcttcaacgtcggcgaggactgccccgtcttcgacggcctctacagcttctgccagacctacgcgggggcctccgtcggcggcgccgtcaagctcaaccacggccttgacatcgccatcaactggtcggggggcctgcaccacgcgaagaagtgcgaggcctcagggttctgctacgtcaacgacatcgtactcgccatactcgagctcctcaagcaccaccagcgagttctctatgtcgatattgatatccaccatggtgacggagttgaggaggcattctacacgacagacagggttatgacagtctcattccacaagtttggggattatttcccaggtacaggggatgtccgtgatattgggcattcaaaaggaaagtattactcccttaatgtccctctggatgatgggattgacgacgaaagctaccagtccctgtttaagcctataatggccaaagttatggaggttttccagcctggtgcagttgtttttcaatgtggcgccgattcgttatctggggataggttgggttgcttcaatctttcgatcagaggtcatgcagaatgcgtgaagtacatgaggtctttcaatgttccattgttgcttcttggcggtggtggctataccataagaaatgtcgcacgatgttggtgttatgagacaggagttgcacttggccaagagctcgaggataagatgcctgtcaatgagtactatgaatacttcggtccagattacactcttcatgtggcaccaagtaacatggagaacaaaaatacacgctacgaactggataatataagaaccaaacttcttgacaatctttcaaaacttcgacatgcccctagcgttcagtttcaagagcgacctcctgatactgagttccctgagccgggtgaagatgaagacgatcaggatgaaaggcatgatgaccctgattctgatatggaaatggattatcacacacctttggaagactcagcaaggagaatcactattcaaggtacaagagttaagagagaatcagctggagctgagacaaaagatcagcaggatggtagcagagtaacaggtgaacatagaggaccagaacctatggcagaagacatgggtccctccaagcaagctcatgtcgacgctaatgccatgaccgtggatgagcccggaattgtcaagaccgaatcaggaagctctaccaagttgcctgacccaccagccatctaccagaagccatgattgtaagcattcggaccgtgcggcttcttgcatgtgtttttgacagtaaaaagacgaagtgacgagtggtagctcgagtgtctgacccatgtatacatgtagcatggattattaagctgtaatatgtatagtcgattaaatgagccgcgaggcagaattttcttggcc

SEQ ID NO: 10396 - protein, 542 aa, Triticum aestivum
  misc_feature (1)..(542): Ceres Seq. ID no. 13596022
TQTRKNNPSPKTPPPRGGGGGVAMDPSSAGAGGNSLPSVGPDGQKRRVCYFYDSEVGNYYYGQGHPMKPHRIRMTHSLLAQYGLLDQMQVLRPNPARDRDLCRFHADDYISFLRSVTPETQQDQIRALKRFNVGEDCPVFDGLYSFCQTYAGASVGGAVKLNHGLDIAINWSGGLHHAKKCEASGFCYVNDIVLAILELLKHHQRVLYVDIDIHHGDGVEEAFYTTDRVMTVSFHKFGDYFPGTGDVRDIGHSKGKYYSLNVPLDDGIDDESYQSLFKPIMAKVMEVFQPGAVVFQCGADSLSGDRLGCFNLSIRGHAECVKYMRSFNVPLLLLGGGGYTIRNVARCWCYETGVALGQELEDKMPVNEYYEYFGPDYTLHVAPSNMENKNTRYELDNIRTKLLDNLSKLRHAPSVQFQERPPDTEFPEPGEDEDDQDERHDDPDSDMEMDYHTPLEDSARRITIQGTRVKRESAGAETKDQQDGSRVTGEHRGPEPMAEDMGPSKQAHVDANAMTVDEPGIVKTESGSSTKLPDPPAIYQKP

SEQ ID NO: 10397 - protein, 519 aa, Triticum aestivum
  misc_feature (1)..(519): Ceres Seq. ID no. 13596023
MDPSSAGAGGNSLPSVGPDGQKRRVCYFYDSEVGNYYYGQGHPMKPHRIRMTHSLLAQYGLLDQMQVLRPNPARDRDLCRFHADDYISFLRSVTPETQQDQIRALKRFNVGEDCPVFDGLYSFCQTYAGASVGGAVKLNHGLDIAINWSGGLHHAKKCEASGFCYVNDIVLAILELLKHHQRVLYVDIDIHHGDGVEEAFYTTDRVMTVSFHKFGDYFPGTGDVRDIGHSKGKYYSLNVPLDDGIDDESYQSLFKPIMAKVMEVFQPGAVVFQCGADSLSGDRLGCFNLSIRGHAECVKYMRSFNVPLLLLGGGGYTIRNVARCWCYETGVALGQELEDKMPVNEYYEYFGPDYTLHVAPSNMENKNTRYELDNIRTKLLDNLSKLRHAPSVQFQERPPDTEFPEPGEDEDDQDERHDDPDSDMEMDYHTPLEDSARRITIQGTRVKRESAGAETKDQQDGSRVTGEHRGPEPMAEDMGPSKQAHVDANAMTVDEPGIVKTESGSSTKLPDPPAIYQKP

SEQ ID NO: 10398 - protein, 476 aa, Triticum aestivum
  misc_feature (1)..(476): Ceres Seq. ID no. 13596024
MKPHRIRMTHSLLAQYGLLDQMQVLRPNPARDRDLCRFHADDYISFLRSVTPETQQDQIRALKRFNVGEDCPVFDGLYSFCQTYAGASVGGAVKLNHGLDIAINWSGGLHHAKKCEASGFCYVNDIVLAILELLKHHQRVLYVDIDIHHGDGVEEAFYTTDRVMTVSFHKFGDYFPGTGDVRDIGHSKGKYYSLNVPLDDGIDDESYQSLFKPIMAKVMEVFQPGAVVFQCGADSLSGDRLGCFNLSIRGHAECVKYMRSFNVPLLLLGGGGYTIRNVARCWCYETGVALGQELEDKMPVNEYYEYFGPDYTLHVAPSNMENKNTRYELDNIRTKLLDNLSKLRHAPSVQFQERPPDTEFPEPGEDEDDQDERHDDPDSDMEMDYHTPLEDSARRITIQGTRVKRESAGAETKDQQDGSRVTGEHRGPEPMAEDMGPSKQAHVDANAMTVDEPGIVKTESGSSTKLPDPPAIYQKP

SEQ ID NO: 10399 - DNA, 1748 bp, Triticum aestivum
  misc_feature (1)..(1748): Ceres Seq. ID no. 13596034
atacaatttctccattcgtctcctactctcctctcccatccctcgccccccctcctcgccgcaagctctaatccccccaagattagctccaacgaacacgaattactgtggattagtgcgaggctttggccgcggcaaatctggggcggggcggttggaagagtcgcggccgaattgtttggtcgagcagatgatgacggcgaacgcgaaactccagaagcaggcgctgctgccgccgcgtagcccgttcccgacggcagcgtcgccgtccccgtacgcagaccatggcccgatcgcccggccacagggcgccacgcaccaccgctttggccatggccacggccatgggcatcaccagcgcacgtcgtctgagagcatcattgaggagcagccgtcgtggctcgacgacctgctcgacgagcctgagacgcccgtgcgccgcgcggggcaccgcaggtcgtcgagcgactcttttgctctgttcgacggaagcgctgcctccggcgcatttgccaatggttttgatgagattgggggaggagggcaggccgcgccatggggtggcgtgcaggagtactatgccaagccaagctcatacgggaggccgcagggccggccgtgggaacaaggcatgccgaatttggcaggttacaggccagggccgccggtgctggtgagggagaagctgggtgggcatcacgggccactgagtgcgtcgagggatcatgaacatgccatggacaaaagagctcttgatgaacttggggcagagaggaaggatggtgtgctgccaaagtatgcacaatcggaggcggacaccaagcgtgctaaacagcaatatgctcagaggtctcgtgttcgaaaactccagtatattgccgagcttgagggtaaagtccaatcattacagtcagaagggatagaagtgtctgctgaaatggagtttcttactcaacaaaatataatgctagacttggaaaacaaagccttgaagcaaaggctggagagtatagcacaggagcaagtaattaaacgtgttcaacaggagatgtttgagcgggaaattggtcgtctaaggtcattgtatcagcagcagcaacagacaccacagcctcctactcttggtcgtagtaacagcagagaccttgactcgcagtttgcaagcatgtctttgaaacaaaaagaccccaactctgggcgtgacgccgtctctgggcctcttcgtacttagttctttcagcctttttttctcgtgagttccaaaccactcctagaccactcttttgtggctgtgaattcgcgtcaagaatccttcaaggaatgcatcaggaaaggagcagcacatttggaattgtgcccctatcacttggtgaataactctggaaaggctaataactgtggatctgatcttcattctttgggaatatgcacctggtggtcatcctcagctcactgccattgttgatgctcgaccagtcggaggtgtttagtgttttatttgtagctctggatgctgttcgtgcatccctgtaccatttcggatcctagggttctaatttgttcctgtggtcttgtttctctatgttgtcttcttcatgcatcttagtcataatctgcattgcttcgtcagtggaatgtggagcactagttagcatctgatacagatgtttttaaatgtgccacatccttgagaactcatttgttttatcgttggtgattcaataaggtagtgcaaataaggtattagc

SEQ ID NO: 10400 - protein, 409 aa, Triticum aestivum
  misc_feature (1)..(409): Ceres Seq. ID no. 15221743
YNFSIRLLLSSPIPRPPSSPQALIPPRLAPTNTNYCGLVRGFGRGKSGAGRLEESRPNCLVEQMMTANAKLQKQALLPPRSPFPTAASPSPYADHGPIARPQGATHHRFGHGHGHGHHQRTSSESIIEEQPSWLDDLLDEPETPVRRAGHRRSSSDSFALFDGSAASGAFANGFDEIGGGGQAAPWGGVQEYYAKPSSYGRPQGRPWEQGMPNLAGYRPGPPVLVREKLGGHHGPLSASRDHEHAMDKRALDELGAERKDGVLPKYAQSEADTKRAKQQYAQRSRVRKLQYIAELEGKVQSLQSEGIEVSAEMEFLTQQNIMLDLENKALKQRLESIAQEQVIKRVQQEMFEREIGRLRSLYQQQQQTPQPPTLGRSNSRDLDSQFASMSLKQKDPNSGRDAVSGPLRT

SEQ ID NO: 10401 - protein, 346 aa, Triticum aestivum
  misc_feature (1)..(346): Ceres Seq. ID no. 15221744
MMTANAKLQKQALLPPRSPFPTAASPSPYADHGPIARPQGATHHRFGHGHGHGHHQRTSSESIIEEQPSWLDDLLDEPETPVRRAGHRRSSSDSFALFDGSAASGAFANGFDEIGGGGQAAPWGGVQEYYAKPSSYGRPQGRPWEQGMPNLAGYRPGPPVLVREKLGGHHGPLSASRDHEHAMDKRALDELGAERKDGVLPKYAQSEADTKRAKQQYAQRSRVRKLQYIAELEGKVQSLQSEGIEVSAEMEFLTQQNIMLDLENKALKQRLESIAQEQVIKRVQQEMFEREIGRLRSLYQQQQQTPQPPTLGRSNSRDLDSQFASMSLKQKDPNSGRDAVSGPLRT

SEQ ID NO: 10402 - protein, 345 aa, Triticum aestivum
  misc_feature (1)..(345): Ceres Seq. ID no. 15221745
MTANAKLQKQALLPPRSPFPTAASPSPYADHGPIARPQGATHHRFGHGHGHGHHQRTSSESIIEEQPSWLDDLLDEPETPVRRAGHRRSSSDSFALFDGSAASGAFANGFDEIGGGGQAAPWGGVQEYYAKPSSYGRPQGRPWEQGMPNLAGYRPGPPVLVREKLGGHHGPLSASRDHEHAMDKRALDELGAERKDGVLPKYAQSEADTKRAKQQYAQRSRVRKLQYIAELEGKVQSLQSEGIEVSAEMEFLTQQNIMLDLENKALKQRLESIAQEQVIKRVQQEMFEREIGRLRSLYQQQQQTPQPPTLGRSNSRDLDSQFASMSLKQKDPNSGRDAVSGPLRT

SEQ ID NO: 10403 - DNA, 1717 bp, Triticum aestivum
  misc_feature (1)..(1717): Ceres Seq. ID no. 13596035
cccaaacccaaacacaggcccatcatctcctggtcccgacctcgcactccccatcccagcatccaactccagctccacctcgccgccgcccccaccatgtacggcgtcggcgtcggcggcggcggaggcgggttcaacgcgccgtccacggcctccgggcggcgcaaaaaccaggaggacgacgacgacgaggaggaggaggagaccggcgacggccgcgtcctcgaggcgtgggagcgcgcctacgccgacgaccgctcgtgggaggcgctgcaggaggacgagtccggcctgctccgccccatcgacaccaagaacctcgtccactcgcagtaccgccgccgcctcctgctccgctccgcggccgccgcggcccgcatccagaagggcctcatccgctacctctacatcgtcatcgacctctccaaggcagcttcagaaatggattatcgccctagtcgaatggctgttgttgctaagtgtgctgaggcattcataagggaattcttcgatcagaatcccttgagccatgttgggttagtgacaattaaagatggcatttctcatcgacttacggagattggagggagtccagagtcacagattaacgcattgatgggcaagcttgagtgttctggtgattcatctctgcagaatgctctagaacttgtcaatggttacttgaaccagattccttcctatggtcacaaggaagtattatttttgtactccgcactgaatacatgtgatcctggtgatatcatggagacaatagaaaaatgcaagaaatccaaagttagatgttcggttattgggcttgctgcagaaattttcatttgcaagcatctctgtgaagagactggtggatcatatacggttgcactagacgagtcccacttcaaggaattgctgcttgaacatgctcctccaccacctgccattgcagagtatgctgcagctaatttgattaagatgggttttccacagaggggagcagaggatcttatctccatctgctcttgtcataagaaaattaaatctggtgctgaaggttacatatgtcccagatgcaaagttaatgtctgtgagcttccgacggagtgccgaacatgtggtctaacacttgttagttctccacatctggcacgatcctatcaccatctcttccctgtagcgccatttgatgaggtgacgttcaaattaggtcaaaagggaggacaaaattgttttggctgccagcagagtctcattaacaccggtggccagtctaatatccatgtctgctgtccaaaatgcaagcaccacttctgcttcgactgtgatatttacatccatgagagcttgcataactgccccggttgcgagagtcagtgcagttcatctcggtagagacgccgccatcatgtgcattgttcaggtgttgatccttttttttgagtcggagctacgcattgttgtaagctttctggtgccctgacgttgatgacagtattgctggacaatcgaacggtgtacagataacacctggcatccttttgttggcacctcttgttagattgtgctagctagttaagctattgatgcagttagaggtggaggtgctgagagtagagcgttgcgttgagaagagacttgaggaatgtacgacgtgaagaatggaaacctggtagctcttgctgttttttctgaagcaagatcaatatatgttattttcttc

SEQ ID NO: 10404 - protein, 462 aa, Triticum aestivum
  misc_feature (1)..(462): Ceres Seq. ID no. 13596036
PKPKHRPIISWSRPRTPHPSIQLQLHLAAAPTMYGVGVGGGGGGFNAPSTASGRRKNQEDDDDEEEEETGDGRVLEAWERAYADDRSWEALQEDESGLLRPIDTKNLVHSQYRRRLLLRSAAAAARIQKGLIRYLYIVIDLSKAASEMDYRPSRMAVVAKCAEAFIREFFDQNPLSHVGLVTIKDGISHRLTEIGGSPESQINALMGKLECSGDSSLQNALELVNGYLNQIPSYGHKEVLFLYSALNTCDPGDIMETIEKCKKSKVRCSVIGLAAEIFICKHLCEETGGSYTVALDESHFKELLLEHAPPPPAIAEYAAANLIKMGFPQRGAEDLISICSCHKKIKSGAEGYICPRCKVNVCELPTECRTCGLTLVSSPHLARSYHHLFPVAPFDEVTFKLGQKGGQNCFGCQQSLINTGGQSNIHVCCPKCKHHFCFDCDIYIHESLHNCPGCESQCSSSR

SEQ ID NO: 10405 - protein, 430 aa, Triticum aestivum
  misc_feature (1)..(430): Ceres Seq. ID no. 13596037
MYGVGVGGGGGGFNAPSTASGRRKNQEDDDDEEEEETGDGRVLEAWERAYADDRSWEALQEDESGLLRPIDTKNLVHSQYRRRLLLRSAAAAARIQKGLIRYLYIVIDLSKAASEMDYRPSRMAVVAKCAEAFIREFFDQNPLSHVGLVTIKDGISHRLTEIGGSPESQINALMGKLECSGDSSLQNALELVNGYLNQIPSYGHKEVLFLYSALNTCDPGDIMETIEKCKKSKVRCSVIGLAAEIFICKHLCEETGGSYTVALDESHFKELLLEHAPPPPAIAEYAAANLIKMGFPQRGAEDLISICSCHKKIKSGAEGYICPRCKVNVCELPTECRTCGLTLVSSPHLARSYHHLFPVAPFDEVTFKLGQKGGQNCFGCQQSLINTGGQSNIHVCCPKCKHHFCFDCDIYIHESLHNCPGCESQCSSSR

SEQ ID NO: 10406 - protein, 315 aa, Triticum aestivum
  misc_feature (1)..(315): Ceres Seq. ID no. 13596038
MDYRPSRMAVVAKCAEAFIREFFDQNPLSHVGLVTIKDGISHRLTEIGGSPESQINALMGKLECSGDSSLQNALELVNGYLNQIPSYGHKEVLFLYSALNTCDPGDIMETIEKCKKSKVRCSVIGLAAEIFICKHLCEETGGSYTVALDESHFKELLLEHAPPPPAIAEYAAANLIKMGFPQRGAEDLISICSCHKKIKSGAEGYICPRCKVNVCELPTECRTCGLTLVSSPHLARSYHHLFPVAPFDEVTFKLGQKGGQNCFGCQQSLINTGGQSNIHVCCPKCKHHFCFDCDIYIHESLHNCPGCESQCSSSR

SEQ ID NO: 10407 - DNA, 1445 bp, Triticum aestivum
  misc_feature (1)..(1445): Ceres Seq. ID no. 13596087
ggtttgaagcaaaccggccggccaccaaccaaccaacgctcccgaatctatcccatcatatcatatcaaaccttccgccgccggcgagctactcgcagcgccggacagcccggcccacttgttctggttctctccctcctctgcccctccgccgcgagctccaacggagaggggaggaagaagcaaagcctcggacatggcacgcgtcctccctctggacatcgagcccggggaggcgcccagagctggtgagacggttgctagcacgccaagctcttcagctgtggtgtcatgcaatagaattgagcattctgagcaaaacataaaggacgacgaatacacgatgctgatgacgccaactcaacatgcaacagctgacaacaacacagaaattttacctcagcaacccaagtcaagtcacttcagttggtggatgacagctctgcttgtctgcttccttcttataatggcaacttatatctttgtgaaatttggagccccctttgcctttgagaaggttctttttccaatcatgaaatgggaagcaagtgcctttggtcgtccagtattggctcttgtcctcgtcgcgtctttggctatcttcccactcattttagtcccctctggaccttctatgtggttagcaggaatgatcttcggttatggctggggtttcgtgattattattgttgggactactcttggcatggttggagcatattggatcggctcattgttccgcgagcgactacatgcatggttaaagagatggcctcagcagatagctctaataaagcttgctggcgaagggagttggttccaccagtttcgagtggttgcgctattcagagtctcaccgtttccatactcgatttttaactatgccgtggccgtgacagaaatcaaattcagcccttatgtatgtggttcagttgccggaatgacacctgaggcattcatctatatctacagcgggcggttgatacgtacgctggccgatgtgaagtatggcaagcataagttgactactgtggagataatctacagcataatctcgttcatcgctgccgctgccctcacggtcgccttcacagtttacgccaagaagtcgctgaacaacataaaaggcccagatgatatctcagaggaccaccaacctgctgctggctctgctggggtgactgcactaaaaaatggccatcaggacgtgcatatcctgtagctttgtttacatgtcgtatgatgtctgtattcattcaattcatcagagaaaataggtagctaggctctgacagcaggtggatgcacctgtcttctaactagatvaatatgtatggttttactgcttgattagtttcatgtggttgatcacccaacatgtattttggccttgttgttggctactggaaatttggccttctcttgaggtgcacatattttttgtc

SEQ ID NO: 10408 - protein, 341 aa, Triticum aestivum
  misc_feature (1)..(341): Ceres Seq. ID no. 15221765
MARVLPLDIEPGEAPRAGETVASTPSSSAVVSCNRIEHSEQNIKDDEYTMLMTPTQHATADNNTEILPQQPKSSHFSWWMTALLVCFLLIMATYIFVKFGAPFAFEKVLFPIMKWEASAFGRPVLALVLVASLAIFPLILVPSGPSMWLAGMIFGYGWGFVIIIVGTTLGMVGAYWIGSLFRERLHAWLKRWPQQIALIKLAGEGSWFHQFRVVALFRVSPFPYSIFNYAVAVTEIKFSPYVCGSVAGMTPEAFIYIYSGRLIRTLADVKYGKHKLTTVEIIYSIISFIAAAALTVAFTVYAKKSLNNIKGPDDISEDHQPAAGSAGVTALKNGHQDVHIL

SEQ ID NO: 10409 - protein, 292 aa, Triticum aestivum
  misc_feature (1)..(292): Ceres Seq. ID no. 15221766
MLMTPTQHATADNNTEILPQQPKSSHFSWWMTALLVCFLLIMATYIFVKFGAPFAFEKVLFPIMKWEASAFGRPVLALVLVASLAIFPLILVPSGPSMWLAGMIFGYGWGFVIIIVGTTLGMVGAYWIGSLFRERLHAWLKRWPQQIALIKLAGEGSWFHQFRVVALFRVSPFPYSIFNYAVAVTEIKFSPYVCGSVAGMTPEAFIYIYSGRLIRTLADVKYGKHKLTTVEIIYSIISFIAAAALTVAFTVYAKKSLNNIKGPDDISEDHQPAAGSAGVTALKNGHQDVHIL

SEQ ID NO: 10410 - protein, 290 aa, Triticum aestivum
  misc_feature (1)..(290): Ceres Seq. ID no. 15221767
MTPTQHATADNNTEILPQQPKSSHFSWWMTALLVCFLLIMATYIFVKFGAPFAFEKVLFPIMKWEASAFGRPVLALVLVASLAIFPLILVPSGPSMWLAGMIFGYGWGFVIIIVGTTLGMVGAYWIGSLFRERLHAWLKRWPQQIALIKLAGEGSWFHQFRVVALFRVSPFPYSIFNYAVAVTEIKFSPYVCGSVAGMTPEAFIYIYSGRLIRTLADVKYGKHKLTTVEIIYSIISFIAAAALTVAFTVYAKKSLNNIKGPDDISEDHQPAAGSAGVTALKNGHQDVHIL

SEQ ID NO: 10411 - DNA, 1617 bp, Triticum aestivum
  misc_feature (1)..(1617): Ceres Seq. ID no. 13596089
aaagaaaccaaggacagagctgaaacatggagaccacggtccccgcggccacagccaccaccagctcgagctccggccacggagccggcggcggtgctgcgagagtcctgctcctcccgtacccgggggcgcagggccacaccaacccgatgctccagctcggccgccgcctggcgtaccacggcctccgccccacactcgtcgccacccgctacgtgctctccaccaccccgccccccggcgcgcccttcggcgtggccgccatctccgacggctgcgacgccggcggcatggcctcgtgcccggacatggcggagtacgtctcgcggctggcggccgtgggctccgagacgctgcgggagctcctcctgtcggaggcgcgcgcggggcggcccgtgcgcgtgctggtgtacgacgctcacctggcgtgggcgcggcgggtggcgcaggcgtccggcgtcgcggccgcggccttcttctcccagccgtgcgcggtggacgtcgtctacggggagctgtgggcggggcggctggcgctgccggcgacggacgggcgcgcgctgctcgcgagaggagcgctaggcgtggagctggggccggaggacatgccgccgttcgcggcggtgccggagtcgcagccaacgttcctcaaggtgtcagttgggcagttcgaggggctggaggacgccgacgacgtgctcgtcaactcattccgcgacctcgagccaaaggaggtagagtacatggagttaacatggagagcgaagatggttggcccaaccttgccatcattctacctcgacgatgatcgcctaccatccaataaatcatacggtttcgactttttcaacggtgatgcactgtgcatggattggctagagaagcaaagcaattcatccgttgtgctggtgtcctatgggactgtctctgattatgatgcaacccaactagaggagcttggcaatggactgtgcaattccggaaaaccttttctttgggttgtaaggtccaacgaggaacacaagttatccaaagaactcaaggaaaaatgtgaggagattggattaattgtctcatggtgcccccagcttgaggttcttgcacatagggctattggttgctttgttacccattgtggatggaactcgacattagaggcacttgctaatggtgtacctctagtgggtattccgcattgggctgaccaacccaccattgcaaagtatgtggagagtgcatggagcatgggtgtgcgtgtacggaaggacaataatggatatctaaagctagaggaggtcgagaggtgcattagagaggtgatggatatagagaaaaaggatgagtacaaaagaaatgctgtgaagtggatgcaaaaggccaaggaggcaatgcaggaaggaggaagttcagacaagaatatcgctgaatttgctaccaagtattcatcaatataaagtttgaacaatgttttacttcaatataagcaagtaggcagtgattttggccctacagaagtttagagtggccgacattttccatatgtaattgtagtgatatcttcttcacatttagaagtatgctggactttttatatatatacgacatgcgattttttct

SEQ ID NO: 10412 - protein, 475 aa, Triticum aestivum
  misc_feature (1)..(475): Ceres Seq. ID no. 15221771
METTVPAATATTSSSSGHGAGGGAARVLLLPYPGAQGHTNPMLQLGRRLAYHGLRPTLVATRYVLSTTPPPGAPFGVAAISDGCDAGGMASCPDMAEYVSRLAAVGSETLRELLLSEARAGRPVRVLVYDAHLAWARRVAQASGVAAAAFFSQPCAVDVVYGELWAGRLALPATDGRALLARGALGVELGPEDMPPFAAVPESQPTFLKVSVGQFEGLEDADDVLVNSFRDLEPKEVEYMELTWRAKMVGPTLPSFYLDDDRLPSNKSYGFDFFNGDALCMDWLEKQSNSSVVLVSYGTVSDYDATQLEELGNGLCNSGKPFLWVVRSNEEHKLSKELKEKCEEIGLIVSWCPQLEVLAHRAIGCFVTHCGWNSTLEALANGVPLVGIPHWADQPTIAKYVESAWSMGVRVRKDNNGYLKLEEVERCIREVMDIEKKDEYKRNAVKWMQKAKEAMQEGGSSDKNIAEFATKYSSI

SEQ ID NO: 10413 - protein, 434 aa, Triticum aestivum
  misc_feature (1)..(434): Ceres Seq. ID no. 15221772
MLQLGRRLAYHGLRPTLVATRYVLSTTPPPGAPFGVAAISDGCDAGGMASCPDMAEYVSRLAAVGSETLRELLLSEARAGRPVRVLVYDAHLAWARRVAQASGVAAAAFFSQPCAVDVVYGELWAGRLALPATDGRALLARGALGVELGPEDMPPFAAVPESQPTFLKVSVGQFEGLEDADDVLVNSFRDLEPKEVEYMELTWRAKMVGPTLPSFYLDDDRLPSNKSYGFDFFNGDALCMDWLEKQSNSSVVLVSYGTVSDYDATQLEELGNGLCNSGKPFLWVVRSNEEHKLSKELKEKCEEIGLIVSWCPQLEVLAHRAIGCFVTHCGWNSTLEALANGVPLVGIPHWADQPTIAKYVESAWSMGVRVRKDNNGYLKLEEVERCIREVMDIEKKDEYKRNAVKWMQKAKEAMQEGGSSDKNIAEFATKYSSI

SEQ ID NO: 10414 - protein, 387 aa, Triticum aestivum
  misc_feature (1)..(387): Ceres Seq. ID no. 15221773
MASCPDMAEYVSRLAAVGSETLRELLLSEARAGRPVRVLVYDAHLAWARRVAQASGVAAAAFFSQPCAVDVVYGELWAGRLALPATDGRALLARGALGVELGPEDMPPFAAVPESQPTFLKVSVGQFEGLEDADDVLVNSFRDLEPKEVEYMELTWRAKMVGPTLPSFYLDDDRLPSNKSYGFDFFNGDALCMDWLEKQSNSSVVLVSYGTVSDYDATQLEELGNGLCNSGKPFLWVVRSNEEHKLSKELKEKCEEIGLIVSWCPQLEVLAHRAIGCFVTHCGWNSTLEALANGVPLVGIPHWADQPTIAKYVESAWSMGVRVRKDNNGYLKLEEVERCIREVMDIEKKDEYKRNAVKWMQKAKEAMQEGGSSDKNIAEFATKYSSI

SEQ ID NO: 10415 - DNA, 1408 bp, Triticum aestivum
  misc_feature (1)..(1408): Ceres Seq. ID no. 13596097
gccaacagtccaataaaagggactgcacccatcagtgtaaaaacaagcagcagtcaggcttcaatacaagcagactagtacgtagtacacgcaaggcagctcttctagttcttaggtgtgtgtagtacgtgcatcgatcctgtttgtttgatcctcatagagctacctactcgatcgcaccacttgaaattgcagccaaggccttgtagcacacccaagctagctagcagagcatttggtatttgaattggccgggaggaactatggtgctggacaagcaagacaggagcagagtcctggtaattggtggcacaggtcacattgggaagcacatcgttgctgcgagtgtccgccgcgacaacccgacctgtgtcctcattagggatgctgcaccggcttatctggccaaggcgcagctcctcaagagcttcattgattccggtgttgctctcatcaagggggatttatttgaccacgacagcctcgtaaatgccatcaagggtgcagatgccgtgatctcggccgtggggacctgtcagctcgacgagcagacgaggattgtcatggccatcaaggaggctggcaatgtcattaagaggttcctgccgtctgagttcggctctgacccagagcgggttcacaccgtggatccagcggccacactatacgctggtaaaatcagccttcgccgtctgatcgaggcggagggtatacctcatacatatgtctgctgcaacgggttcgccgaaacctaccttgtgagcatcggcgatgttacggctcttggcgctggtcctcggtccgacaagatcactgtcctaggcgatggagttgcaaaaggggtgtttgtggtggaagaggacatagctgcctacacggtgagagcgatcgaggatacgaggaccctgaacaagatcctgtacatgaggccgccggcgaacatcgtgtcccacaacgagctcatcgcactgtgggagaagaaagcgggaaggactttccagatcgctcgcatcccagagccggatctcctcaagttgatcaaggaggcggcataccctctcaacatgatgctgtcccactcgctctccgtcttggtgaggggcgaccaagccaacttcgacatcgagccgtcctttggtgttgaggccaccgagctgtaccctgacgtgaagtacaccaccgtcgacgagtacctggaccgcctcctctgacacttcttggctggatggagcactaaagatgatagagcagtggcctctccaaatgcaatgatgcgtgtgtcttgtgtgcaaattcaccagaaagaaaagaagaacctctgcgttccttgctaaaaaacatgatttgtggccgtgcataggctagtttatatatctttcctaataataaagggattatngcttntgcc

SEQ ID NO: 10416 - protein, 315 aa, Triticum aestivum
  misc_feature (1)..(315): Ceres Seq. ID no. 13596098
MVLDKQDRSRVLVIGGTGHIGKHIVAASVRRDNPTCVLIRDAAPAYLAKAQLLKSFIDSGVALIKGDLFDHDSLVNAIKGADAVISAVGTCQLDEQTRIVMAIKEAGNVIKRFLPSEFGSDPERVHTVDPAATLYAGKISLRRLIEAEGIPHTYVCCNGFAETYLVSIGDVTALGAGPRSDKITVLGDGVAKGVFVVEEDIAAYTVRAIEDTRTLNKILYMRPPANIVSHNELIALWEKKAGRTFQIARIPEPDLLKLIKEAAYPLNMMLSHSLSVLVRGDQANFDIEPSFGVEATELYPDVKYTTVDEYLDRLL

SEQ ID NO: 10417 - protein, 215 aa, Triticum aestivum
  misc_feature (1)..(215): Ceres Seq. ID no. 13596099
MAIKEAGNVIKRFLPSEFGSDPERVHTVDPAATLYAGKISLRRLIEAEGIPHTYVCCNGFAETYLVSIGDVTALGAGPRSDKITVLGDGVAKGVFVVEEDIAAYTVRAIEDTRTLNKILYMRPPANIVSHNELIALWEKKAGRTFQIARIPEPDLLKLIKEAAYPLNMMLSHSLSVLVRGDQANFDIEPSFGVEATELYPDVKYTTVDEYLDRLL

SEQ ID NO: 10418 - DNA, 1235 bp, Triticum aestivum
  misc_feature (1)..(1235): Ceres Seq. ID no. 13596108
tcctcttcctctcaggcgcccacctcctcccctgcctgcggctcaagcttccgttcccctccaggcctcgcgcgcagaggcagggcggcggcgttcagttgtcttctcggcggcgggcgggcaggcatgggcgccagcgggggcggggaagacaagcccttcaatttcctccagatcctctgcgagggcgtcatagccggaggagctgccggggtcgtggttgaaacggctctgtaccccatcgacaccatcaagaccaggcttcaggctgctcgagctggaagtcaaatccaatggaaaggcctgtattccggactaggtggaaatcttgtcggtgttctcccggcttctgctctgtttgtgggaatatatgagccaactaaacggaagctactggacatgtttcctgaaaatttgagtgctgttgctcatcttactgcaggtgctgttggagggttgggtgcttctctcattcgtgttcccacagaggtggtcaaacaaaggatgcaaactggtcaattcaggactgcgcctgatgctgttcgtctcatagttgccaaggaaggatttagaggtctttttgctggttatggttcatttttacttcgagatcttccgtttgatgccattcaattctgcatatatgagcaacttcgaattggttacaagcttatggcaaagagggagctgaaggatccagagaatgcactaattggtgcttttgccggtgcgattactggcgctataacgacccccctcgatgttctgaagacaaggttgatgattcaggggcaaacgaagcaatactccggaatcgtaagctgtgctaagacgatcttgagagaggaaggcccaggggcattcttgaagggcatcgagccgcgagttctgtggatcggcatcggtgggtccatcttcttcggcgtgctggagaagaccaagtcggtgctcgctgagcggagcagccgcaaggctgcgctggcggagaaggacgagtgaaccaaccgaccaaaccaactgtgcatcctatgctgactcactctacaccattacccgttccttaaacctgaagttttgctccaagtttatgtggtgggctttgcatttctcgttccagaactataaggcatacaatcagtttcaagagtctgttttgacgtcggcgatggttatgatcctttatgagtccctgtaaacattactctcctttaataaagtttagcagattgttcttc

SEQ ID NO: 10419 - protein, 332 aa, Triticum aestivum
  misc_feature (1)..(332): Ceres Seq. ID no. 15221774
SSSSQAPTSSPACGSSFRSPPGLARRGRAAAFSCLLGGGRAGMGASGGGEDKPFNFLQILCEGVIAGGAAGVVVETALYPIDTIKTRLQAARAGSQIQWKGLYSGLGGNLVGVLPASALFVGIYEPTKRKLLDMFPENLSAVAHLTAGAVGGLGASLIRVPTEVVKQRMQTGQFRTAPDAVRLIVAKEGFRGLFAGYGSFLLRDLPFDAIQFCIYEQLRIGYKLMAKRELKDPENALIGAFAGAITGAITTPLDVLKTRLMIQGQTKQYSGIVSCAKTILREEGPGAFLKGIEPRVLWIGIGGSIFFGVLEKTKSVLAERSSRKAALAEKDE

SEQ ID NO: 10420 - protein, 290 aa, Triticum aestivum
  misc_feature (1)..(290): Ceres Seq. ID no. 15221775
MGASGGGEDKPFNFLQILCEGVIAGGAAGVVVETALYPIDTIKTRLQAARAGSQIQWKGLYSGLGGNLVGVLPASALFVGIYEPTKRKLLDMFPENLSAVAHLTAGAVGGLGASLIRVPTEVVKQRMQTGQFRTAPDAVRLIVAKEGFRGLFAGYGSFLLRDLPFDAIQFCIYEQLRIGYKLMAKRELKDPENALIGAFAGAITGAITTPLDVLKTRLMIQGQTKQYSGIVSCAKTILREEGPGAFLKGIEPRVLWIGIGGSIFFGVLEKTKSVLAERSSRKAALAEKDE

SEQ ID NO: 10421 - protein, 199 aa, Triticum aestivum
  misc_feature (1)..(199): Ceres Seq. ID no. 15221776
MFPENLSAVAHLTAGAVGGLGASLIRVPTEVVKQRMQTGQFRTAPDAVRLIVAKEGFRGLFAGYGSFLLRDLPFDAIQFCIYEQLRIGYKLMAKRELKDPENALIGAFAGAITGAITTPLDVLKTRLMIQGQTKQYSGIVSCAKTILREEGPGAFLKGIEPRVLWIGIGGSIFFGVLEKTKSVLAERSSRKAALAEKDE

SEQ ID NO: 10422 - DNA, 1198 bp, Triticum aestivum
  misc_feature (1)..(1198): Ceres Seq. ID no. 13596109
aaagaaaaagtccacgccacctcactgcagggcacgccgtcgcgcggagccagccagggcggtcgccgccggccgcgaccatggccgacggcaagcgcagcgtcgcggagaccttctccagactccgggagcgcggcaagacggcattcatcccattcatcaccgccggtgaccctgatttggcgaccacatcaaaggcgcttaggatcctagactcctgcggctcaaacgtgatcgagctcggcgtgccctactcggatccgttagctgatggtccagtcattcaggctgcagcatcccgtgcgcttaagaaaggcactaagctcggttctgtcttggcgatgctcacggaggttataccagagctctcttgtccaatagttctcttcacatactacaacccgattctaaaaaatggggtgcgaaacttcatggctaagattaagcaagctggtgtacatggtcttgtcgtacctgatcttcctttggaggagacaacattgttgaggagcgaggccactatgcataacatagagctggtgctacttacaacaccaaccacaccaacagagaggatgaaggaaatcacaaaagcttcagaaggattcgtttatcttgtgagtgctgtcggagttacaggtgcacgctcaaatgtaaacttacgcgttgagcatcttcttaaggagatcaagcaggttacagacaaacctgtggctgttggctttggcatatcaactccagagcatgcgaagcagattgcgggctggggagcggatggtgtgattattggcagtgcgattgttagacagttgggcgaagccgcttctccggaagaaggactgagaagaatagaagagtacgccaagagcatcaaggcggctattccatgagatgggcagttccatcatgaacaagccaattagtagatcgtaagcatgtcgtttatcatctggtagtctgcttgatggacctggaatctgtagttcgtctggcatatttgattccagtgctcaaaacaattatatctttgtgtgttagaatcacaacatgaattaacaaggtaatctggaaatggtacgaagctcgatttctgttgtgaggaaacattgtgagatgtagtgttcttatgtggaaatatggaatgttagaatttggaaggacttgtcctgagaggagcaacaggataagtccatggtgc

SEQ ID NO: 10423 - protein, 295 aa, Triticum aestivum
  misc_feature (1)..(295): Ceres Seq. ID no. 15221777
RKSPRHLTAGHAVARSQPGRSPPAATMADGKRSVAETFSRLRERGKTAFIPFITAGDPDLATTSKALRILDSCGSNVIELGVPYSDPLADGPVIQAAASRALKKGTKLGSVLAMLTEVIPELSCPIVLFTYYNPILKNGVRNFMAKIKQAGVHGLVVPDLPLEETTLLRSEATMHNIELVLLTTPTTPTERMKEITKASEGFVYLVSAVGVTGARSNVNLRVEHLLKEIKQVTDKPVAVGFGISTPEHAKQIAGWGADGVIIGSAIVRQLGEAASPEEGLRRIEEYAKSIKAAIP

SEQ ID NO: 10424 - protein, 269 aa, Triticum aestivum
  misc_feature (1)..(269): Ceres Seq. ID no. 15221778
MADGKRSVAETFSRLRERGKTAFIPFITAGDPDLATTSKALRILDSCGSNVIELGVPYSDPLADGPVIQAAASRALKKGTKLGSVLAMLTEVIPELSCPIVLFTYYNPILKNGVRNFMAKIKQAGVHGLVVPDLPLEETTLLRSEATMHNIELVLLTTPTTPTERMKEITKASEGFVYLVSAVGVTGARSNVNLRVEHLLKEIKQVTDKPVAVGFGISTPEHAKQIAGWGADGVIIGSAIVRQLGEAASPEEGLRRIEEYAKSIKAAIP

SEQ ID NO: 10425 - protein, 182 aa, Triticum aestivum
  misc_feature (1)..(182): Ceres Seq. ID no. 15221779
MLTEVIPELSCPIVLFTYYNPILKNGVRNFMAKIKQAGVHGLVVPDLPLEETTLLRSEATMHNIELVLLTTPTTPTERMKEITKASEGFVYLVSAVGVTGARSNVNLRVEHLLKEIKQVTDKPVAVGFGISTPEHAKQIAGWGADGVIIGSAIVRQLGEAASPEEGLRRIEEYAKSIKAAIP

SEQ ID NO: 10426 - DNA, 1300 bp, Triticum aestivum
  misc_feature (1)..(1300): Ceres Seq. ID no. 13596110
cccactcaaagcaccaaccctagctcccgcacccccgcaccctcgccgcagccatggcggaagaagccgccgccaccgcctccgcctccgccaccaacttcgaggtggacctgggccacctcctggcctacgacccctcgcaccacctcgccgccggcgccgcgtcctcccgggcggagctgcgggacgagtgcctgcggaaggccacggagctcgcgcaggccgtcgccaacgccctcttctcgctgcccgccaccgagggccgcgacggccctgtcgtccgcctcccgccgcccaccaaccgcctaccccgcgagaagcacttgccaaggccaaagcctcctaccaagtgggagcagttcgcaaagtcgaaagggattatcaagcacaagaagaacaagcgtgcatgggatgagcaaactaattcctggaagcggacgtatggctatgatcgtgttaatgatgacagagacgttcccatcattgaagccaaattgacagacgagcctggtgttgatccttttgctcaaagaagggaagagaagaagggcagggtcgataaacaagaaaagaacagacttgggaatttgaagaatgctgcaaaagttggtgctctgccaagtcatatacagctcgctgccacgtccgtgcccatcacaggaactaaagctgatctgccaagaaaagctaagaaggaagacctcgagaatgtcgctggtatggcttctgcagcaacggctagcggtggaaagtttgataaaaagttgcctggtgagaaacctctaaagaaggctggcaaaaacagaaagttcctccctgttgttgaagggaaaggaatgggcaacctagagaaacagcaaaacgacaagatcctgaacagtctactggccaagaacttcgaggaaccattggatgtcagcaaggcaatcacgatgtacaaggtgaagaaggacaacaagaggaggaaagacaagcaatcatcgtcgtcgtccggatcaaataagttgaagccccagaagaaaatccacaagaaatcttcaaagaaaagcgcttaggtccttccacatcatcgttgagacatgccgtgctgtaggcggcgagcgcagtctccaagcatcaaggatagtcttggcaaattttgtatggtcattgtcctgtttaagtcccaagggagaaatatagttattccggttaccactggttatgatatggcgcaagaagctgagtgccgtgatgacatagctgtacacgtattgtattttcagaagtttgggaaatgtttctggaaagctttgttggc

SEQ ID NO: 10427 - protein, 333 aa, Triticum aestivum
  misc_feature (1)..(333): Ceres Seq. ID no. 13596111
MAEEAAATASASATNFEVDLGHLLAYDPSHHLAAGAASSRAELRDECLRKATELAQAVANALFSLPATEGRDGPVVRLPPPTNRLPREKHLPRPKPPTKWEQFAKSKGIIKHKKNKRAWDEQTNSWKRTYGYDRVNDDRDVPIIEAKLTDEPGVDPFAQRREEKKGRVDKQEKNRLGNLKNAAKVGALPSHIQLAATSVPITGTKADLPRKAKKEDLENVAGMASAATASGGKFDKKLPGEKPLKKAGKNRKFLPVVEGKGMGNLEKQQNDKILNSLLAKNFEEPLDVSKAITMYKVKKDNKRRKDKQSSSSSGSNKLKPQKKIHKKSSKKSA

SEQ ID NO: 10428 - DNA, 1641 bp, Triticum aestivum
  misc_feature (1)..(1641): Ceres Seq. ID no. 13596115
ccagctctccctctcgctcccggcggcggctgcctcgtcggagtcgcccctcgacggcggctagcctcgtcggacgcgctcctcgacggcggtgcgagcctccctgcgcggtctctggggattcttgcagaacttgagtacagtcctgttgggttcatcaccagctgttaaagagtgattcagtgatagagaccataacaggtggcagtggtaagcttagaggagatgtaccgtggtgggcttgaccgcttcaagaaagctcaggccttggagccgttctcggtgcagcagtctggttccggcgcaaagagcgtgccccctgcggtgaaagtgcagccagctccgttggtgccgccgcaaagctcacatcttggtcccagccagagtcagcatgctccgcagagtgctggctcaagcatgggcgggcaagaagctgctggggctcccagacccgccgggacacagtttggtggtgggcagtcgacgtggcaaccgccggactgggcaattgagccgcgccctggggtttactatcttgaggtgatgaaggatgggaatgccattgataggatcaatctggacaagaagaggcatatatttgggaggcaggtgcctgcttgcgagattgtcttggaccatcagtctgtctcacgccaacatgctgctgtcgttccacacaaaaatggaagcatctatgttatcgatttaggatctgtccatggtacatttgttgcaaacgagagattaaccaaggacaaccctgttgaacttgaagttggacagtcacttcgctttgctgcatcaaccagggcgtatgttctacgaaagaacacagctgcttttttccccactcaaagtctcccttcagatgtgagtttgccgtctcctccagactctgacgatgaagacgccgttgttgcatacaatacaatacttaatcgctatggtgttagcaaatcagacgtgccattgaagagaaaaggttcttctggggatgcttctgcttctgctgtaaatgatgacaaccaggcagtcggtagaccatcaaagagaatcagaaagcggagagtgtcatttagagatcaggttggtggagagcttattcaggtggttgggatttctgatggtgcagatgttgaaactgaaccaggcccagtaggtgtgaaggaaggcagtcttgttgggaagtacgagtctcttgtacaggtcactgtcataccaaaaggaaaggagcaaacttcgtcaaaggacagtgcctcccacagtggggtaacagataagctacaacatatgcttaacaaagttaaaagcacatccagaggtggtatgtatgatgacctttacggggactctgttccagcaaaactgggatcatcatgggcgtacaaatcagatggccagccagagcaagtcaaagttgttgatgaaaagaagtctagcagggacgttggtgcaaatccagctgatgatagtgatgatgacttgtttggcgactagttattttgtcacatttccagttagtagtgaattgccttgattacaaacacatggcagcagaaatgttatgtttgccttgggtattttgctttgttctacatgattgtatcctgctgtgaatcaaggtaatctcttttttgcctc

SEQ ID NO: 10429 - protein, 423 aa, Triticum aestivum
  misc_feature (1)..(423): Ceres Seq. ID no. 15221780
MYRGGLDRFKKAQALEPFSVQQSGSGAKSVPPAVKVQPAPLVPPQSSHLGPSQSQHAPQSAGSSMGGQEAAGAPRPAGTQFGGGQSTWQPPDWAIEPRPGVYYLEVMKDGNAIDRINLDKKRHIFGRQVPACEIVLDHQSVSRQHAAVVPHKNGSIYVIDLGSVHGTFVANERLTKDNPVELEVGQSLRFAASTRAYVLRKNTAAFFPTQSLPSDVSLPSPPDSDDEDAVVAYNTILNRYGVSKSDVPLKRKGSSGDASASAVNDDNQAVGRPSKRIRKRRVSFRDQVGGELIQVVGISDGADVETEPGPVGVKEGSLVGKYESLVQVTVIPKGKEQTSSKDSASHSGVTDKLQHMLNKVKSTSRGGMYDDLYGDSVPAKLGSSWAYKSDGQPEQVKVVDEKKSSRDVGANPADDSDDDLFGD

SEQ ID NO: 10430 - protein, 359 aa, Triticum aestivum
  misc_feature (1)..(359): Ceres Seq. ID no. 15221781
MGGQEAAGAPRPAGTQFGGGQSTWQPPDWAIEPRPGVYYLEVMKDGNAIDRINLDKKRHIFGRQVPACEIVLDHQSVSRQHAAVVPHKNGSIYVIDLGSVHGTFVANERLTKDNPVELEVGQSLRFAASTRAYVLRKNTAAFFPTQSLPSDVSLPSPPDSDDEDAVVAYNTILNRYGVSKSDVPLKRKGSSGDASASAVNDDNQAVGRPSKRIRKRRVSFRDQVGGELIQVVGISDGADVETEPGPVGVKEGSLVGKYESLVQVTVIPKGKEQTSSKDSASHSGVTDKLQHMLNKVKSTSRGGMYDDLYGDSVPAKLGSSWAYKSDGQPEQVKVVDEKKSSRDVGANPADDSDDDLFGD

SEQ ID NO: 10431 - protein, 317 aa, Triticum aestivum
  misc_feature (1)..(317): Ceres Seq. ID no. 15221782
MKDGNAIDRINLDKKRHIFGRQVPACEIVLDHQSVSRQHAAVVPHKNGSIYVIDLGSVHGTFVANERLTKDNPVELEVGQSLRFAASTRAYVLRKNTAAFFPTQSLPSDVSLPSPPDSDDEDAVVAYNTILNRYGVSKSDVPLKRKGSSGDASASAVNDDNQAVGRPSKRIRKRRVSFRDQVGGELIQVVGISDGADVETEPGPVGVKEGSLVGKYESLVQVTVIPKGKEQTSSKDSASHSGVTDKLQHMLNKVKSTSRGGMYDDLYGDSVPAKLGSSWAYKSDGQPEQVKVVDEKKSSRDVGANPADDSDDDLFGD

SEQ ID NO: 10432 - DNA, 867 bp, Triticum aestivum
  misc_feature (1)..(867): Ceres Seq. ID no. 13596128
aacaatctacatttgacttccagcagaggaagcgagccaagatgggcacaccggcggccgtcagggtgatcggcgccttcgacagcccgtttagccaccgcgccgaggtcgccctgtgcctcaagggcgttccctacgagctcatcctggaggagctccacaacaagagcgagctgctgcttacgagcaaccccgtccacaagaaggtgcccgtgctcctccacggcgaccgcaccatctgcgagtcgctcatcatcgtcgagtacgttgacgagaccttcgacgggccggcgcttctcccaacggacccctacgaccgtgccactgcccgcttgtggtcccgcttcatcgatgacaagtgctcgaagccgttctggctggcgatgtggactgatggggaagcgcagaaggggttcacgaaggagatcaaggagaacttcgcgctcctggaggcgcagctcgagggtaagaggttcttcggcggcggcaccattggcctcgtcgacatagccgcctgcgggttcgcgcactggctcaccgtctgcgaggaggtttctggcgtgacactggtcacggccgaggagttccctcgcctgtgccgctgggccaaagagtatgcctccgacgagaaggtcagagcgtgcctgccggacagggcgcagatgctcgcccatttcacggccaacaaggagatgttcatggccatggcaaagtcaatgctgccaaaataatgtgatgtatgttgatgtggaagtggatgcgtgcatgaaagatatcgtagcccagagcgcatggtcgtcatgtgatggaataaagaaaaagcatttactagtattaatcagtcatctgatttatttattatttctc

SEQ ID NO: 10433 - protein, 242 aa, Triticum aestivum
  misc_feature (1)..(242): Ceres Seq. ID no. 13596129
QSTFDFQQRKRAKMGTPAAVRVIGAFDSPFSHRAEVALCLKGVPYELILEELHNKSELLLTSNPVHKKVPVLLHGDRTICESLIIVEYVDETFDGPALLPTDPYDRATARLWSRFIDDKCSKPFWLAMWTDGEAQKGFTKEIKENFALLEAQLEGKRFFGGGTIGLVDIAACGFAHWLTVCEEVSGVTLVTAEEFPRLCRWAKEYASDEKVRACLPDRAQMLAHFTANKEMFMAMAKSMLPK

SEQ ID NO: 10434 - protein, 229 aa, Triticum aestivum
  misc_feature (1)..(229): Ceres Seq. ID no. 13596130
MGTPAAVRVIGAFDSPFSHRAEVALCLKGVPYELILEELHNKSELLLTSNPVHKKVPVLLHGDRTICESLIIVEYVDETFDGPALLPTDPYDRATARLWSRFIDDKCSKPFWLAMWTDGEAQKGFTKEIKENFALLEAQLEGKRFFGGGTIGLVDIAACGFAHWLTVCEEVSGVTLVTAEEFPRLCRWAKEYASDEKVRACLPDRAQMLAHFTANKEMFMAMAKSMLPK

SEQ ID NO: 10435 - DNA, 1644 bp, Triticum aestivum
  misc_feature (1)..(1644): Ceres Seq. ID no. 13596131
gcaaaaggaccaaactcacgcgacgacgaagaaagaagcggagaccggagatcgagatcgccggtgggagagatggagccgagacgagcgatccaccgcagatccggcgcgctcctcctcctcctcgccgctgtattcgcggcggccgccggcgcctccgcctccgccatcggcgacaggtgcgccgcctgcaaagccgtcgcggctgagctagagattggaatatcaagtgagaaaccaagaaaccacttggacttgcgtaacaggttaaattcgaaaggtcagcgcgaggggaaggtcatcgattacagagtcagtgagcttcggattgtagagcttctggatgacctatgtgataagatgcaagactatacgctgcagaagttggaatcaggcgaaaaagaatgggtgaaagtaccaagctggagcagttttcaaactgataagaaagctgcagcacgagcacactccaaaaatctatccagttactgtggaaggttactggaggaaactgaggacgagcttgctgagtggataaaaacaagctcggcagaatccgcggacgtgagccaggccctttgccaggatattagcaaacactgccagttaacaagtgctacagccccggtcgacgatgaactataacagcacgtgttagctccccgtatttactcgacaaagaaaagcagatgaatgcctgagaagcgtcaaagaagaagctccagtaggatatgaggctgtgatgtcttagcgtctgcatttttacacactcgcattgttgtcttaaagagggacttgcagattttcacatatgattactgatgtattgagaacattcaaactttgaggaatttctgcatgctgaattacagttagcagcatggtatgattcgctgaactaatctgaattcaacaatgcgagtgaggtatcatggacctcgaactgttaagccactagctgctttctacagtgatgtttcaggcatcagtgcatcagtagagtcaaccaatggggaggccatgccacacccgttagatgaaattgagccaaaaaaggatgttgaaccggagaattgtccattctggtgggcgcgttcgcccgaaaatatactgcagcaggatacatatctagcactggcagcttcttttgtaatcctgcggttgctgtatcttctattcccaaggatagtttctgcagcaaaatgggcatggaggaggcatactctgtttgcgaacttgatgggcgtgcatgaatatttcttcacctacctcgagcaagcaagacagaaattgagtaggttatacccttcgaagcgagggaatttacaggagggggcaaggaatgccactgcctgggcctccaaatcattagcatctgtgtcaatcggagaaccaagcactatcggaaggacgaactccacgaatgaactgaggtgaagtgtaaacttttttgtccgcagggatattatgtacagtagagtgatgaggatatgagcaccaagaatctgttgtaaccagctttgttagctattgtaacatcatcattagaataagcacctcccccagtattgttgccattataaccttgtcttgaatagctgttgcccaaacatattcttggaggaaaaaggtttgacgtgttcc

SEQ ID NO: 10436 - protein, 214 aa, Triticum aestivum
  misc_feature (1)..(214): Ceres Seq. ID no. 13596132
AKGPNSRDDEERSGDRRSRSPVGEMEPRRAIHRRSGALLLLLAAVFAAAAGASASAIGDRCAACKAVAAELEIGISSEKPRNHLDLRNRLNSKGQREGKVIDYRVSELRIVELLDDLCDKMQDYTLQKLESGEKEWVKVPSWSSFQTDKKAAARAHSKNLSSYCGRLLEETEDELAEWIKTSSAESADVSQALCQDISKHCQLTSATAPVDDEL

SEQ ID NO: 10437 - protein, 190 aa, Triticum aestivum
  misc_feature (1)..(190): Ceres Seq. ID no. 13596133
MEPRRAIHRRSGALLLLLAAVFAAAAGASASAIGDRCAACKAVAAELEIGISSEKPRNHLDLRNRLNSKGQREGKVIDYRVSELRIVELLDDLCDKMQDYTLQKLESGEKEWVKVPSWSSFQTDKKAAARAHSKNLSSYCGRLLEETEDELAEWIKTSSAESADVSQALCQDISKHCQLTSATAPVDDEL

SEQ ID NO: 10438 - protein, 173 aa, Triticum aestivum
  misc_feature (1)..(173): Ceres Seq. ID no. 13596134
MRVRYHGPRTVKPLAAFYSDVSGISASVESTNGEAMPHPLDEIEPKKDVEPENCPFWWARSPENILQQDTYLALAASFVILRLLYLLFPRIVSAAKWAWRRHTLFANLMGVHEYFFTYLEQARQKLSRLYPSKRGNLQEGARNATAWASKSLASVSIGEPSTIGRTNSTNELR

SEQ ID NO: 10439 - DNA, 828 bp, Triticum aestivum
  misc_feature (1)..(828): Ceres Seq. ID no. 13596179
acacacgaaagcaacagccagcgatcgagacagcaagagaagctcactcagctcagctaccaccagtcccggtcacagcaatcggcatggccagcaagtcggcgtccctgctgatcctcgcggcgctggtggccgcggcgtgcctcacggagctgggctcggcggcgcgcggcgtgccggcggagaagcccgcggaggacgatgtgaagcggccggacacgttccaggaggggacggtgctgatcccggggatcgggcggtacgagctgggcacccactacatccccgacatcggcgggctggaccacagcatcccggccgccgccagtggacagttcatccccggcgccgacgacacctgggtgcccaaccccggctttgagattcccaaccccttccgcccccgctccgactctccctgatgggccgagccggccggccgccagcacgtccacgccaacgcccaccgtccgcccacacgttgcacccgtccatctacttggtagagctagcctgctacaaatcattttccgctagctttttggttgctacaataaaatagctgctgctacatggccatgcatgcatgtgtctgcgactgcgttcgcgccgtcgacgtctcgtgtttgattgaagtgtacgtgtagtcgtgtatgggatatggacggatgcgtaggaagcatccatcgcatgtctcgcttggtttgttgttgccagtgtaatgtgtttcagttcagtaagttttttgaatgataaaaaaaaaaaaaaaaaagcttatcgataccgtcgatccttcgakgkggggcccgktaaacmcaataaagtggg

SEQ ID NO: 10440 - protein, 139 aa, Triticum aestivum
  misc_feature (1)..(139): Ceres Seq. ID no. 15221789
TRKQQPAIETAREAHSAQLPPVPVTAIGMASKSASLLILAALVAAACLTELGSAARGVPAEKPAEDDVKRPDTFQEGTVLIPGIGRYELGTHYIPDIGGLDHSIPAAASGQFIPGADDTWVPNPGFEIPNPFRPRSDSP

SEQ ID NO: 10441 - protein, 126 aa, Triticum aestivum
  misc_feature (1)..(126): Ceres Seq. ID no. 15221790
HTKATASDRDSKRSSLSSATTSPGHSNRHGQQVGVPADPRGAGGRGVPHGAGLGGARRAGGEARGGRCEAAGHVPGGDGADPGDRAVRAGHPLHPRHRRAGPQHPGRRQWTVHPRRRRHLGAQPRL

SEQ ID NO: 10442 - protein, 111 aa, Triticum aestivum
  misc_feature (1)..(111): Ceres Seq. ID no. 15221791
MASKSASLLILAALVAAACLTELGSAARGVPAEKPAEDDVKRPDTFQEGTVLIPGIGRYELGTHYIPDIGGLDHSIPAAASGQFIPGADDTWVPNPGFEIPNPFRPRSDSP

SEQ ID NO: 10443 - DNA, 509 bp, Triticum aestivum
  misc_feature (1)..(509): Ceres Seq. ID no. 13596181
ggaagttggaaccccgtcgtctccagatccaaatcctccaaatccagatcacccacccacccaccggccgcgatccatccatggagctggaggcgccgtcgccggcgaggtacctgctgggcgcggcgatcatgatggccggcgtcgtgctgccgctcgcctacatgatcttccgcagcaagcgctcctcctcctcctccgccgcggcctccgtctcctccatcgcctccgccgccccctcatcctccttctccaagcagacgtaggaacaagggcctcttctgatggcccgcgcgtttggtgctcttctagctggtagcgctagctcgtttctgcaagaaaagagaagaaatcccatctgtatccgcggtctgtctcgggtgtagttgcagtagcatttcagctgtgaatctctatctgtagtatgtatgtttgtctctgagcagttgagcaaattttttggtgatgaaatgaaatgaaatgaaagggaaacaaactggttttttgtc

SEQ ID NO: 10444 - protein, 105 aa, Triticum aestivum
  misc_feature (1)..(105): Ceres Seq. ID no. 13596182
EVGTPSSPDPNPPNPDHPPTHRPRSIHGAGGAVAGEVPAGRGDHDGRRRAAARLHDLPQQALLLLLRRGLRLLHRLRRPLILLLQADVGTRASSDGPRVWCSSSW

SEQ ID NO: 10445 - protein, 87 aa, Triticum aestivum
  misc_feature (1)..(87): Ceres Seq. ID no. 13596183
KLEPRRLQIQILQIQITHPPTGRDPSMELEAPSPARYLLGAAIMMAGVVLPLAYMIFRSKRSSSSSAAASVSSIASAAPSSSFSKQT

SEQ ID NO: 10446 - protein, 61 aa, Triticum aestivum
  misc_feature (1)..(61): Ceres Seq. ID no. 13596184
MELEAPSPARYLLGAAIMMAGVVLPLAYMIFRSKRSSSSSAAASVSSIASAAPSSSFSKQT

SEQ ID NO: 10447 - DNA, 1874 bp, Triticum aestivum
  misc_feature (1)..(1874): Ceres Seq. ID no. 13596189
cctaatcgaaaaccacccacgcgcgcaccagccaccccccactatggcggcggcggcggcggcgtctccagccaccgcgccctcctccttcccctccgcccgcgcccacaagccgacgctcctctccctccgcgtctcgaccaagctcagagcccccgcggccgcggcggcatcggcggcatccgacccggccccggccttcaggtccgtcacggccttcgcgccggcgacggtggcgaacctcggcccgggcttcgacttcctgggctgcgcggtcgccgacgcctcgctctccctcggcgacacagtcacggccaccctcgacccctcgctgcccgccggcgcggtcgccatctcctgcatcacctccccgtcccgcccccgcctcgccgaccgcctctcccgcgacccgctccgcaactgcgcgggcatcgccgccgtcgccgcgctgcgggccctcggcgtgcgctcgcacggcgtctccctcagcctcgccaagggcctgccgctcggctccgggctcggctcctcggccgcgtccgcggccgccgccgccaaggccgtcgacgcgctcttcgggtccctgctcccccgcgacggcctcgtgctcgccggcctcgagtccgagaaggccgtcagcggcttccacgccgacaacatcgcgccggccatcctcggcggattcgtcatggtgcggagctacgacccgttctgcctcgtgtcgctgccctgcccgccggcgctccgcctctgcttcgtgctcgtcaccccggactttgaggcgccgacgagcaagatgcgcgccgcgctgccgaagaacatcgccatgggccaccacgtgcgcaactccagccaggccgccgcgctcgtcgccggcgtgctgcagggcgacgccgccctcatcggctccgcgatgtcgtccgacttcattgtcgagcccaccagggcgcccctgatacctggcatggccgcggtgaaggccgccgctcttgaagccggagcgctggggtgtaccatcagcggagcaggcccgaccgcagtagctgtcattgagggagaggagaagggggaggaggtcgcccggaggatgatcgacgccttcctgtcggtcggcaagctgaaagcgaccgccaccgtcgctcagctcgacagagccggcgccagggtcatctccacctcaaatttggagtagaagctagagagactttggtgctccgttcccattcgtgtatcggcctgacggcaagggggaagggagatgcggtataacgttgggttgcatctaggcgggggcaaggatggacatgaagacggtggaccaggcggtgagggcgagggcggcgacgaggtaggtccagaggaaaacgaccgagcactcctcctgggcgacgtcgtagagctgcgccatggtgctgatgctcatcgcgggcggcagcgcgaactggagcatgagcacatactggtacagcgggtccggcggcaggaagccgagctccctcgccgtcctcaccaccacgatcccgaccaccggcaggatcatgtagcgcacgcagacgatggccgcgatcacccaccgcgacatggtcgtcttgcgcaggcctgccagaccattattcagtttcagatggtctgacacagacagacagacagacagagattcagttgttgtttacctttggtgaggttccctccaaggatgagaatcacacaggggatggtgccatctctgcaacaaacaatggcataacatttcagtcagtagatgcactgcatgtgtatgccgtgttgaactgtaaaatgaattggacagcaaaaaaaaaaaaaaaaaagcttatcgataccgyckacctckagggrgsscccgagtacccaat

SEQ ID NO: 10448 - protein, 396 aa, Triticum aestivum
  misc_feature (1)..(396): Ceres Seq. ID no. 15221795
LIENHPRAHQPPPTMAAAAAASPATAPSSFPSARAHKPTLLSLRVSTKLRAPAAAAASAASDPAPAFRSVTAFAPATVANLGPGFDFLGCAVADASLSLGDTVTATLDPSLPAGAVAISCITSPSRPRLADRLSRDPLRNCAGIAAVAALRALGVRSHGVSLSLAKGLPLGSGLGSSAASAAAAAKAVDALFGSLLPRDGLVLAGLESEKAVSGFHADNIAPAILGGFVMVRSYDPFCLVSLPCPPALRLCFVLVTPDFEAPTSKMRAALPKNIAMGHHVRNSSQAAALVAGVLQGDAALIGSAMSSDFIVEPTRAPLIPGMAAVKAAALEAGALGCTISGAGPTAVAVIEGEEKGEEVARRMIDAFLSVGKLKATATVAQLDRAGARVISTSNLE

SEQ ID NO: 10449 - protein, 382 aa, Triticum aestivum
  misc_feature (1)..(382): Ceres Seq. ID no. 15221796
MAAAAAASPATAPSSFPSARAHKPTLLSLRVSTKLRAPAAAAASAASDPAPAFRSVTAFAPATVANLGPGFDFLGCAVADASLSLGDTVTATLDPSLPAGAVAISCITSPSRPRLADRLSRDPLRNCAGIAAVAALRALGVRSHGVSLSLAKGLPLGSGLGSSAASAAAAAKAVDALFGSLLPRDGLVLAGLESEKAVSGFHADNIAPAILGGFVMVRSYDPFCLVSLPCPPALRLCFVLVTPDFEAPTSKMRAALPKNIAMGHHVRNSSQAAALVAGVLQGDAALIGSAMSSDFIVEPTRAPLIPGMAAVKAAALEAGALGCTISGAGPTAVAVIEGEEKGEEVARRMIDAFLSVGKLKATATVAQLDRAGARVISTSNLE

SEQ ID NO: 10450 - protein, 259 aa, Triticum aestivum
  misc_feature (1)..(259): Ceres Seq. ID no. 15221797
PNRKPPTRAPATPHYGGGGGGVSSHRALLLPLRPRPQADAPLPPRLDQAQSPRGRGGIGGIRPGPGLQVRHGLRAGDGGEPRPGLRLPGLRGRRRLALPRRHSHGHPRPLAARRRGRHLLHHLPVPPPPRRPPLPRPAPQLRGHRRRRRAAGPRRALARRLPQPRQGPAARLRARLLGRVRGRRRQGRRRALRVPAPPRRPRARRPRVREGRQRLPRRQHRAGHPRRIRHGAELRPVLPRVAALPAGAPPLLRARHPGL

SEQ ID NO: 10451 - DNA, 1491 bp, Triticum aestivum
  misc_feature (1)..(1491): Ceres Seq. ID no. 13596203
aacatcctaatcgaaaaatcaagggttttcctcctctcctctcctctcatagccttcgccgcttcaccgctgctgccttccctccctcgcaagcctcctccgcgtcgccgccgcccgcccgcccgatccgccatggcttccgacccgaacaaagattccaaatcggaggggctgtctgaggcaaaaaagggggcttccccgacagctggtgcaggccttcccagtccttttgatttttccaacatgagcagcttgcttaatgatccatctataagggagatggctgagcaaatcgccagcgaccctgtattcaaccagatggctgagcagcttcagaaaagtgcgcagggtgcaggggaacagggtgttccaaatttggatcctcaagcatacatggaaaccatgacacaagttatgcagaatcctcagtttatgtcaatggcggagcgtcttgggaatactcttatgcaggatcctgcaatgtccagtatgcttgagaacttgactagtccagctcacaaagagcagcttgaagagcgaatggcccgtatcaaggatgatccgtctttgaagccaattcttgatgagatagagcgtggtggtccatctgcaatggtgaagtactggaatgaccctgagattcttcaaaagattggccaggctatgtcattgaacttcccagtagatgctgctacttccactgtactatctggacctcaagaaactgatgaagaaggcgaggatgatgatgagtccattgtccataacaccgccagtgtcggtgatgcagagggtctgaagaaagcattagatggtggagcaaacaaggatgaagaagatttggagggaagaagggccttgcattttgcatgtggatacggcgagttgaagtgtgcagaaatccttctggaggcaggcgctgcagttgacgcactggataagaacaagaacaccccgctgcactatgccgctggatacggtcggaaggaatgcgtggatcttctcttgaagcacggcgctgctgtcacgctccaaaatctggatgggaagacccccatcgaggtggccaagctcaacagccagggcgaggtggtgaagctgcttgagcaggacgtgttcctatgaagcaaaaccctcagacccgccgcccatcgatcctaaaactctccctttggttcgggactctcggcggtgtcatatcctggcatggtgttggttgctttccctcggtttacttagttggtagctctcgcatgtaacctgtgtggccttgcggtgctacttaacaagagtccatcttctccgttggtttgatcctgctgtgcaaccctgttcttggtccatctccatgcacgggggatatgggttcgctgtgggagatgtcaggggtgatgatgattgcgtatatacccctttcgtgaatatttcttggtgttgaaaatgatacgtgaggtgcaaattttgtttaatctgttgtttaggctttctgct

SEQ ID NO: 10452 - protein, 374 aa, Triticum aestivum
  misc_feature (1)..(374): Ceres Seq. ID no. 13596204
NILIEKSRVFLLSSPLIAFAASPLLPSLPRKPPPRRRRPPARSAMASDPNKDSKSEGLSEAKKGASPTAGAGLPSPFDFSNMSSLLNDPSIREMAEQIASDPVFNQMAEQLQKSAQGAGEQGVPNLDPQAYMETMTQVMQNPQFMSMAERLGNTLMQDPAMSSMLENLTSPAHKEQLEERMARIKDDPSLKPILDEIERGGPSAMVKYWNDPEILQKIGQAMSLNFPVDAATSTVLSGPQETDEEGEDDDESIVHNTASVGDAEGLKKALDGGANKDEEDLEGRRALHFACGYGELKCAEILLEAGAAVDALDKNKNTPLHYAAGYGRKECVDLLLKHGAAVTLQNLDGKTPIEVAKLNSQGEVVKLLEQDVFL

SEQ ID NO: 10453 - protein, 330 aa, Triticum aestivum
  misc_feature (1)..(330): Ceres Seq. ID no. 13596205
MASDPNKDSKSEGLSEAKKGASPTAGAGLPSPFDFSNMSSLLNDPSIREMAEQIASDPVFNQMAEQLQKSAQGAGEQGVPNLDPQAYMETMTQVMQNPQFMSMAERLGNTLMQDPAMSSMLENLTSPAHKEQLEERMARIKDDPSLKPILDEIERGGPSAMVKYWNDPEILQKIGQAMSLNFPVDAATSTVLSGPQETDEEGEDDDESIVHNTASVGDAEGLKKALDGGANKDEEDLEGRRALHFACGYGELKCAEILLEAGAAVDALDKNKNTPLHYAAGYGRKECVDLLLKHGAAVTLQNLDGKTPIEVAKLNSQGEVVKLLEQDVFL

SEQ ID NO: 10454 - protein, 293 aa, Triticum aestivum
  misc_feature (1)..(293): Ceres Seq. ID no. 13596206
MSSLLNDPSIREMAEQIASDPVFNQMAEQLQKSAQGAGEQGVPNLDPQAYMETMTQVMQNPQFMSMAERLGNTLMQDPAMSSMLENLTSPAHKEQLEERMARIKDDPSLKPILDEIERGGPSAMVKYWNDPEILQKIGQAMSLNFPVDAATSTVLSGPQETDEEGEDDDESIVHNTASVGDAEGLKKALDGGANKDEEDLEGRRALHFACGYGELKCAEILLEAGAAVDALDKNKNTPLHYAAGYGRKECVDLLLKHGAAVTLQNLDGKTPIEVAKLNSQGEVVKLLEQDVFL

SEQ ID NO: 10455 - DNA, 1267 bp, Triticum aestivum
  misc_feature (1)..(1267): Ceres Seq. ID no. 13596208
aaccatcgttcacccccaattccaccttcacctctctccaccgccggcgtccggcgaccgccgcttgccggcctaccggcgatggaccgcgcatccacttgatggatccgtcggcggcagggcctgcgccaccacgggccgccccgggcagaggggcggacccagcggagcggcgcaggcggtggtgcgggatcacagtccgcggggccctcgtgatgctcttccccatcgccgtgtcattcctcttctcctttatcttcggcatcgctggcctcctcctcggcgggctctcctccaacgcgtccgtctccatgccctccacctgccgcatcctctctaccggcctggacattcggtcatctaaggtttgcgagcttggactgttgaactataaagctaagcatgtattttacccctcgagtaatcgaagattccgctgccatgatgactattactgggcttcggtttttgaggttgaatacacagaatatttttctggtcaaacatcttatgcaatggcagaagctccaaaagaggctcttcctcacaattgccggcctgattttggtgctgtatggtcaacaacagcaaagttcaaggtcaatgaatcatacaagtgcaggtacacactggggagtaccaaagctgacatttgttcagacaagctattcaattgcactgctgagaatccttcaataattgaaatgctgaaaaggatttttgtactgttttcaaagttctgcaagtcaaaagatttcagttcgtggtggatgcttggatatgcggcagcaggggtcgtggcgggcgtgctgagttccatactcatcacaatagcagtaagaatcctgcgaggagtgttccttgctgccgccaggcgggctgtgagaaaccatagcatcagggtgtttgcttaccgtttcaagcgggcgtgccttcttgttgcgtatatatctttcgttggctggatcaccttgcagtacagcaaaatggttgggttgaaggagcttgtgctggacttcaaactcttggagaggttcttgtaaaatgtaaacgggtttcggcaatgtatgtcaaataagccgatccccttgtgtgatgtaacctagtgtaacttatcctgccttgcttcgatatgcagccgcccatgaacaggtggatgaatcatgggtagctagtagctacagtgggcatggagtaactcccatctgttgtaacctgcaatgcaacatgtatcacaatcatcgtaatgacagtttggggggcttgg

SEQ ID NO: 10456 - protein, 346 aa, Triticum aestivum
  misc_feature (1)..(346): Ceres Seq. ID no. 13596209
PSFTPNSTFTSLHRRRPATAACRPTGDGPRIHLMDPSAAGPAPPRAAPGRGADPAERRRRWCGITVRGALVMLFPIAVSFLFSFIFGIAGLLLGGLSSNASVSMPSTCRILSTGLDIRSSKVCELGLLNYKAKHVFYPSSNRRFRCHDDYYWASVFEVEYTEYFSGQTSYAMAEAPKEALPHNCRPDFGAVWSTTAKFKVNESYKCRYTLGSTKADICSDKLFNCTAENPSIIEMLKRIFVLFSKFCKSKDFSSWWMLGYAAAGVVAGVLSSILITIAVRILRGVFLAAARRAVRNHSIRVFAYRFKRACLLVAYISFVGWITLQYSKMVGLKELVLDFKLLERFL

SEQ ID NO: 10457 - protein, 313 aa, Triticum aestivum
  misc_feature (1)..(313): Ceres Seq. ID no. 13596210
MDPSAAGPAPPRAAPGRGADPAERRRRWCGITVRGALVMLFPIAVSFLFSFIFGIAGLLLGGLSSNASVSMPSTCRILSTGLDIRSSKVCELGLLNYKAKHVFYPSSNRRFRCHDDYYWASVFEVEYTEYFSGQTSYAMAEAPKEALPHNCRPDFGAVWSTTAKFKVNESYKCRYTLGSTKADICSDKLFNCTAENPSIIEMLKRIFVLFSKFCKSKDFSSWWMLGYAAAGVVAGVLSSILITIAVRILRGVFLAAARRAVRNHSIRVFAYRFKRACLLVAYISFVGWITLQYSKMVGLKELVLDFKLLERFL

SEQ ID NO: 10458 - protein, 275 aa, Triticum aestivum
  misc_feature (1)..(275): Ceres Seq. ID no. 13596211
MLFPIAVSFLFSFIFGIAGLLLGGLSSNASVSMPSTCRILSTGLDIRSSKVCELGLLNYKAKHVFYPSSNRRFRCHDDYYWASVFEVEYTEYFSGQTSYAMAEAPKEALPHNCRPDFGAVWSTTAKFKVNESYKCRYTLGSTKADICSDKLFNCTAENPSIIEMLKRIFVLFSKFCKSKDFSSWWMLGYAAAGVVAGVLSSILITIAVRILRGVFLAAARRAVRNHSIRVFAYRFKRACLLVAYISFVGWITLQYSKMVGLKELVLDFKLLERFL

SEQ ID NO: 10459 - DNA, 2151 bp, Triticum aestivum
  misc_feature (1)..(2151): Ceres Seq. ID no. 13596218
atgctcgaagcccaaatcctctcggtctctcacccactcgccagaggcagacacgacgagggcgacggcgatggcctcgccgaagctggccgccggcgacggcagctacgacttccacctccgctcgctctccgccgcgtcacgggactccgccgcggccgccgatcccgcctccgaccccaacctcctccagtctgtgcggatggtgttcgagatgtgcaaggtggccaagggggccaacgacgagatggtggcgcgggcgttccccgtgatgaacaagctcttccagcgctgcgccgccgcgcccacgctctccacggcctccaccggcgtgctgctgctgaccattctgcagttcttcctggactttggggaggcggtcttgcacgatgctgatggtagcttgaaaaccttcttccgctcttgcttaagtagggagttttcagaccctattgtcgcagaacgaacgctggaattcctgatagcgaacaagacgaagatcttgaactgcttccccaccttggttccacagttcttcccattgctgctgaagttgattgcatcaaatggtgataggttggataagaagttctcagaagtgatcccattgatgatgtcagcaggatcttttcttcctctcttcctgtcccttatggatctgccaatgttagtggtagcactggaaaaggtggaaagaagttctggaactctcatcggtagtagtttagctactatacagaagagtgctgctcctgagatgctccttgcactgatggatgaggcatatactggctcctcaatagaagatcaaagtggcaattcaggttctgatgacagtggtcgtctagaccttgcggacccaatgttccttgaccttctaaaagacgagaatgatggcattgctgcaaaacattggacatcccctacgatatcttcaacgttacaagctgcacttaacagcccacagtctgacagattaaaacagtcactgaaaatggcacctcgctttcttactgtatattttgcgacagcattgcgggacgtcaacaactcactcttgtgtgctctgattccagttgctatgtcaagatatgctgcgatgttccctgacaaggaattttctttcgaggtgaggaaaaagctgtcggatttcttattagctgcattccagcgctcccctgacatcattgcgctactaaagaagcctattactgatagacttggggaggcccatggtaatcctgcaaagatggaattggcattgcatttatgttgggccattggtgagcatggagcaggagggataaagcacaaagatgtagcacgtgaactatttgaaaatctggagttgctattatacgaaaacctggcaactagtcgtctgggattaagtcaagatccagggttcgattctatgggtgcaagctctagaaagtcatcccaagctaggctcctctgctttgtggtgactgccattgcgaagctagcaacttgccataacgagctgcttccaagagcacgtgtgtcattggctaaggtcgctcggtccaggacctcagacaggcgagtctggcagcgcgcctgtgactatttagggctcatgaatgaaccagccatttgtttgtctgtactgggaccatccactgcccaaggaaatggtcctgggattgtgaactggagcgaaggaggaaccaagatggtagctcacattccgttttaccttttagcagaacagaaaggtccaccatctcatgatttttcatatgcggacctcctccccgcagaatgagaacaccgtcatgagtagcatggatccatgcaatgattctcttgcaaacgccatgtgcacagagatcattggtgatcatggcctgctgaagatgattcaagtgccaacgccttcttttatccagttcatcttttcgatcgagaagtgctggccctttggtctgaggagttcctgtactgttgtagtttctgggatctggctggtttcaactgtgcagtttgtgggggtgtagatggtattcagaaacgctcaatgttgtatacatggaatgatttgtcagtgtatgtactgaaagggaagcagtgttgtaaattaagatatctgatggtgcacatctggaaatggaaagattgttctttgtg

SEQ ID NO: 10460 - protein, 595 aa, Triticum aestivum
  misc_feature (1)..(595): Ceres Seq. ID no. 15221809
CSKPKSSRSLTHSPEADTTRATAMASPKLAAGDGSYDFHLRSLSAASRDSAAAADPASDPNLLQSVRMVFEMCKVAKGANDEMVARAFPVMNKLFQRCAAAPTLSTASTGVLLLTILQFFLDFGEAVLHDADGSLKTFFRSCLSREFSDPIVAERTLEFLIANKTKILNCFPTLVPQFFPLLLKLIASNGDRLDKKFSEVIPLMMSAGSFLPLFLSLMDLPMLVVALEKVERSSGTLIGSSLATIQKSAAPEMLLALMDEAYTGSSIEDQSGNSGSDDSGRLDLADPMFLDLLKDENDGIAAKHWTSPTISSTLQAALNSPQSDRLKQSLKMAPRFLTVYFATALRDVNNSLLCALIPVAMSRYAAMFPDKEFSFEVRKKLSDFLLAAFQRSPDIIALLKKPITDRLGEAHGNPAKMELALHLCWAIGEHGAGGIKHKDVARELFENLELLLYENLATSRLGLSQDPGFDSMGASSRKSSQARLLCFVVTAIAKLATCHNELLPRARVSLAKVARSRTSDRRVWQRACDYLGLMNEPAICLSVLGPSTAQGNGPGIVNWSEGGTKMVAHIPFYLLAEQKGPPSHDFSYADLLPAE

SEQ ID NO: 10461 - protein, 572 aa, Triticum aestivum
  misc_feature (1)..(572): Ceres Seq. ID no. 15221810
MASPKLAAGDGSYDFHLRSLSAASRDSAAAADPASDPNLLQSVRMVFEMCKVAKGANDEMVARAFPVMNKLFQRCAAAPTLSTASTGVLLLTILQFFLDFGEAVLHDADGSLKTFFRSCLSREFSDPIVAERTLEFLIANKTKILNCFPTLVPQFFPLLLKLIASNGDRLDKKFSEVIPLMMSAGSFLPLFLSLMDLPMLVVALEKVERSSGTLIGSSLATIQKSAAPEMLLALMDEAYTGSSIEDQSGNSGSDDSGRLDLADPMFLDLLKDENDGIAAKHWTSPTISSTLQAALNSPQSDRLKQSLKMAPRFLTVYFATALRDVNNSLLCALIPVAMSRYAAMFPDKEFSFEVRKKLSDFLLAAFQRSPDIIALLKKPITDRLGEAHGNPAKMELALHLCWAIGEHGAGGIKHKDVARELFENLELLLYENLATSRLGLSQDPGFDSMGASSRKSSQARLLCFVVTAIAKLATCHNELLPRARVSLAKVARSRTSDRRVWQRACDYLGLMNEPAICLSVLGPSTAQGNGPGIVNWSEGGTKMVAHIPFYLLAEQKGPPSHDFSYADLLPAE

SEQ ID NO: 10462 - protein, 528 aa, Triticum aestivum
  misc_feature (1)..(528): Ceres Seq. ID no. 15221811
MVFEMCKVAKGANDEMVARAFPVMNKLFQRCAAAPTLSTASTGVLLLTILQFFLDFGEAVLHDADGSLKTFFRSCLSREFSDPIVAERTLEFLIANKTKILNCFPTLVPQFFPLLLKLIASNGDRLDKKFSEVIPLMMSAGSFLPLFLSLMDLPMLVVALEKVERSSGTLIGSSLATIQKSAAPEMLLALMDEAYTGSSIEDQSGNSGSDDSGRLDLADPMFLDLLKDENDGIAAKHWTSPTISSTLQAALNSPQSDRLKQSLKMAPRFLTVYFATALRDVNNSLLCALIPVAMSRYAAMFPDKEFSFEVRKKLSDFLLAAFQRSPDIIALLKKPITDRLGEAHGNPAKMELALHLCWAIGEHGAGGIKHKDVARELFENLELLLYENLATSRLGLSQDPGFDSMGASSRKSSQARLLCFVVTAIAKLATCHNELLPRARVSLAKVARSRTSDRRVWQRACDYLGLMNEPAICLSVLGPSTAQGNGPGIVNWSEGGTKMVAHIPFYLLAEQKGPPSHDFSYADLLPAE

SEQ ID NO: 10463 - DNA, 1720 bp, Triticum aestivum
  misc_feature (1)..(1720): Ceres Seq. ID no. 13596219
ctggtcggagaggagcagcagagatggccggagccggggaagacgacgcagctcctcctcccccttctccagatcgacagcagcccatggaagaggcggcggcggcggccaagcggagccggtcggagaaccaccatggcctcgccgacgggccgtccttccggatggaggaccttccggcggaggttcagccggttataatctcactgctcccactgaaagaggccgtgaggacgagcattgtttcaagaagttggacaacgctctggagattccactgcgacctatgttttgatgtggattctaacaccgatgacaattccgctcatcaggtcaatggcactggcaccaatgaccaatccactaatcggtataataccaaaataacacgggcaaagttcatggagactgtaaattccgttattcaacggcatagtgggataggaatcaataagttcagtatcagctgtgacctgcacaaagaggactctcatcatcttgacaagtggattcggtttgccgcttcatcaaaggcaaaaataatagattttcatcggaagatatctgattaccgagttgaagaagctccccactttcctcttgaggccttagatgctcaaggtagctcatttgtgcagtccttgtctctcgccagtgtttctataaagccacgctcaggaatatgccgctttacaatactcagaaggcttgttttgagctctgttcagatatttggagattttccaggcttgcttgcaaaatgttcaagacttgaggacttagagatcaaatggtgttctggtgtggatgacttaatcgtaccacacacactcgataaacttcaacatttgctgattgccggaatggacgtccagatggttgagtttcatgctactgatcttgctcactttgagtacaaaggccgagtaacccctatagtgcttcatggttgcttaaaactagagaaggcaacaattgcgtttgaggcctctaatgtactgccccatgcattcaatgtaattccaagcatttccccagtgaagatattaattgtgcgagcttttatatcaaaatatggacagtccctggagctgccattaagaccacagggcatgtttatgcatctgaggcatatgacttgtaaaattatcgtccttgctagagatgtaaatgactataatggagttcttcaactggcccattggttggacagtgcaccgcgactggagacattggacttgcatatgtcctatctgaggtccggtgctttcgtaagtgccgaggtggcgggagtggaagctccctgtatgcgtcgccatgatcatctcaagacggtcttcatgagtgggtttcagtgttacaagtctcagattgagctggcgtgctgtatcctgggaaatgcttctgttcttgagcagctgacagtagaagcaatatggggtgatgatgattacaggcggatctgtgaatgggcagaggtaacctcgaagcgctttggtaaggtgatcactgtcttagatgccccccttaacagtgagtaaaccaatccttttcgcatgtacacgctgtcaattaatctcgtgtagtctgcagtatgcagcattcagtgtagctgggagaatgcccctctagactgtactgactgttttggtgtctacaaatggaatctgtagggcttttgcccctcttaataaaaaacaagtaatctctggttcatcgt

SEQ ID NO: 10464 - protein, 512 aa, Triticum aestivum
  misc_feature (1)..(512): Ceres Seq. ID no. 13596220
GRRGAAEMAGAGEDDAAPPPPSPDRQQPMEEAAAAAKRSRSENHHGLADGPSFRMEDLPAEVQPVIISLLPLKEAVRTSIVSRSWTTLWRFHCDLCFDVDSNTDDNSAHQVNGTGTNDQSTNRYNTKITRAKFMETVNSVIQRHSGIGINKFSISCDLHKEDSHHLDKWIRFAASSKAKIIDFHRKISDYRVEEAPHFPLEALDAQGSSFVQSLSLASVSIKPRSGICRFTILRRLVLSSVQIFGDFPGLLAKCSRLEDLEIKWCSGVDDLIVPHTLDKLQHLLIAGMDVQMVEFHATDLAHFEYKGRVTPIVLHGCLKLEKATIAFEASNVLPHAFNVIPSISPVKILIVRAFISKYGQSLELPLRPQGMFMHLRHMTCKIIVLARDVNDYNGVLQLAHWLDSAPRLETLDLHMSYLRSGAFVSAEVAGVEAPCMRRHDHLKTVFMSGFQCYKSQIELACCILGNASVLEQLTVEAIWGDDDYRRICEWAEVTSKRFGKVITVLDAPLNSE

SEQ ID NO: 10465 - protein, 505 aa, Triticum aestivum
  misc_feature (1)..(505): Ceres Seq. ID no. 13596221
MAGAGEDDAAPPPPSPDRQQPMEEAAAAAKRSRSENHHGLADGPSFRMEDLPAEVQPVIISLLPLKEAVRTSIVSRSWTTLWRFHCDLCFDVDSNTDDNSAHQVNGTGTNDQSTNRYNTKITRAKFMETVNSVIQRHSGIGINKFSISCDLHKEDSHHLDKWIRFAASSKAKIIDFHRKISDYRVEEAPHFPLEALDAQGSSFVQSLSLASVSIKPRSGICRFTILRRLVLSSVQIFGDFPGLLAKCSRLEDLEIKWCSGVDDLIVPHTLDKLQHLLIAGMDVQMVEFHATDLAHFEYKGRVTPIVLHGCLKLEKATIAFEASNVLPHAFNVIPSISPVKILIVRAFISKYGQSLELPLRPQGMFMHLRHMTCKIIVLARDVNDYNGVLQLAHWLDSAPRLETLDLHMSYLRSGAFVSAEVAGVEAPCMRRHDHLKTVFMSGFQCYKSQIELACCILGNASVLEQLTVEAIWGDDDYRRICEWAEVTSKRFGKVITVLDAPLNSE

SEQ ID NO: 10466 - protein, 484 aa, Triticum aestivum
  misc_feature (1)..(484): Ceres Seq. ID no. 13596222
MEEAAAAAKRSRSENHHGLADGPSFRMEDLPAEVQPVIISLLPLKEAVRTSIVSRSWTTLWRFHCDLCFDVDSNTDDNSAHQVNGTGTNDQSTNRYNTKITRAKFMETVNSVIQRHSGIGINKFSISCDLHKEDSHHLDKWIRFAASSKAKIIDFHRKISDYRVEEAPHFPLEALDAQGSSFVQSLSLASVSIKPRSGICRFTILRRLVLSSVQIFGDFPGLLAKCSRLEDLEIKWCSGVDDLIVPHTLDKLQHLLIAGMDVQMVEFHATDLAHFEYKGRVTPIVLHGCLKLEKATIAFEASNVLPHAFNVIPSISPVKILIVRAFISKYGQSLELPLRPQGMFMHLRHMTCKIIVLARDVNDYNGVLQLAHWLDSAPRLETLDLHMSYLRSGAFVSAEVAGVEAPCMRRHDHLKTVFMSGFQCYKSQIELACCILGNASVLEQLTVEAIWGDDDYRRICEWAEVTSKRFGKVITVLDAPLNSE

SEQ ID NO: 10467 - DNA, 1341 bp, Triticum aestivum
  misc_feature (1)..(1341): Ceres Seq. ID no. 13596228
aagtattaaaagcttgagagggattcggagaccatttgcaaggatgtgttcttcgtacttgaccgtgcaatcatatgcaatgatgtgtcttctcgtcaggtagaagtagctagctggagatcgagcgagcatggatgactcgaacatgttcatccagtgggcaatggagacgcttgagcaggagcaggacggcgccgccaccggacacgtcttcccgtcgtcactcctagagctcgacaactcggcggcgctgcagaacggcacgcacatggcggcccaccgacacggagccaccgacagctggagctcaggcgacagtggcgccgcggtggccgtggagaacgacggctggtcgtccaactgcagcaccaactacccggccgcgagctggaacttcatctcggccataccgcagccgcccagcattatcgaggccaccccgagcccacccgcagctcccagccacgtcgtgccggagctggcgcacaggtcgccaccgtcgaggaaatcctcaggcgycagtacagggacggtgccgaccgtgcaggaacacgtcatggcggagcggaagcgccgggagaagatcaaccgacgcttcatcgagctctccaccgtcatccccggcctcaagaagatggacaaggcgaccatcttgtcggacgccgtgaggtacgtcaaggagcagcaggagaagctcaaggcactccaggaccgtgacgcgaggagcatcgactcggtggtgctagtgaagaggccgtgcatctccaacggcgatgatggctgcccgtcaccgccgccgtcagcagcagctggaggaggtccgccgacgacaagggtcacgttgccggagatcgaggcgaggatctcggagagcaatgtgatgatgaggatccactgccaggacggcaaaggggtccttgtcacgttgctcgccgaggtcgaggggctccaccttagcatcacacataccaatgtcgtgtctttcccggcttccactctgatcattaacctcatggccaagttagacgagggcttcgccgtcacagcggacgacattgtatggaagctcgactctgctttgcgcggacatcatagcggcaaatgatagttctagctaggagaggaccaataaacatgaagacgcaaaggcttaagaagcggcaagcaggcagctcatgtccaattagcatgttcaattagtgcgtgtgtgtgcgcgcgcgtgcattgtgagttacactaatagtgaccagtgtgaatctcgggcacatgttcaatttagcatgttaccgttttttgggtgcatctgtacgtgtcactacagcatcaaggcgttgatttttt

SEQ ID NO: 10468 - protein, 324 aa, Triticum aestivum
  misc_feature (1)..(324): Ceres Seq. ID no. 15221815
  misc_feature (130)..(130): Xaa is any aa, unknown or other
MDDSNMFIQWAMETLEQEQDGAATGHVFPSSLLELDNSAALQNGTHMAAHRHGATDSWSSGDSGAAVAVENDGWSSNCSTNYPAASWNFISAIPQPPSIIEATPSPPAAPSHVVPELAHRSPPSRKSSGXSTGTVPTVQEHVMAERKRREKINRRFIELSTVIPGLKKMDKATILSDAVRYVKEQQEKLKALQDRDARSIDSVVLVKRPCISNGDDGCPSPPPSAAAGGGPPTTRVTLPEIEARISESNVMMRIHCQDGKGVLVTLLAEVEGLHLSITHTNVVSFPASTLIINLMAKLDEGFAVTADDIVWKLDSALRGHHSGK

SEQ ID NO: 10469 - protein, 319 aa, Triticum aestivum
  misc_feature (1)..(319): Ceres Seq. ID no. 15221816
  misc_feature (125)..(125): Xaa is any aa, unknown or other
MFIQWAMETLEQEQDGAATGHVFPSSLLELDNSAALQNGTHMAAHRHGATDSWSSGDSGAAVAVENDGWSSNCSTNYPAASWNFISAIPQPPSIIEATPSPPAAPSHVVPELAHRSPPSRKSSGXSTGTVPTVQEHVMAERKRREKINRRFIELSTVIPGLKKMDKATILSDAVRYVKEQQEKLKALQDRDARSIDSVVLVKRPCISNGDDGCPSPPPSAAAGGGPPTTRVTLPEIEARISESNVMMRIHCQDGKGVLVTLLAEVEGLHLSITHTNVVSFPASTLIINLMAKLDEGFAVTADDIVWKLDSALRGHHSGK

SEQ ID NO: 10470 - protein, 313 aa, Triticum aestivum
  misc_feature (1)..(313): Ceres Seq. ID no. 15221817
  misc_feature (119)..(119): Xaa is any aa, unknown or other
METLEQEQDGAATGHVFPSSLLELDNSAALQNGTHMAAHRHGATDSWSSGDSGAAVAVENDGWSSNCSTNYPAASWNFISAIPQPPSIIEATPSPPAAPSHVVPELAHRSPPSRKSSGXSTGTVPTVQEHVMAERKRREKINRRFIELSTVIPGLKKMDKATILSDAVRYVKEQQEKLKALQDRDARSIDSVVLVKRPCISNGDDGCPSPPPSAAAGGGPPTTRVTLPEIEARISESNVMMRIHCQDGKGVLVTLLAEVEGLHLSITHTNVVSFPASTLIINLMAKLDEGFAVTADDIVWKLDSALRGHHSGK

SEQ ID NO: 10471 - DNA, 1580 bp, Triticum aestivum
  misc_feature (1)..(1580): Ceres Seq. ID no. 13596244
ggttctgacccccgattcggtccgtcgattgtgatttcccctcgatttcgtgcgggattagtggccggaattaatcgccatgacggcgtcgtcgccgatggtgctgtccctcctgctcttcgcctcgctcacggcgctgctcgtcctggcccctcgcacggcgtcgccgccgctgccgctggccgtggtggttggggacgaggaggcgccgccggccgccgctggtggtgctgcggggatcagcggcggaggggcgggagttgaggagggaccggaggacctcgcgctataccggcgcgtgacgctcgacgccggcgagggcgcggcggtggcgtccaaggtggcgttcatgttcctgaccaactccgacctcaccttcgcgccgctttgggagcgcttcttcgcggggcacgctgaccagttcaacgtctacgtgcacgcagacccggcggtgcggctgcggctcccccctacgccttccttccggggccgcttcgtcgcggccaagccgacgcggcgcggggacccgagcctcatcgctgcggcgcggcggctgcttgtcgccgcgctactcgacgacccggccaacgcctacttcgcgctgctctcgcagcactgcgtcccgctccactccttcccgcggctctacgaggcgctcttcccgcccaaggccgcgcaccaccaccgcctcccgagctatatcgaggtgctcaccggcgagccccagatgcccgcgcgctacgtggcgcgcggtgacgacgccatgctcccggaggtgcccttcgaccggttccgcatcggctcccagttcttcacgctggcccgccgccacgccgtgctagtcgtccgcgagcgccgtctctggcgaaagtttagggagccgtgcctgccggagtcgcagggctcgtgctacccggaggagcactatttcccgacgcttctcgacatggccgaccccgccggctgcacccggtacacgctcacgcgcgtcaactggaccgacagcttcgagggccacccgcacacgtattccgcgccagaggtgtcgccgcggctcatcgccgagctacgccagtccaacagctccacctatgagcacatgttcgcgcgcaagttcgcgcccgactgccttggcccgctcatggccatcgccgacaccgtcatcttcaaagattgatcgatgcggtgctctgcatcatagatacacgtaggaggtctatccgttgagagttgcgcgtgcgagaagacgaaagcagtgtcgttattctccgttgaatcttcacacggttcagactggtgctttgcctctgtgccctccaccgttcttctcctcctggtacttctatgtagacttaagtggcaacaacctaatgcaaagcggcaggtgttgcatctgatggtcagtccatccatccactgtatttttcctacctcgtgcggctgcctaaggctgctgttctgttgaaatgcgtaaaaggatggattgtggcggtgttctgttcagctgaaactgaaaaggaactttgtaccggtttatttcagcttgtgtacataaccaaggaataaaataatcattctgc

SEQ ID NO: 10472 - protein, 365 aa, Triticum aestivum
  misc_feature (1)..(365): Ceres Seq. ID no. 13596245
MTASSPMVLSLLLFASLTALLVLAPRTASPPLPLAVVVGDEEAPPAAAGGAAGISGGGAGVEEGPEDLALYRRVTLDAGEGAAVASKVAFMFLTNSDLTFAPLWERFFAGHADQFNVYVHADPAVRLRLPPTPSFRGRFVAAKPTRRGDPSLIAAARRLLVAALLDDPANAYFALLSQHCVPLHSFPRLYEALFPPKAAHHHRLPSYIEVLTGEPQMPARYVARGDDAMLPEVPFDRFRIGSQFFTLARRHAVLVVRERRLWRKFREPCLPESQGSCYPEEHYFPTLLDMADPAGCTRYTLTRVNWTDSFEGHPHTYSAPEVSPRLIAELRQSNSSTYEHMFARKFAPDCLGPLMAIADTVIFKD

SEQ ID NO: 10473 - protein, 359 aa, Triticum aestivum
  misc_feature (1)..(359): Ceres Seq. ID no. 13596246
MVLSLLLFASLTALLVLAPRTASPPLPLAVVVGDEEAPPAAAGGAAGISGGGAGVEEGPEDLALYRRVTLDAGEGAAVASKVAFMFLTNSDLTFAPLWERFFAGHADQFNVYVHADPAVRLRLPPTPSFRGRFVAAKPTRRGDPSLIAAARRLLVAALLDDPANAYFALLSQHCVPLHSFPRLYEALFPPKAAHHHRLPSYIEVLTGEPQMPARYVARGDDAMLPEVPFDRFRIGSQFFTLARRHAVLVVRERRLWRKFREPCLPESQGSCYPEEHYFPTLLDMADPAGCTRYTLTRVNWTDSFEGHPHTYSAPEVSPRLIAELRQSNSSTYEHMFARKFAPDCLGPLMAIADTVIFKD

SEQ ID NO: 10474 - protein, 275 aa, Triticum aestivum
  misc_feature (1)..(275): Ceres Seq. ID no. 13596247
MFLTNSDLTFAPLWERFFAGHADQFNVYVHADPAVRLRLPPTPSFRGRFVAAKPTRRGDPSLIAAARRLLVAALLDDPANAYFALLSQHCVPLHSFPRLYEALFPPKAAHHHRLPSYIEVLTGEPQMPARYVARGDDAMLPEVPFDRFRIGSQFFTLARRHAVLVVRERRLWRKFREPCLPESQGSCYPEEHYFPTLLDMADPAGCTRYTLTRVNWTDSFEGHPHTYSAPEVSPRLIAELRQSNSSTYEHMFARKFAPDCLGPLMAIADTVIFKD

SEQ ID NO: 10475 - DNA, 1968 bp, Triticum aestivum
  misc_feature (1)..(1968): Ceres Seq. ID no. 13596261
aaagggaccggcgctcgcggcgaccaggaaggcaaggaacgcgtccggttcttggataagcggaggcgcggcaccgcaccgcacgcggcattcgtcaatataagaaggccgccgggggtgggaggcggagggacaactccgtctacacaagcgcgcgcgcacccaccaaagtcttctgccgatttcttcgtctccgctctcctcgtgttcgggttgttggccgagcgacagttgggattctgtagaggaggttgaaagtacttgaaacaaatggggattggggatgcatcacctagtgaaaaccagtctgcacacaaggaacagagggatgagaccacgccacttctcccggtcaaggcggaagaggaagatgggatccatgagttcaatggagcgtctttctcgggtgcagttttcaatctgtcgacaaccatcgtgggggctggaattatggccctgccagcaagtatcaagatgctaggcattatccctggtattttgatgatcatccttgtggcattgctcactgaggcatcaattgacatgatggtcaggtgcagccaccaggccaagattacatcctatggctggctcatgggtgactcttttggtcaatgggggaggattgcactgcaagcatctgtggtcataaacaacgttggcgtcatgattgtatacatgattatcatcggtgatgtgctatcgggaacatctacaactggtgttcatcaccggggtatctttgaggggtggtttgggcctcatttctggaattctcgtccagttgttctccttgccacaactatttttgtgtttgctccattggtgagctttaagcgattggattcattgagatacacatctgctctgtcagttgctcttgctgtggtttttgttgtcatcactgctggaattgctattctcagactgatagaagggaccgcggagattcccaaactcttccctgagatacatgaactcaattccatctgggaactctttacagctgtgccggttcttgtcactgcctatatttgccactacaatgttcacagcatcgataacgaactggaagatagaagtcagactaagccaattgtgcgaacttcattggctctctgttcaagtgtttatgttgcaacaagcttctttgcatatttactcttcggcgagggtaccctctccgatgtgctcgctaattttgactctgaccttcatattccattcagctctgtcttcaatgatatagtcagagtgagctatgtagtccatgtcatgctggtcttccctatagtcttctttgcccttaggctcaacctggatggactcctcttccccacctcaaggcacatttctcatgacaaccgaaggtttatcattatcaccgtctcactcctcgctgtgatttatcttgctgccaacttcataccaagcatctgggatgcgttccagttcaccggtgctacagctgctgtcctgattggtttcatctttcctgccatgatcatactgagggattcttatgggattgcaaccaagcgcgacaaggttttagctgtaaccatgattgtgcttgctgtgctctccaattcagtggccctgtacagcgatgcgatgagcatcttctacaggaaggtggaggcctagtctgctccatgcctccatactccaagggaataagtccaatgcacatgcacaattcggagtgattattgagctttagttagtatattgcgcagtcaagcaatgtgatttcatggtggccactaatttttgttttggacacttgagaggattttgtttgctgcatttgtctagttccttgaacatgtaatccggctcagcatctagatgagcaatttgtgatctggtcgcaggtgtttgtatttattggcaagaacaagatttttatttacttttgggggtcatgtacatgttcatattcggtcatcttgaaattgatgtttg

SEQ ID NO: 10476 - protein, 458 aa, Triticum aestivum
  misc_feature (1)..(458): Ceres Seq. ID no. 13596262
MGIGDASPSENQSAHKEQRDETTPLLPVKAEEEDGIHEFNGASFSGAVFNLSTTIVGAGIMALPASIKMLGIIPGILMIILVALLTEASIDMMVRCSHQAKITSYGWLMGDSFGQWGRIALQASVVINNVGVMIVYMIIIGDVLSGTSTTGVHHRGIFEGWFGPHFWNSRPVVLLATTIFVFAPLVSFKRLDSLRYTSALSVALAVVFVVITAGIAILRLIEGTAEIPKLFPEIHELNSIWELFTAVPVLVTAYICHYNVHSIDNELEDRSQTKPIVRTSLALCSSVYVATSFFAYLLFGEGTLSDVLANFDSDLHIPFSSVFNDIVRVSYVVHVMLVFPIVFFALRLNLDGLLFPTSRHISHDNRRFIIITVSLLAVIYLAANFIPSIWDAFQFTGATAAVLIGFIFPAMIILRDSYGIATKRDKVLAVTMIVLAVLSNSVALYSDAMSIFYRKVEA

SEQ ID NO: 10477 - protein, 398 aa, Triticum aestivum
  misc_feature (1)..(398): Ceres Seq. ID no. 13596263
MALPASIKMLGIIPGILMIILVALLTEASIDMMVRCSHQAKITSYGWLMGDSFGQWGRIALQASVVINNVGVMIVYMIIIGDVLSGTSTTGVHHRGIFEGWFGPHFWNSRPVVLLATTIFVFAPLVSFKRLDSLRYTSALSVALAVVFVVITAGIAILRLIEGTAEIPKLFPEIHELNSIWELFTAVPVLVTAYICHYNVHSIDNELEDRSQTKPIVRTSLALCSSVYVATSFFAYLLFGEGTLSDVLANFDSDLHIPFSSVFNDIVRVSYVVHVMLVFPIVFFALRLNLDGLLFPTSRHISHDNRRFIIITVSLLAVIYLAANFIPSIWDAFQFTGATAAVLIGFIFPAMIILRDSYGIATKRDKVLAVTMIVLAVLSNSVALYSDAMSIFYRKVEA

SEQ ID NO: 10478 - protein, 390 aa, Triticum aestivum
  misc_feature (1)..(390): Ceres Seq. ID no. 13596264
MLGIIPGILMIILVALLTEASIDMMVRCSHQAKITSYGWLMGDSFGQWGRIALQASVVINNVGVMIVYMIIIGDVLSGTSTTGVHHRGIFEGWFGPHFWNSRPVVLLATTIFVFAPLVSFKRLDSLRYTSALSVALAVVFVVITAGIAILRLIEGTAEIPKLFPEIHELNSIWELFTAVPVLVTAYICHYNVHSIDNELEDRSQTKPIVRTSLALCSSVYVATSFFAYLLFGEGTLSDVLANFDSDLHIPFSSVFNDIVRVSYVVHVMLVFPIVFFALRLNLDGLLFPTSRHISHDNRRFIIITVSLLAVIYLAANFIPSIWDAFQFTGATAAVLIGFIFPAMIILRDSYGIATKRDKVLAVTMIVLAVLSNSVALYSDAMSIFYRKVEA

SEQ ID NO: 10479 - DNA, 1147 bp, Triticum aestivum
  misc_feature (1)..(1147): Ceres Seq. ID no. 13596265
ctcacccaatacccacgagaacctctagctaccgtagcttagctgagcttcctagctgtagccatggccaagtatttccagagtgctcctgttagcaatgaagcattgaagcacaaggagattctgttggacggcctgtacatgcaccaggaccttgacggatcaccaaatcagaaccagaaaactatagtgaatcctaacctccctctgcagtttggctgcacagtggctaatgactggaccatatatgatggccttggccccgataagaagcttgttgcgcgtgcacaagggccacatatgggggcaggagtagccaaaggaagctggttcatatgtttcaacatggtgttcgtcgatgacaggtttgcgggttccagccttaaggtgctcggacattttgaagagccggtagaaggtgagtgggcaatccttggcgggacaggagagtttgcctatgcacaaggtgtggtcaccttcaagaaactccaggacggaagcactagggtcagacagcttcagatacgtgccatctgcctcagctttccatcgtcactttcaatgcctacgaagatggggccatggggtggaaatggaggctccattcaagacatcaccacaggaaccccgatgcgcctgcaaagtgtgacactcagcagcgagagcagctggattgtctctcttgcatttacttatattgacaaacttggaaagaggcgcaacgaaggcccctggggtcctgacaaagggaacagtcaaaccatcgagttcggacctaaagaatatgtgacggaaatatcagggacaattgacaatgtcatatcgtcacttgttatcacgacaaacatcaaaaagtatggaccgtttgggcatgagaagggcaaccgtttcagcgccgccgtgccagaaaacacatgtgttgtgggattctttgccaggaccgggaatgctcttgatgccattggcgtttaccacggacccatagtggtttgaactggatttaatgctgctttgctttagtttatggcaatctcatgcgagttcattttaagggaaagtgtgtttgttccacatttgttttccagcaataacatggcaagggtcatgcttacgtctgtgatccatgtctctctagtgcaagagtctt

SEQ ID NO: 10480 - protein, 309 aa, Triticum aestivum
  misc_feature (1)..(309): Ceres Seq. ID no. 13596266
MAKYFQSAPVSNEALKHKEILLDGLYMHQDLDGSPNQNQKTIVNPNLPLQFGCTVANDWTIYDGLGPDKKLVARAQGPHMGAGVAKGSWFICFNMVFVDDRFAGSSLKVLGHFEEPVEGEWAILGGTGEFAYAQGVVTFKKLQDGSTRVRQLQIRAICLSFPSSLSMPTKMGPWGGNGGSIQDITTGTPMRLQSVTLSSESSWIVSLAFTYIDKLGKRRNEGPWGPDKGNSQTIEFGPKEYVTEISGTIDNVISSLVITTNIKKYGPFGHEKGNRFSAAVPENTCVVGFFARTGNALDAIGVYHGPIVV

SEQ ID NO: 10481 - protein, 283 aa, Triticum aestivum
  misc_feature (1)..(283): Ceres Seq. ID no. 13596267
MHQDLDGSPNQNQKTIVNPNLPLQFGCTVANDWTIYDGLGPDKKLVARAQGPHMGAGVAKGSWFICFNMVFVDDRFAGSSLKVLGHFEEPVEGEWAILGGTGEFAYAQGVVTFKKLQDGSTRVRQLQIRAICLSFPSSLSMPTKMGPWGGNGGSIQDITTGTPMRLQSVTLSSESSWIVSLAFTYIDKLGKRRNEGPWGPDKGNSQTIEFGPKEYVTEISGTIDNVISSLVITTNIKKYGPFGHEKGNRFSAAVPENTCVVGFFARTGNALDAIGVYHGPIVV

SEQ ID NO: 10482 - protein, 230 aa, Triticum aestivum
  misc_feature (1)..(230): Ceres Seq. ID no. 13596268
MGAGVAKGSWFICFNMVFVDDRFAGSSLKVLGHFEEPVEGEWAILGGTGEFAYAQGVVTFKKLQDGSTRVRQLQIRAICLSFPSSLSMPTKMGPWGGNGGSIQDITTGTPMRLQSVTLSSESSWIVSLAFTYIDKLGKRRNEGPWGPDKGNSQTIEFGPKEYVTEISGTIDNVISSLVITTNIKKYGPFGHEKGNRFSAAVPENTCVVGFFARTGNALDAIGVYHGPIVV

SEQ ID NO: 10483 - DNA, 1387 bp, Triticum aestivum
  misc_feature (1)..(1387): Ceres Seq. ID no. 13596281
ccttcagccccaaatccctatcccaaatttccaaggaatcatggcgcgctgctccccgccgctgctgcgccgcttcttctgctgcgccgccaaatctgcctcggccacatccgccgccgccggcaccaagaagaagaacatcgtcttcttgggatctccccaggtggcggcctcggtcctggacacgttgttggccgcgtccagctcccccgactccgcattccaggtcgctgccgtcgtgacgcagccgccggccgccaagaacagggggaggaagctgttgccgtcggccgtcgcgcagctcgcgctcgagcgtgggttccctggcgacctcatcttcacccccgagcgcgctggggaggagtcctttctgtctgacttgaagggggtgaaaccagaactttgcatcactgctgcttacgggaacattttgccacagaggtttcttgacatcccaccatgtgcaggtacagttaatatacacccaagtttgttgcctctatatcgtggtgcagctcctgtgcagagggcattgcaggatggtgttgcagaaacaggtgtttcccttgcatatactatccgtgccttggatgcaggtccagtgattgcttgtgaaaggttttctgtcgatgaatgcatcaaggcaccagagctgcttgctatactattcaatatagggtccaagctactgctggatgaactaccatccgttcttgatggttcagctaagcaaaaggcgaagccacaagatgactccaaagctacactggcgcccaagatgaattcggacgagtcctggctgacatttgacgaagaagctaaagttctccataacaaggtgcgagcatttgcaggatggcctggaacccgtgcaaaattgcaacttatgaaccaaaatggcgaacctgatgttctagacatcaaggttatcagtacgaacgtttccacgtcatgtgacaaagtcggagacgaaaacgaaatactattctcagggaactcactgctcgttccttgcagtgggtcaacttggcttgaggtcttggagcttcagctacctggaaagaaggtaaccacagctcgggacttctggaatggtttgcgtggtcagaagctgttaaaatcaacatagagggaaatctgcattcattttgcagcacatgtgcaaaggatgcaaatgccacgacggccatatgccgtgctcggtttagatgcatcttgcaggattaaagggctgttgacatttatccttagagaaatttgcaggggagcaaaaagatggtcttaatttttgtaaagaaaattatttagattttttgccctaactttttttttacaaatcaataatttttcaaaaaaaaaaaaaaaaaagcttatcgataccgtcgac

SEQ ID NO: 10484 - protein, 375 aa, Triticum aestivum
  misc_feature (1)..(375): Ceres Seq. ID no. 13596282
LQPQIPIPNFQGIMARCSPPLLRRFFCCAAKSASATSAAAGTKKKNIVFLGSPQVAASVLDTLLAASSSPDSAFQVAAVVTQPPAAKNRGRKLLPSAVAQLALERGFPGDLIFTPERAGEESFLSDLKGVKPELCITAAYGNILPQRFLDIPPCAGTVNIHPSLLPLYRGAAPVQRALQDGVAETGVSLAYTIRALDAGPVIACERFSVDECIKAPELLAILFNIGSKLLLDELPSVLDGSAKQKAKPQDDSKATLAPKMNSDESWLTFDEEAKVLHNKVRAFAGWPGTRAKLQLMNQNGEPDVLDIKVISTNVSTSCDKVGDENEILFSGNSLLVPCSGSTWLEVLELQLPGKKVTTARDFWNGLRGQKLLKST

SEQ ID NO: 10485 - protein, 362 aa, Triticum aestivum
  misc_feature (1)..(362): Ceres Seq. ID no. 13596283
MARCSPPLLRRFFCCAAKSASATSAAAGTKKKNIVFLGSPQVAASVLDTLLAASSSPDSAFQVAAVVTQPPAAKNRGRKLLPSAVAQLALERGFPGDLIFTPERAGEESFLSDLKGVKPELCITAAYGNILPQRFLDIPPCAGTVNIHPSLLPLYRGAAPVQRALQDGVAETGVSLAYTIRALDAGPVIACERFSVDECIKAPELLAILFNIGSKLLLDELPSVLDGSAKQKAKPQDDSKATLAPKMNSDESWLTFDEEAKVLHNKVRAFAGWPGTRAKLQLMNQNGEPDVLDIKVISTNVSTSCDKVGDENEILFSGNSLLVPCSGSTWLEVLELQLPGKKVTTARDFWNGLRGQKLLKST

SEQ ID NO: 10486 - DNA, 1442 bp, Triticum aestivum
  misc_feature (1)..(1442): Ceres Seq. ID no. 13596303
atcgattgcattccgcagttggacgacggcagcacactctgcttctcactgacgccgccggccacgcctctccccctccgagcgccgctctgctcgccgccgccgtcgccgcctacgagctgcggctcctgcccccactgcgcgctgcagagctcgcgcggacgggttcggcgtgatgggggacgacggggcggaaggggaggcgccgcgctgcgtcggctgcggccggcgcgtgaggacgctcttcgtgcagtactccgcaggcaacatccgtttgatgaaatgcgatgtctgcaaggctgtcgccgatccctacatcgagtgtgaattcatgattatcttgatcgatctgattctacacaagaccagggcataccgacatctactgttcaataagctgcacattggttcatctattgacaagggaatactgtgccagttcattctgatgcatatcgttcttgacgcttgtatccattttcatttataaattttttattttaattctggtagtttccaacattcaacctaagctgcccataactatgtagtcagaatatcagtttcaaaaagcaacaaagttgatggggattcttcctggagcacattgtccacaatttgcaattgcagcgaggttctgggtgatgcattgttagggaacatcatatttacggccatgttactcctgggagtacgatatatcctcaaattttcttttgacattacaaggtatcgagagattctgttagccgtcatcatttcaagctatttcaagttatttcttctgacaatgatggtttgggagttcccatcatctgctatattcattgtcgaaacatttgttctctcatcaaatgttgtagccctgagagtggtgacgcggttcccaaaggcccactgtgttggtgtctgcttcatggcgcacgcggcaaagcacttgacggaacggtggctcatgtggacaccatgaacatgaattcatcaagacttgccaccgccttccaagtgttcgtgcagcattgatctggaccacgccggaactggagagcggggagctgtcctgctggcctctgtaccgtggcgctgcaggttgagcggcgtctccggtcagcatatgcctgagctagtgaagaggcaggcggtctggggagatgggctgtccgtttcgcctacttatggcccaagtaggagtaggtacttgccctgttcgttcacgcccggaagtgcgtcagctgacagggcctctctaccttgtgaccacacgtgcaaaacgcacagtccagtgtctgtatgtttgtatgtctcgttctttttcagtttggttttatttacatccgttgtagaaaaaaaaaagagcttccgggtcgacgcacttccgtaggattactctgctttttccagggacaaaatttggtttccgggtttccacggttactttctgc

SEQ ID NO: 10487 - protein, 108 aa, Triticum aestivum
  misc_feature (1)..(108): Ceres Seq. ID no. 15221832
IDCIPQLDDGSTLCFSLTPPATPLPLRAPLCSPPPSPPTSCGSCPHCALQSSRGRVRRDGGRRGGRGGAALRRLRPAREDALRAVLRRQHPFDEMRCLQGCRRSLHRV

SEQ ID NO: 10488 - protein, 104 aa, Triticum aestivum
  misc_feature (1)..(104): Ceres Seq. ID no. 15221833
MGDDGAEGEAPRCVGCGRRVRTLFVQYSAGNIRLMKCDVCKAVADPYIECEFMIILIDLILHKTRAYRHLLFNKLHIGSSIDKGILCQFILMHIVLDACIHFHL

SEQ ID NO: 10489 - protein, 97 aa, Triticum aestivum
  misc_feature (1)..(97): Ceres Seq. ID no. 15221834
MLLLGVRYILKFSFDITRYREILLAVIISSYFKLFLLTMMVWEFPSSAIFIVETFVLSSNVVALRVVTRFPKAHCVGVCFMAHAAKHLTERWLMWTP

SEQ ID NO: 10490 - DNA, 1258 bp, Triticum aestivum
  misc_feature (1)..(1258): Ceres Seq. ID no. 13596304
aaaaacaaccaagaaatctcacgacgcgtcctcctcccactcctctcctcccccctctcgccatggccggccgcctcctcgccgcccctctcctcctctttgtgctcctccagctccccgtgccgtcccaggtgcgcgcgtacccgctcgcggcggcacactctggtcggtgcccaaggccggaggagaggccgccgccgttcctccaggggctccggcgaacctgccgcacctcgacggaggggcacccggccgaggaggttaatggggaggaacttatcagagagttgggtggaaaggagtacactgctgtcctcttctatgcatcatggtgccctttctctcatagaatgagaccaatcttcgacgatcttagctcaatgtatccacatattaagcacttggctgtagaacagtccaacgtgatgccaacagttttatcaagatatggtgtccgcagccttccttctatactaatagctcatgagtcatatgcattttggcctcttgttgccaaagatctcaactcactggtcaacttctactctgctgttactggacaagaaccagttgcatatcttggtccacggaagtggatcacaaccgaaagaagcacacagtatgtgaagctttggaatggttcagtcagcgaatcagtgaagggcgagccctacctagcattcagcatcttctttatttgcctaagggtgttctcgttcttcttcccaaagttcttcgcctgcatcaaaggcttgtgggcccaatacttccggcacgccaactttggagtccttgccaaattgacgcagctgctcgaatgtgtgccccatgccgtggatgtaaggaagatgtggagcaaatggaggctcatggttggagccataaacatgagagtctgggcatcatctctagcttcggtgtctcttggtgggcaatcttctccccgagctgctagattggattgatggtttggattttaatgtcgggcgggagagcatgcgggctgtttgaattgcgctggatgtggaagctcctataactcacatgaacatgtagtgaaacatcttgtttgtagcatgtaaatcttagggatactgttgagcctgtgtagaccacactgtaacattaatcatgagtaccaattgtcatagtttttgagcaactgggcacacatcataagcccttttactatttttcacatgtaatctgcaattgcagtatgttcatctgtcttgtactaataagtgaaagacattcc

SEQ ID NO: 10491 - protein, 320 aa, Triticum aestivum
  misc_feature (1)..(320): Ceres Seq. ID no. 13596305
KQPRNLTTRPPPTPLLPPLAMAGRLLAAPLLLFVLLQLPVPSQVRAYPLAAAHSGRCPRPEERPPPFLQGLRRTCRTSTEGHPAEEVNGEELIRELGGKEYTAVLFYASWCPFSHRMRPIFDDLSSMYPHIKHLAVEQSNVMPTVLSRYGVRSLPSILIAHESYAFWPLVAKDLNSLVNFYSAVTGQEPVAYLGPRKWITTERSTQYVKLWNGSVSESVKGEPYLAFSIFFICLRVFSFFFPKFFACIKGLWAQYFRHANFGVLAKLTQLLECVPHAVDVRKMWSKWRLMVGAINMRVWASSLASVSLGGQSSPRAARLD

SEQ ID NO: 10492 - protein, 300 aa, Triticum aestivum
  misc_feature (1)..(300): Ceres Seq. ID no. 13596306
MAGRLLAAPLLLFVLLQLPVPSQVRAYPLAAAHSGRCPRPEERPPPFLQGLRRTCRTSTEGHPAEEVNGEELIRELGGKEYTAVLFYASWCPFSHRMRPIFDDLSSMYPHIKHLAVEQSNVMPTVLSRYGVRSLPSILIAHESYAFWPLVAKDLNSLVNFYSAVTGQEPVAYLGPRKWITTERSTQYVKLWNGSVSESVKGEPYLAFSIFFICLRVFSFFFPKFFACIKGLWAQYFRHANFGVLAKLTQLLECVPHAVDVRKMWSKWRLMVGAINMRVWASSLASVSLGGQSSPRAARLD

SEQ ID NO: 10493 - protein, 204 aa, Triticum aestivum
  misc_feature (1)..(204): Ceres Seq. ID no. 13596307
MRPIFDDLSSMYPHIKHLAVEQSNVMPTVLSRYGVRSLPSILIAHESYAFWPLVAKDLNSLVNFYSAVTGQEPVAYLGPRKWITTERSTQYVKLWNGSVSESVKGEPYLAFSIFFICLRVFSFFFPKFFACIKGLWAQYFRHANFGVLAKLTQLLECVPHAVDVRKMWSKWRLMVGAINMRVWASSLASVSLGGQSSPRAARLD

SEQ ID NO: 10494 - DNA, 1358 bp, Triticum aestivum
  misc_feature (1)..(1358): Ceres Seq. ID no. 13596315
gattgattccagaagaggtagtctgctcggcgaatttcatcccctaggaatccttctccttccttccttgggacgagcagggagggccgtggacatggaggattcctcctcctacttgccggggccggcggcggatttcgtcgactacctgggccccgacacctccgccaccgtcttcaccatgctccaccaccccgccgacctcgcacgcgcatccgccgtctcccgatcctggcgacaattcgttatcgacaaccagttcagcaagctgcagtgcctgcgggcctgcccggagctctccaccttcaccaccgtccacctcaccaccaccaccaccaccaccaccagaaacccctctcaatgccaggaccaggacaccgccgagaagctccaccgggtgtacacgcacctcgcccacggcctcctctcgccctacaaccccagggactgcatcatccactgcatcggcgcctccagcaccgacaacttccccaacgagaccatcgagaacaccctcgaccccgtcgaccaccttgactccaacaggccatcctactggtccagcgccggccagagggaccccgccgtgcccgagtgcctcatatatcgcctccaggccgatctctgcctcgttcacgagatcaagctgcagccattcaaagcgtttttccagcatggcgacccgatatattcgccaaagagcatccgggtccagatgggctatccaagctcaccgctacgccctgaagcactcgtctctgatgaaaatgaaggccagttgattgatgatacaaactatgtctggacctacacatctccagaattcccaatgctgcaggaaaatgttttgcaatccttcaagttaccacacccggttctctgtattggcggggtggtcaaggttgagcttcttgggagggttcagaaacaggcaatcgatggtctctactacatatgcatatctcatgtccaaataatggggaaggcactctcacgagacctcggggtcgttcctcgcgggaacggcctcgtcctgaactactatctgcatccccatacatgcggcgttccccgcagcgagtcgtcacgggacaatgggcgcagcaggtggcagggcttggcgtcgaggatctggcattctggcacggcgcgaaggataggagggctgaaccaaacgctgctgagcagactgtttggcggtccgttgcggcttgtggtcgtagcggacgaatcggaaggggaggaggaggatgatcttccttagaaggaaggaaggagctcaagggtcttatttgatttgatttgattttctgcacatatataaaagagtgactgtccttttgtggtgctgtgctgtg

SEQ ID NO: 10495 - protein, 420 aa, Triticum aestivum
  misc_feature (1)..(420): Ceres Seq. ID no. 13596316
IDSRRGSLLGEFHPLGILLLPSLGRAGRAVDMEDSSSYLPGPAADFVDYLGPDTSATVFTMLHHPADLARASAVSRSWRQFVIDNQFSKLQCLRACPELSTFTTVHLTTTTTTTTRNPSQCQDQDTAEKLHRVYTHLAHGLLSPYNPRDCIIHCIGASSTDNFPNETIENTLDPVDHLDSNRPSYWSSAGQRDPAVPECLIYRLQADLCLVHEIKLQPFKAFFQHGDPIYSPKSIRVQMGYPSSPLRPEALVSDENEGQLIDDTNYVWTYTSPEFPMLQENVLQSFKLPHPVLCIGGVVKVELLGRVQKQAIDGLYYICISHVQIMGKALSRDLGVVPRGNGLVLNYYLHPHTCGVPRSESSRDNGRSRWQGLASRIWHSGTARRIGGLNQTLLSRLFGGPLRLVVVADESEGEEEDDLP

SEQ ID NO: 10496 - protein, 389 aa, Triticum aestivum
  misc_feature (1)..(389): Ceres Seq. ID no. 13596317
MEDSSSYLPGPAADFVDYLGPDTSATVFTMLHHPADLARASAVSRSWRQFVIDNQFSKLQCLRACPELSTFTTVHLTTTTTTTTRNPSQCQDQDTAEKLHRVYTHLAHGLLSPYNPRDCIIHCIGASSTDNFPNETIENTLDPVDHLDSNRPSYWSSAGQRDPAVPECLIYRLQADLCLVHEIKLQPFKAFFQHGDPIYSPKSIRVQMGYPSSPLRPEALVSDENEGQLIDDTNYVWTYTSPEFPMLQENVLQSFKLPHPVLCIGGVVKVELLGRVQKQAIDGLYYICISHVQIMGKALSRDLGVVPRGNGLVLNYYLHPHTCGVPRSESSRDNGRSRWQGLASRIWHSGTARRIGGLNQTLLSRLFGGPLRLVVVADESEGEEEDDLP

SEQ ID NO: 10497 - protein, 360 aa, Triticum aestivum
  misc_feature (1)..(360): Ceres Seq. ID no. 13596318
MLHHPADLARASAVSRSWRQFVIDNQFSKLQCLRACPELSTFTTVHLTTTTTTTTRNPSQCQDQDTAEKLHRVYTHLAHGLLSPYNPRDCIIHCIGASSTDNFPNETIENTLDPVDHLDSNRPSYWSSAGQRDPAVPECLIYRLQADLCLVHEIKLQPFKAFFQHGDPIYSPKSIRVQMGYPSSPLRPEALVSDENEGQLIDDTNYVWTYTSPEFPMLQENVLQSFKLPHPVLCIGGVVKVELLGRVQKQAIDGLYYICISHVQIMGKALSRDLGVVPRGNGLVLNYYLHPHTCGVPRSESSRDNGRSRWQGLASRIWHSGTARRIGGLNQTLLSRLFGGPLRLVVVADESEGEEEDDLP

SEQ ID NO: 10498 - DNA, 1613 bp, Triticum aestivum
  misc_feature (1)..(1613): Ceres Seq. ID no. 13596321
atgatcgcctatttaagcttctcctgttctcgcccaccctgccccatcccattcccactctctcccagcagcggcggcagcggcacgtcgtcgtcctcctccccctcgccgtccgcgcgtccgtccaacagaggctgggaaccttaaagcggaacagggttcatggagggtggaggcgcaagaaatgtttctgcagcggcagcacagacaaaggaaagtgcggatgacggctcctgcaagccactgcctccttgctgtgtcaaggcgcaggctgctgtggcggaatctgaggccaagtgccacgctaccgtggtgtctgggtggttcacaggaacccggtcacgctctggcaaaccaagcaaagcgcagtacttcaacaatccaatgtggcctggggaggctcattcgttgaaagtagagaagattttgtaccaggggaaatcgccataccaagaagttttagtatttgagtcttcaacctatgggaatgtccttgtgcttgatggaattgttcagctcactgacaaggatgaatgtgcataccaggaaatggttactcaccttgcactgtgctcaattccatctcctaaaaatgttttggttgtcggaggtggtgatggtggtgtactacgagaaatagccaagcatgattcagtggagagtatagacatatgtgagattgatcagctagttattgatgtttgtaaagattttttcccacgtctatatgttggatataaagaccctcgtgtcaaacttcatgttggtgatgctgtggagttcttgagaaactctccagaaggaaaatatgatgccattattgttgattcatcagatccaattgggccagctcaggaacttgtggagaagcccttttttcagacaattgctagggctttaaagcctggcggtgttctttctaatctagctgaaagtatgtggctgcacacacatctaatccaggatatgctttctatctgtcgagaggtattcaagggtggcgtgcactatgcctgggcaagtgttccaacatatcctagtggtgtcattggatttttgctatgtgcgaaggaaggtccaccggtggacttcttaactcctgtgaatccaatcgagaaaattgaaggagctactaaagatggacgagagatgagattttacaattcagagattcataaggctgcttttattctgccaacgtttgtaaagagggagctggaggcatataactcttccactgaaaaggagagaccggagaagccaaccgcaaaaccagtgaagatgaaggtaatgcgggacagcgctattaccgcttcctagaccgcgggcggacacctgtgtgctatccatcttccccgatgagacccgccgcacctgtatatccacgttccacgcctgtcctttgctaccaaattttattcaatagttacatgattgtgtggtgctctagcatagttgcgtgacacaactgagggtgtaatatcactaaatgtgtatggtgtgttgcagttggtgaataaaggagcaaacagaaggggatgtgtgatgtgtttcccttatctgtaacatgtatgatgtttcattgttgcgtgagttctcgtggtgcaagtacc

SEQ ID NO: 10499 - protein, 385 aa, Triticum aestivum
  misc_feature (1)..(385): Ceres Seq. ID no. 13596322
MEGGGARNVSAAAAQTKESADDGSCKPLPPCCVKAQAAVAESEAKCHATVVSGWFTGTRSRSGKPSKAQYFNNPMWPGEAHSLKVEKILYQGKSPYQEVLVFESSTYGNVLVLDGIVQLTDKDECAYQEMVTHLALCSIPSPKNVLVVGGGDGGVLREIAKHDSVESIDICEIDQLVIDVCKDFFPRLYVGYKDPRVKLHVGDAVEFLRNSPEGKYDAIIVDSSDPIGPAQELVEKPFFQTIARALKPGGVLSNLAESMWLHTHLIQDMLSICREVFKGGVHYAWASVPTYPSGVIGFLLCAKEGPPVDFLTPVNPIEKIEGATKDGREMRFYNSEIHKAAFILPTFVKRELEAYNSSTEKERPEKPTAKPVKMKVMRDSAITAS

SEQ ID NO: 10500 - protein, 311 aa, Triticum aestivum
  misc_feature (1)..(311): Ceres Seq. ID no. 13596323
MWPGEAHSLKVEKILYQGKSPYQEVLVFESSTYGNVLVLDGIVQLTDKDECAYQEMVTHLALCSIPSPKNVLVVGGGDGGVLREIAKHDSVESIDICEIDQLVIDVCKDFFPRLYVGYKDPRVKLHVGDAVEFLRNSPEGKYDAIIVDSSDPIGPAQELVEKPFFQTIARALKPGGVLSNLAESMWLHTHLIQDMLSICREVFKGGVHYAWASVPTYPSGVIGFLLCAKEGPPVDFLTPVNPIEKIEGATKDGREMRFYNSEIHKAAFILPTFVKRELEAYNSSTEKERPEKPTAKPVKMKVMRDSAITAS

SEQ ID NO: 10501 - protein, 256 aa, Triticum aestivum
  misc_feature (1)..(256): Ceres Seq. ID no. 13596324
MVTHLALCSIPSPKNVLVVGGGDGGVLREIAKHDSVESIDICEIDQLVIDVCKDFFPRLYVGYKDPRVKLHVGDAVEFLRNSPEGKYDAIIVDSSDPIGPAQELVEKPFFQTIARALKPGGVLSNLAESMWLHTHLIQDMLSICREVFKGGVHYAWASVPTYPSGVIGFLLCAKEGPPVDFLTPVNPIEKIEGATKDGREMRFYNSEIHKAAFILPTFVKRELEAYNSSTEKERPEKPTAKPVKMKVMRDSAITAS

SEQ ID NO: 10502 - DNA, 1112 bp, Triticum aestivum
  misc_feature (1)..(1112): Ceres Seq. ID no. 13596325
tttttctttcaagcaagcaagcaagcaagcagaggagagggaccgggaccgggagtgagaggaagtcgagctcttttcttcgtcgacgctggtttttggcccctgactgctggtcgagatgtcgaagatggcggacgagaaggtgatttcggcgccggcgaccggcggaggagaggacgggctgatcgcaggggacctgtcagccacggaggcgcgtgtccgtccgttggagacgctgctgcgcgccgcgcctctggggctctgcgtcgccgccatggccgtcatgctccgcgacacgcagaccaacgagtacggcaccgtctcctactccgacctcggcggattcaagtacctggtttatgccaacgggctgtgcgcggcctactycctggtctccgcgttctacactgccgtgccgcggccggcgaccctgtcccgctcctggatcgtcttcctcctagatcaggtgttcacgtacctgatcctggcggccggcgcggcgtcggcagagctactctacctggcgtacaacggcgacaaggaggtgacgtggagcgaggcgtgcggcgtgttcggcggcttctgcaggcaggcccggacgtcggtggccatcaccttcggctccgtcgtctgctacatcctcctctccctcatctcgtcctaccgcctcttcagcgcctacgacgcacccatgccctcgctcggcaacaagggcgtcgagatcgctgccttcccgcgctgagccgagaggatccctagctgctgtgccttggctactcgatgacgggtcaaaactcaaaacacgtacgtacgtagtagtatcgctgtgtgtgtaggcgaacgaaataatctgtaagggctcatagttaatttcaagctacatatagtgcatctgcctctcttctttttactttattctatatataccgtactagctttgaatcttctgctgtgaggctgtggtggattcattgatgcgttccaaaaatgcgaacctagttccgttgcaggcacccaagtgatctatgtaactacgatgagcttcctaatttaaggagttcagttgcttgtaaggtgcttgaagcaaagcaaaatcaatactcttttcgttc

SEQ ID NO: 10503 - protein, 252 aa, Triticum aestivum
  misc_feature (1)..(252): Ceres Seq. ID no. 15221840
  misc_feature (129)..(129): Xaa is any aa, unknown or other
FFFQASKQASRGEGPGPGVRGSRALFFVDAGFWPLTAGRDVEDGGREGDFGAGDRRRRGRADRRGPVSHGGACPSVGDAAARRASGALRRRHGRHAPRHADQRVRHRLLLRPRRIQVPGLCQRAVRGLXPGLRVLHCRAAAGDPVPLLDRLPPRSGVHVPDPGGRRGVGRATLPGVQRRQGGDVERGVRRVRRLLQAGPDVGGHHLRLRRLLHPPLPHLVLPPLQRLRRTHALARQQGRRDRCLPALSREDP

SEQ ID NO: 10504 - protein, 207 aa, Triticum aestivum
  misc_feature (1)..(207): Ceres Seq. ID no. 15221841
  misc_feature (90)..(90): Xaa is any aa, unknown or other
MSKMADEKVISAPATGGGEDGLIAGDLSATEARVRPLETLLRAAPLGLCVAAMAVMLRDTQTNEYGTVSYSDLGGFKYLVYANGLCAAYXLVSAFYTAVPRPATLSRSWIVFLLDQVFTYLILAAGAASAELLYLAYNGDKEVTWSEACGVFGGFCRQARTSVAITFGSVVCYILLSLISSYRLFSAYDAPMPSLGNKGVEIAAFPR

SEQ ID NO: 10505 - protein, 204 aa, Triticum aestivum
  misc_feature (1)..(204): Ceres Seq. ID no. 15221842
  misc_feature (87)..(87): Xaa is any aa, unknown or other
MADEKVISAPATGGGEDGLIAGDLSATEARVRPLETLLRAAPLGLCVAAMAVMLRDTQTNEYGTVSYSDLGGFKYLVYANGLCAAYXLVSAFYTAVPRPATLSRSWIVFLLDQVFTYLILAAGAASAELLYLAYNGDKEVTWSEACGVFGGFCRQARTSVAITFGSVVCYILLSLISSYRLFSAYDAPMPSLGNKGVEIAAFPR

SEQ ID NO: 10506 - DNA, 940 bp, Triticum aestivum
  misc_feature (1)..(940): Ceres Seq. ID no. 13596338
gagaaaggaacggctgccgtcccctgcctgcaaccgcaactcaaccagtcagtcgccattactcttgtttctcatcacccaccgcgagcgcgaagcaggaggagcagcaccatgctggggcatctagtcgggctggtgaaggtgcgggtgacgcgcggggtgaacctcgccatccgcgacctccgctccagcgacccctacgtcgtcgtccgcatgggcaagcagaagctgaagacgcgagttgtaaggaagagtatcaatccggagtggaacgatgaactgaccctctccatcgaagatcctaccattcctgtcaaactggacgtgttcgacaaggacacattcttcgacgacccgatgggcaacgcggagctggacatcggcccgctggtggaggccgcgaggatgagggtccagctgcagggcgtcgctgacaacaccgtggtgaagaagctggtgcccaaccggcagaactgcctcgccgagcagagcgccatctacctgtccgagggcacggtgaagcaggacgtggtgctcaggctgaggaacgtcgagtgcggggaggtcgagctccagctccagtggatcgacatccccggctccaagggcgtatcaggcttttaattagctctctgtgcactctctgctgtttgcagagttctttctcaagtgaaaagctggagtaaattctgattagaatccaagcttaagttaggatttagattatgtgcgatagatgactgtgtggtcgaacttcctaagatggactgaaaaaggaagaactggtggcaggggcgcaaaaattctcagaaaaaaaaaaaaaaaaaaaaaaaaaaaaaaaaaaaaaaaaaaaaaaaaaaaaaaaaaaaaaaaaaaaaaaaaargaaaaaaaaaaaaaaaaaggtttwtcgatmccgccvacccccgggggggggcccgg

SEQ ID NO: 10507 - protein, 207 aa, Triticum aestivum
  misc_feature (1)..(207): Ceres Seq. ID no. 15221843
EKGTAAVPCLQPQLNQSVAITLVSHHPPRARSRRSSTMLGHLVGLVKVRVTRGVNLAIRDLRSSDPYVVVRMGKQKLKTRVVRKSINPEWNDELTLSIEDPTIPVKLDVFDKDTFFDDPMGNAELDIGPLVEAARMRVQLQGVADNTVVKKLVPNRQNCLAEQSAIYLSEGTVKQDVVLRLRNVECGEVELQLQWIDIPGSKGVSGF

SEQ ID NO: 10508 - protein, 170 aa, Triticum aestivum
  misc_feature (1)..(170): Ceres Seq. ID no. 15221844
MLGHLVGLVKVRVTRGVNLAIRDLRSSDPYVVVRMGKQKLKTRVVRKSINPEWNDELTLSIEDPTIPVKLDVFDKDTFFDDPMGNAELDIGPLVEAARMRVQLQGVADNTVVKKLVPNRQNCLAEQSAIYLSEGTVKQDVVLRLRNVECGEVELQLQWIDIPGSKGVSGF

SEQ ID NO: 10509 - protein, 136 aa, Triticum aestivum
  misc_feature (1)..(136): Ceres Seq. ID no. 15221845
MGKQKLKTRVVRKSINPEWNDELTLSIEDPTIPVKLDVFDKDTFFDDPMGNAELDIGPLVEAARMRVQLQGVADNTVVKKLVPNRQNCLAEQSAIYLSEGTVKQDVVLRLRNVECGEVELQLQWIDIPGSKGVSGF

SEQ ID NO: 10510 - DNA, 1059 bp, Triticum aestivum
  misc_feature (1)..(1059): Ceres Seq. ID no. 13596339
cctgcctctgcgtcttcctctgcttcctcttctcctcccaatccaatccttgtagaatcttccaccggcgcccgggtaagatgaacggcctcctcgtgtccccgtgcacaaggccgcccctgctccgccccttcccgagcccggccacccgtctcctacccgccagaaccctagttcttcgcccgctccgcctcccccgtggcgtctgtgcgtcccctcctcccccgcgcgccgccgccgccgctgcgtctgcagtgggcggccttctggcgccgctcgaggttggcctgcgcagcatcaacctcgcgccgctgcgcccgccggttgcggcggccatgtcggcggccgtgcgctggctgggggtctaccgggaggttctgcttgtcggggtgctcttctcctggtttcccaacatcccctgggaccgccagcccttctccgctctgcgagacctctgcgacccttttctcgccctctgccgcgaggtcgtgccgcccgtcttcggccgcaagctcgatctcagcccgctcgtcgccttcatggcgatagacatcctcatcatgatccttcgcccacagccacgcatgtgatggaattgaaggatagtcgttggtatgttaagatccactatggttttgtcgttgctggatattacaagataagaagtggtggttgaatgatctttagcaagggtagcagaatttgagtgattttgagacgttttgtagacaagtgtagcttccttgataaaacttctgccaagtagatatgtgctagctacagtctttgtgattctgctctgttcccagacggatttgtctatgatatggcaacacggatctgcatgtagtgagcgattcagagaactgaatcgaaagctgagccattcctgaacggtttgcgagagaatcccaaactagcttaggcaggctcattaatgtgcatggtctacttttttcttctttttccttccaccatgaggatcttatctccttttctgacttggctaatgtgtttacctccagagccacttgttctggttgagtgttgatatactcg

SEQ ID NO: 10511 - protein, 195 aa, Triticum aestivum
  misc_feature (1)..(195): Ceres Seq. ID no. 13596340
CLCVFLCFLFSSQSNPCRIFHRRPGKMNGLLVSPCTRPPLLRPFPSPATRLLPARTLVLRPLRLPRGVCASPPPPRAAAAAASAVGGLLAPLEVGLRSINLAPLRPPVAAAMSAAVRWLGVYREVLLVGVLFSWFPNIPWDRQPFSALRDLCDPFLALCREVVPPVFGRKLDLSPLVAFMAIDILIMILRPQPRM

SEQ ID NO: 10512 - protein, 169 aa, Triticum aestivum
  misc_feature (1)..(169): Ceres Seq. ID no. 13596341
MNGLLVSPCTRPPLLRPFPSPATRLLPARTLVLRPLRLPRGVCASPPPPRAAAAAASAVGGLLAPLEVGLRSINLAPLRPPVAAAMSAAVRWLGVYREVLLVGVLFSWFPNIPWDRQPFSALRDLCDPFLALCREVVPPVFGRKLDLSPLVAFMAIDILIMILRPQPRM

SEQ ID NO: 10513 - DNA, 1247 bp, Triticum aestivum
  misc_feature (1)..(1247): Ceres Seq. ID no. 13596354
ccgtatatcccaacccaaccccagcaaaagcagtccgcgacttgcgagcagagtacacgacgcgaccgcgagccaaaccctaccgcgaacacgtcggcgatgagctcctccaacggcaacggcgggaagaagccggcaccgtccggcgggcgcgggggcatccgcaccctcgccgacatcaaccgcggcccctccgggttcccaggcgcaggcggcagcggcagcgactccgatgagccccaggagtactacaccggcggcgagaagagtgggatgcttgttcaagatccaacaaggagaaataatgtggactcaatctttgagcaagctagagtgatgggtgctcagcaagttccactgccttcttttgaaggccaatcttccagctcaaccagctttgcaggaacaggtcgtctgctttcaggggatgcgcagacagcaccagctgctcctcaaccaccgcaggatgttcttcacaatatacatttctggaacaatggtttcacagtagatgatggtccactaagagcctatgaggacgctgcaaatgcagacttcattgagagcatcaagaagtcccagtgcccccaagagctggagcctgctgatcgaaggacagctgtccatgtcaatgttataaaacgacatggagattatgaggaacctgcaaggcctcgatcagctttccagggtgttggtagaacccttggtgggtcttcagcagatgagagtcctgcaccagctcctgtgacacaagagccccacggtgctcccaggtcaattggcatagttgtggacgactcgcagccctttacatccatacagctaaggttagcggacggcactcgcatggtcgctcggtttaaccttaaccacaccgtgggcgacatcaggtctttcattgatgcatcccgcccaggagctgcgcggccgtatcagttgcagactggcttcccacccaagcagctgactgaccctacgcagactgttgaccaagctggactcaagaactccgttatcatgcagaagatgtagttctcaccgagctggatctgtcgcacagaatgtctttccgatgcaattattaaattagtgctgctgaatggtttatcatgtccactagatactgcactttgcatgcaacctgtgatgtactggttgttttgtcgataaacgtcagtggagtctatattcgtcttgctaccaattatgaatgtctatcaaagttaatgaatgtccggttgtct

SEQ ID NO: 10514 - protein, 344 aa, Triticum aestivum
  misc_feature (1)..(344): Ceres Seq. ID no. 13596355
PYIPTQPQQKQSATCEQSTRRDREPNPTANTSAMSSSNGNGGKKPAPSGGRGGIRTLADINRGPSGFPGAGGSGSDSDEPQEYYTGGEKSGMLVQDPTRRNNVDSIFEQARVMGAQQVPLPSFEGQSSSSTSFAGTGRLLSGDAQTAPAAPQPPQDVLHNIHFWNNGFTVDDGPLRAYEDAANADFIESIKKSQCPQELEPADRRTAVHVNVIKRHGDYEEPARPRSAFQGVGRTLGGSSADESPAPAPVTQEPHGAPRSIGIVVDDSQPFTSIQLRLADGTRMVARFNLNHTVGDIRSFIDASRPGAARPYQLQTGFPPKQLTDPTQTVDQAGLKNSVIMQKM

SEQ ID NO: 10515 - protein, 311 aa, Triticum aestivum
  misc_feature (1)..(311): Ceres Seq. ID no. 13596356
MSSSNGNGGKKPAPSGGRGGIRTLADINRGPSGFPGAGGSGSDSDEPQEYYTGGEKSGMLVQDPTRRNNVDSIFEQARVMGAQQVPLPSFEGQSSSSTSFAGTGRLLSGDAQTAPAAPQPPQDVLHNIHFWNNGFTVDDGPLRAYEDAANADFIESIKKSQCPQELEPADRRTAVHVNVIKRHGDYEEPARPRSAFQGVGRTLGGSSADESPAPAPVTQEPHGAPRSIGIVVDDSQPFTSIQLRLADGTRMVARFNLNHTVGDIRSFIDASRPGAARPYQLQTGFPPKQLTDPTQTVDQAGLKNSVIMQKM

SEQ ID NO: 10516 - protein, 253 aa, Triticum aestivum
  misc_feature (1)..(253): Ceres Seq. ID no. 13596357
MLVQDPTRRNNVDSIFEQARVMGAQQVPLPSFEGQSSSSTSFAGTGRLLSGDAQTAPAAPQPPQDVLHNIHFWNNGFTVDDGPLRAYEDAANADFIESIKKSQCPQELEPADRRTAVHVNVIKRHGDYEEPARPRSAFQGVGRTLGGSSADESPAPAPVTQEPHGAPRSIGIVVDDSQPFTSIQLRLADGTRMVARFNLNHTVGDIRSFIDASRPGAARPYQLQTGFPPKQLTDPTQTVDQAGLKNSVIMQKM

SEQ ID NO: 10517 - DNA, 1223 bp, Triticum aestivum
  misc_feature (1)..(1223): Ceres Seq. ID no. 13596359
aactccactccgccgcgataagccctagcctccacctccgtctccatggcgaccaccaccaccctttcccacccgctctccgtgcccatcgccgggggccgcgtccggcgctgccccctcaccctgctcgccccggcccgcgcggccccccggcggccgacgcccctcctcgtcgcccgcgccaagcgcaccaacaactccagcgctgccccgaagcgagaggcggacgaggaggttgaggtggaggaggagctgccgtggatccaggacaaggcgctggacctcgtggagttcaccggcaccgtcacgcaggccatccccggcccccgcgtcggctccagccccgtgccgtggctcctcgctgtgccgctcgcctacgtcggcgtctccttcgccctcgccgccgtccgcaccttccgcaggttcacctccccgcgcactcagaagaagaagagggtgaccaagaatatattcttgttgaagtcactagacgagttgtttcagaagggcagggaagcagtggattttccagctcttcaagaactaatgcaaaagacaggatttgacatggatgatgtagtaagaaagtacatccgatacacactgaatgaaaaacaattcaatcctgatgtggttgtggatctcatacatcttaggaaagcatcgatgttagaagataatgaagttgctgaaattctgaatgagatatctagacgaattgttcgggaaaaaggtccaatagttatggacttatctgggtttacagagcaaggttttaagcggaagcttgctgtgcaaacattgttcggaaaaatcatgtacttatcagagctcccagagttctgttcccgggacggctcgcttgttgtcaaagaaatctttggagttacagacgaggatgcagacagccttcgcagtcgtaccctttctgaagctggtgatatcgagtcgttagaaaggatggtcgaagattctgatgaacatggtaccccatcatcatcttgaagtatgttagtggttggatacttatcatctttgagttttgtcaatggttgaagaagagagggttgtcctggatagttgactgcaagttttgtaaatctaccttctactaggattgtagcttctggcagtatctcggacctgtctaccacctgactaaaacaaggaagttgttgagagaatggtagcagtgagtttatataaagcgacaattgttaact

SEQ ID NO: 10518 - protein, 319 aa, Triticum aestivum
  misc_feature (1)..(319): Ceres Seq. ID no. 13596360
MATTTTLSHPLSVPIAGGRVRRCPLTLLAPARAAPRRPTPLLVARAKRTNNSSAAPKREADEEVEVEEELPWIQDKALDLVEFTGTVTQAIPGPRVGSSPVPWLLAVPLAYVGVSFALAAVRTFRRFTSPRTQKKKRVTKNIFLLKSLDELFQKGREAVDFPALQELMQKTGFDMDDVVRKYIRYTLNEKQFNPDVVVDLIHLRKASMLEDNEVAEILNEISRRIVREKGPIVMDLSGFTEQGFKRKLAVQTLFGKIMYLSELPEFCSRDGSLVVKEIFGVTDEDADSLRSRTLSEAGDIESLERMVEDSDEHGTPSSS

SEQ ID NO: 10519 - DNA, 1321 bp, Triticum aestivum
  misc_feature (1)..(1321): Ceres Seq. ID no. 13596362
cacactccatgcactagtactctgcaggcactgagctcatcaaggtagcttagctaggatcaatggcgtcgagcaggacagcagcgatgctggtcctcgtggccgcggtgctgtgccctgcagccttgtccaagccgtcggcggcgttcatctctatgcccaccgaccacgtcggtggccgtattcctcccgtctcccccgccgatggactcgccttcgacttccatgccgactcctgcccgcagttgcaggacgtggtgcgctccgccgtggagaccgcgctccagagggagatcgccctcgccgccggcctccttcgcatcttcttccacgactgcttccctcagggctgtgacgcgtcggtccttctgacgggagacggcagcgagctccagttgccgccgaatctgacgctccaaccgcgggcgctgcagctcattgagtccatccgtgcccaggtgcacgccgcctgcggacccgtcgtctcctgcgccgacatcacggccctcgccacccgcgatgccgttgccttctccgggggtcagggctacgacgtgccgctcggcaggctcgacagcctcgcgccggcgccgagctcggccgtcttcgatctcccccaggccagctccaacgcctccacgctcatcgacgtcttcgagacccgcaacctcgacaatgtcgacctcgtcacgctctcaggtggccacaccatcgggaagggccactgcagctccttctccaaccgcttctccgaggactccgacttcgtccgaagcctcgcctccaactgctccagcgacttcaaccggctgcaggacctcgacgtcaccaccccggacgtgttcgacatcaagtacttcaccaacctgcaacagggaaagggggtgttcacctccgaccagaagctcaccgcggactggcgcaccgaatgggttgtcaacggctttgccgggaaccactggtggttcttcggccagtttgctgcttccatgaccaagctcgggaatctccaggggccccaaggaaacgtcggcgagatccgtcgcaacagctgcttcgtgcgcaatggacagagcatcctcaccaccaccagcgacgaggggctcgccgcctctgcttgagatcaccgatgttagcgagattaatgtcttaataagagctcgctagctaatgtagcccatgttattctagatttactcttgtttaaaatcatattatggcactttgttctgggactcctaaaaggcgcgcttcgcctcggtgtgctataattcttttatagggccaaaaaaaaaaaaaaaaaagcttatcgataccgtcg

SEQ ID NO: 10520 - protein, 352 aa, Triticum aestivum
  misc_feature (1)..(352): Ceres Seq. ID no. 13596363
MASSRTAAMLVLVAAVLCPAALSKPSAAFISMPTDHVGGRIPPVSPADGLAFDFHADSCPQLQDVVRSAVETALQREIALAAGLLRIFFHDCFPQGCDASVLLTGDGSELQLPPNLTLQPRALQLIESIRAQVHAACGPVVSCADITALATRDAVAFSGGQGYDVPLGRLDSLAPAPSSAVFDLPQASSNASTLIDVFETRNLDNVDLVTLSGGHTIGKGHCSSFSNRFSEDSDFVRSLASNCSSDFNRLQDLDVTTPDVFDIKYFTNLQQGKGVFTSDQKLTADWRTEWVVNGFAGNHWWFFGQFAASMTKLGNLQGPQGNVGEIRRNSCFVRNGQSILTTTSDEGLAASA

SEQ ID NO: 10521 - protein, 344 aa, Triticum aestivum
  misc_feature (1)..(344): Ceres Seq. ID no. 13596364
MLVLVAAVLCPAALSKPSAAFISMPTDHVGGRIPPVSPADGLAFDFHADSCPQLQDVVRSAVETALQREIALAAGLLRIFFHDCFPQGCDASVLLTGDGSELQLPPNLTLQPRALQLIESIRAQVHAACGPVVSCADITALATRDAVAFSGGQGYDVPLGRLDSLAPAPSSAVFDLPQASSNASTLIDVFETRNLDNVDLVTLSGGHTIGKGHCSSFSNRFSEDSDFVRSLASNCSSDFNRLQDLDVTTPDVFDIKYFTNLQQGKGVFTSDQKLTADWRTEWVVNGFAGNHWWFFGQFAASMTKLGNLQGPQGNVGEIRRNSCFVRNGQSILTTTSDEGLAASA

SEQ ID NO: 10522 - protein, 321 aa, Triticum aestivum
  misc_feature (1)..(321): Ceres Seq. ID no. 13596365
MPTDHVGGRIPPVSPADGLAFDFHADSCPQLQDVVRSAVETALQREIALAAGLLRIFFHDCFPQGCDASVLLTGDGSELQLPPNLTLQPRALQLIESIRAQVHAACGPVVSCADITALATRDAVAFSGGQGYDVPLGRLDSLAPAPSSAVFDLPQASSNASTLIDVFETRNLDNVDLVTLSGGHTIGKGHCSSFSNRFSEDSDFVRSLASNCSSDFNRLQDLDVTTPDVFDIKYFTNLQQGKGVFTSDQKLTADWRTEWVVNGFAGNHWWFFGQFAASMTKLGNLQGPQGNVGEIRRNSCFVRNGQSILTTTSDEGLAASA

SEQ ID NO: 10523 - DNA, 1032 bp, Triticum aestivum
  misc_feature (1)..(1032): Ceres Seq. ID no. 13596366
aacaagctccattcatctattcttcgtctccaccgatccctttggtagaccaaccagcagcagctctcggctcacctctccctgctcctcgatctatctagtctagtcttcagtgtggccatggcgaaggtgcacccgaacctggccgtgccgtctctggggatggcggcggcggcggcggcccgcgacgacgagccggtgacactgacggtgtggcgcaagtcgctgctcttcaactgccgggggttcacggtgttcgacgccagcggcaacctggtgtaccgcgtggacatctacgcgtccgactcccgcgccgaggtggtgctcatggacgccgcggggcggccggtgctcaccgtccgccgcaagaaggccatcagcctcatgggcgaccagtggctggtgttccccggcgaggagacgcgcgcgccgccgctctacgcggtgaagcgcacgccgcagtacatgcgcggcggcggcaagtcgacggcgcacgtggcggcgtgcgcgggcggcgcgcggtacgaggtggaggggtcgtacgcgcggcggtgctgcgcggtgtacgacgagcagcggcgcgcggtggtggaggtgcagcccaaggaggcggtgggcacggacgtgttccggatggtggtgcggccggcgggcatggacgtgtcgctggccatggccgtcgtgctcgcgctggaccagatgctcgggaggccggggctgctcaggagctggtcctcgtagcgccactgagactgggtcgcctccttcggtttgcctccttcgatttccgaaattgtttgggcccgagagcagaacagctcccatgtgccccccttctctctcttttttttgtttcctttttggaaactttctctttgatatatatgaaggtctatgtgcatcgaaatccttcttgaggtgtatggttttgttcatttttactgtaataaaaccatgcattttgtaaagattattaaagtgggatgaaactgtattactcctatacttctataaaagaagtcacactaggcc

SEQ ID NO: 10524 - protein, 206 aa, Triticum aestivum
  misc_feature (1)..(206): Ceres Seq. ID no. 13596367
MAKVHPNLAVPSLGMAAAAAARDDEPVTLTVWRKSLLFNCRGFTVFDASGNLVYRVDIYASDSRAEVVLMDAAGRPVLTVRRKKAISLMGDQWLVFPGEETRAPPLYAVKRTPQYMRGGGKSTAHVAACAGGARYEVEGSYARRCCAVYDEQRRAVVEVQPKEAVGTDVFRMVVRPAGMDVSLAMAVVLALDQMLGRPGLLRSWSS

SEQ ID NO: 10525 - protein, 192 aa, Triticum aestivum
  misc_feature (1)..(192): Ceres Seq. ID no. 13596368
MAAAAAARDDEPVTLTVWRKSLLFNCRGFTVFDASGNLVYRVDIYASDSRAEVVLMDAAGRPVLTVRRKKAISLMGDQWLVFPGEETRAPPLYAVKRTPQYMRGGGKSTAHVAACAGGARYEVEGSYARRCCAVYDEQRRAVVEVQPKEAVGTDVFRMVVRPAGMDVSLAMAVVLALDQMLGRPGLLRSWSS

SEQ ID NO: 10526 - protein, 137 aa, Triticum aestivum
  misc_feature (1)..(137): Ceres Seq. ID no. 13596369
MDAAGRPVLTVRRKKAISLMGDQWLVFPGEETRAPPLYAVKRTPQYMRGGGKSTAHVAACAGGARYEVEGSYARRCCAVYDEQRRAVVEVQPKEAVGTDVFRMVVRPAGMDVSLAMAVVLALDQMLGRPGLLRSWSS

SEQ ID NO: 10527 - DNA, 1474 bp, Triticum aestivum
  misc_feature (1)..(1474): Ceres Seq. ID no. 13596370
attattcttaaccctctcgccccgcctccccgtctcctcctccggtcgcccaaccgagcaggggtgtcgccattgttgtcgcctctcacccgcaggccgcctccgcgtccgtcactaggccacgagacctaggatcccccgccccctcgctgtgacctcgccgcgatgtggtggagggcggtggccagggctcgccgccggatcccgggagcgcggcccgtgtcgacggcggcggcggggaagagcggccgcgaggtggtggtgccgcggttcggcgggccggaggtgctgcagctgaggcagggggtgcccgcgcccgatctgaagcccggcgaggtgcttgtgcgcgcgcgcgccgtctccatcaaccccctcgacttgcgaatgcgggctggctatggccgttgcatattcgagccactcctacctctcatcattggccgggacatcagtggtgaagtcgcagctacagggacttctgtgtcgtcattctatattgggcaagaagtgtttggtgccttgcatccaacagcgattagagggacatgtgctgattatgcagttctttcacaggatgagcttacttctaaaccatctacgctcactcatgtggaggccagtgcaattccctttgctgcgttgactgcgtggcgtgctttatatggtactgctggaatttctaaaggacaaagattacttgtgcttggtggaggaggagcagttgggctttctgctgttcagcttgcggtagctgcagggtgtagtgtttcagctacctgtggagcccaaagtattgagcaagttttggcagccggtgctgaaaaggctattgattacgccactgaggatactgaatcaacagttacaggaaagtttgatgctgtgttagacacaataggagtagctgaaactgaaagaattggtattaatcttctgagaagaggcggacattatatgacccttcagggagaggcagcttcactagcagatagatatggattatatgtgggacttcctgctgctaccgctactttactgaagaaacagatgcagtatcgttgttctcatgggatagagtactggtggacatacatgagagctgatcctgacggtctccatgagatccagaggctgtccggagctggaaaactacagatacctgtggagaagacttttcctatcagccaagtaagagaagctcatgaggccaaggagaaaagactggtgcctggcaaggtggttctagagttcgactagtgttagcaggggttcgtccgacgatcacggaaggaccgacgttccttcttaattgtaccatgatgtttattttttgtctttctcccaaagaaaagtcgtgcggctttgaagctctaaatttgctcgttctctaggtagtactacagggttattttgtcggggtttagtgtaaatgcagtaaataatgatatgcaatacgaagagacttatttcagtg

SEQ ID NO: 10528 - protein, 363 aa, Triticum aestivum
  misc_feature (1)..(363): Ceres Seq. ID no. 13596371
MWWRAVARARRRIPGARPVSTAAAGKSGREVVVPRFGGPEVLQLRQGVPAPDLKPGEVLVRARAVSINPLDLRMRAGYGRCIFEPLLPLIIGRDISGEVAATGTSVSSFYIGQEVFGALHPTAIRGTCADYAVLSQDELTSKPSTLTHVEASAIPFAALTAWRALYGTAGISKGQRLLVLGGGGAVGLSAVQLAVAAGCSVSATCGAQSIEQVLAAGAEKAIDYATEDTESTVTGKFDAVLDTIGVAETERIGINLLRRGGHYMTLQGEAASLADRYGLYVGLPAATATLLKKQMQYRCSHGIEYWWTYMRADPDGLHEIQRLSGAGKLQIPVEKTFPISQVREAHEAKEKRLVPGKVVLEFD

SEQ ID NO: 10529 - protein, 290 aa, Triticum aestivum
  misc_feature (1)..(290): Ceres Seq. ID no. 13596372
MRAGYGRCIFEPLLPLIIGRDISGEVAATGTSVSSFYIGQEVFGALHPTAIRGTCADYAVLSQDELTSKPSTLTHVEASAIPFAALTAWRALYGTAGISKGQRLLVLGGGGAVGLSAVQLAVAAGCSVSATCGAQSIEQVLAAGAEKAIDYATEDTESTVTGKFDAVLDTIGVAETERIGINLLRRGGHYMTLQGEAASLADRYGLYVGLPAATATLLKKQMQYRCSHGIEYWWTYMRADPDGLHEIQRLSGAGKLQIPVEKTFPISQVREAHEAKEKRLVPGKVVLEFD

SEQ ID NO: 10530 - DNA, 1045 bp, Triticum aestivum
  misc_feature (1)..(1045): Ceres Seq. ID no. 13596373
aaaactcgcaaagcccgtagcaaactcgcaatctctcaaacaagctcatggccacctcggcgatcacatccccagcggcgccggaagcgacgctgcccctggccggccgcgtggccatcgtcaccggcgcgtcccgcgggatcgggcgcggcatcgcgacccacctgtcgtccctcggcgccagcctggtcctcgggtacgcctccagctctcagcaggcggacgcgctggccgctgagctcccgcgcgccgtggcggtgaaggccgacgtctcggacgaggcgggcgtccggtccctctttgacgccgcggagaccgccttcggcggcccggcgcacatcctcgtggcctgcgctggccagggcatcgggacctacccgtccctcgccaacaccgccacctcggacttcgacaacgtgttcgccgtgaacacccgaggtgcgtttctgtgcctgcgcgaggcggcgaaccggctgcaccgcgggggcgggggccggatcgtggccgtgtcctcgacgctggcggcgacgctgctccccggctacgcggcgtacgtggcgtctaaggcggccgtggaggcgatggtgcgggtggccgcgaaggagctcgggtcggcacgggtgacggtgaactgcatcgcgccggggccggtggcgacggagctcttcttcgacgggaagagcgaggaggcggtggagaggttcagggctgggcacccgatggggcggcttggggaggtcggcgacatcgcgcctgcggtggggttcctctgcaccgacgcggccgagtgggtgaacggccaggtcattcggctcaacggcggcattgcttaattcattggcgtggctgtcgctctgtttctccctttcaaacggatatctccgttttcttaaaaaattgctgtgcctgtttttttgttggaggattgtgattagctgcttttggtgcttgaataaagaagaaaacacaatgatatggtgtactccgtaaactattgtaggtgctcagagttgcatgtatcttttttatgaaagaagttgcacgc

SEQ ID NO: 10531 - protein, 261 aa, Triticum aestivum
  misc_feature (1)..(261): Ceres Seq. ID no. 13596374
MATSAITSPAAPEATLPLAGRVAIVTGASRGIGRGIATHLSSLGASLVLGYASSSQQADALAAELPRAVAVKADVSDEAGVRSLFDAAETAFGGPAHILVACAGQGIGTYPSLANTATSDFDNVFAVNTRGAFLCLREAANRLHRGGGGRIVAVSSTLAATLLPGYAAYVASKAAVEAMVRVAAKELGSARVTVNCIAPGPVATELFFDGKSEEAVERFRAGHPMGRLGEVGDIAPAVGFLCTDAAEWVNGQVIRLNGGIA

SEQ ID NO: 10532 - DNA, 1338 bp, Triticum aestivum
  misc_feature (1)..(1338): Ceres Seq. ID no. 13596375
cccccctccagttcgcacgagaccwttacctwgaacatsytwatcagaaaaccccaaaccctgaaaaggtcacgccgccgctgcgactccggccgccggcctcccctcctagatggaacctcagcaagagtcgaccgtcgacggccgcaagaggcggcgtagaggaggagtcgggaaacgccagaaggattcttcttgctcacaacaggcacctccgcctgcccctccagtggatgcggcctcccccctggagaagcggcgtcgcaaggccggcgaggccgccgcaatacccaaggggcgcaagcctgcgagcctactcgaaaagatgcgtgcaaggttatctggaggtcatttcagaatgttaaacgagaaactgtacacttgcagtggccaggatgcatttgactactttaaaaacgagcctgagctttttgacgtgtatcatgcaggatatcaagagcagatgtcacattggccagagcagccagttaatgtgataatcaagtggttgaagagtcataacaaatcatggaccgttgctgattttggatgtggcaatgcagcagttgctaaaaacgtgaagaacaaggtcttctccatcgatcttgtttcagatgacccttcagtgattgcttgtgatatggctcataccccattggagccatcctctgtagatgtggcgatattctgtctttctttgatgggaaccaactttccgagttatctacaggaagctaacagagtcctcaagccaagtggttggcttcttattgcggaagtgaggagtaggctagacccgaacaccggaggtgctgatcctgataagttctccgaagccatcagccagcttggcttttcccttgtttcgaaggatgagaagaacaaaatgtttgtcctgttttatttcaggaaaaaggaaaagagcaaggtggcgaaaaacattgaatggccccagttgaaaccttgcttatacaagcggcgatgatctcatcctccactatggtcgctccagacctcttccagagtgtggttaaattaatcgatgtcttgtgctaaactagtcatccttttctactcctatttcttttacctttgggcagctgtatgttcaaagaatcagaccacaccagatatgacctagtaagcgctgtaactcgaggcagtttagaagtgtattattatacagttctgaatctgcttcatatcttctttcctgggccttgtaaacgagtggaggataagttcaacaaagggcattatttctgcgttacttattatatttgatactccctctgtaaagaaatataagatcgtttaactcgaggcatgatttctttg

SEQ ID NO: 10533 - protein, 290 aa, Triticum aestivum
  misc_feature (1)..(290): Ceres Seq. ID no. 15221850
MEPQQESTVDGRKRRRRGGVGKRQKDSSCSQQAPPPAPPVDAASPLEKRRRKAGEAAAIPKGRKPASLLEKMRARLSGGHFRMLNEKLYTCSGQDAFDYFKNEPELFDVYHAGYQEQMSHWPEQPVNVIIKWLKSHNKSWTVADFGCGNAAVAKNVKNKVFSIDLVSDDPSVIACDMAHTPLEPSSVDVAIFCLSLMGTNFPSYLQEANRVLKPSGWLLIAEVRSRLDPNTGGADPDKFSEAISQLGFSLVSKDEKNKMFVLFYFRKKEKSKVAKNIEWPQLKPCLYKRR

SEQ ID NO: 10534 - protein, 219 aa, Triticum aestivum
  misc_feature (1)..(219): Ceres Seq. ID no. 15221851
MRARLSGGHFRMLNEKLYTCSGQDAFDYFKNEPELFDVYHAGYQEQMSHWPEQPVNVIIKWLKSHNKSWTVADFGCGNAAVAKNVKNKVFSIDLVSDDPSVIACDMAHTPLEPSSVDVAIFCLSLMGTNFPSYLQEANRVLKPSGWLLIAEVRSRLDPNTGGADPDKFSEAISQLGFSLVSKDEKNKMFVLFYFRKKEKSKVAKNIEWPQLKPCLYKRR

SEQ ID NO: 10535 - protein, 208 aa, Triticum aestivum
  misc_feature (1)..(208): Ceres Seq. ID no. 15221852
MLNEKLYTCSGQDAFDYFKNEPELFDVYHAGYQEQMSHWPEQPVNVIIKWLKSHNKSWTVADFGCGNAAVAKNVKNKVFSIDLVSDDPSVIACDMAHTPLEPSSVDVAIFCLSLMGTNFPSYLQEANRVLKPSGWLLIAEVRSRLDPNTGGADPDKFSEAISQLGFSLVSKDEKNKMFVLFYFRKKEKSKVAKNIEWPQLKPCLYKRR

SEQ ID NO: 10536 - DNA, 1492 bp, Triticum aestivum
  misc_feature (1)..(1492): Ceres Seq. ID no. 13596376
ctcactcacgtcgcctctctgccagccctcgacatggcgcgttccactcgtctcgtcgcttccaccgccacggctctcctcctcctcctcctgtcggcgtgctcgtgccgcgcggccggcgacagcccgagcgccgtggtgctggcggtgaggaaggacggcgcgacggggcagtacctgacgggcttccggcagcgcacgccccaggtgccggtgacggccgtgctcgacctcggcggcggcacgctctgggtggactgcgacgccgggtacgtgtcctcgtcctacgcgcgcgtgccgtgcgcgtccaagctgtgccgcctcgccaagaccggcgcctgcgccaccagctgcgtcggcaagccatccccggggtgcctcaacgatacctgcggcgggttcccggagaacaccgtcacgcgcgtcagcaccggcgggaacctcatcacggacgtgctgtcggtgtccaccaccttccgcccggggccggggccgctcgccaccgcgccggcgtttctgttcacgtgcggagccacgttcctgaccgagggcctggccgccggcgccaccggcatggcgtcgctcagccgcgcccgcttcgcgctcccgacgcagctcgccgccgccttccgcttctcccgcaagttcgcgctctgcctcacttcgacctccgcggccggggccgtcgtcttcggcgacgcgccctacgcgttccagcccggggtggacctctccaagtcgctcctctacaccccgctgctcgtcaacaacgtgagcaccgccggcgtctccggcgagaaggacaagtcgaacgagtacttcatcggcgtgacggccatcaaggtgaacgggcgcgccgtgccgctgaacgcctcgctgctggtcatcgacaagcagggcggcggcggcaccaagctcagcacggtggcgccctacaccgtgctggagacctccatccacaaggcggtcacggacgcgttcgcggcggagacggccatgatcccccgggtgcgggccgtggcgccgttcaagctctgctacgacgggagcaaggtggggagcacgcgcgtgggcccggccgtgccgaccgtcgagctggtgctgcagagcgaggccgcgtcgtgggtggtgttcggggccaactcgatggtggccgtcaagggcggcgcgctgtgccttggcgtggtggacggcggcgcggccccgcggacgtcggtggtggtcgggggccacatgatggaggacaacctgctggagttcgatctgcagcggtcgcggctcgggttcagctcctccctgctcttccgccagaccacctgcaacaacttccgccttgggtagaaagaaacaaatggcatccggatgggatcgcagaagatgatctgggcgcttgcgtcaagcagactgcaatcgaaatttgtttgtgtgttgtgtttccccttgggttctgttttggctgtttgaataatcaacaggagatcgaacgattgtc

SEQ ID NO: 10537 - protein, 496 aa, Triticum aestivum
  misc_feature (1)..(496): Ceres Seq. ID no. 13596377
HSRRLSASPRHGAFHSSRRFHRHGSPPPPPVGVLVPRGRRQPERRGAGGEEGRRDGAVPDGLPAAHAPGAGDGRARPRRRHALGGLRRRVRVLVLRARAVRVQAVPPRQDRRLRHQLRRQAIPGVPQRYLRRVPGEHRHARQHRREPHHGRAVGVHHLPPGAGAARHRAGVSVHVRSHVPDRGPGRRRHRHGVAQPRPLRAPDAARRRLPLLPQVRALPHFDLRGRGRRLRRRALRVPARGGPLQVAPLHPAARQQREHRRRLRREGQVERVLHRRDGHQGERARRAAERLAAGHRQAGRRRHQAQHGGALHRAGDLHPQGGHGRVRGGDGHDPPGAGRGAVQALLRREQGGEHARGPGRADRRAGAAERGRVVGGVRGQLDGGRQGRRAVPWRGGRRRGPADVGGGRGPHDGGQPAGVRSAAVAARVQLLPALPPDHLQQLPPWVERNKWHPDGIAEDDLGACVKQTAIEICLCVVFPLGFCFGCLNNQQEIERL

SEQ ID NO: 10538 - protein, 446 aa, Triticum aestivum
  misc_feature (1)..(446): Ceres Seq. ID no. 13596378
LTHVASLPALDMARSTRLVASTATALLLLLLSACSCRAAGDSPSAVVLAVRKDGATGQYLTGFRQRTPQVPVTAVLDLGGGTLWVDCDAGYVSSSYARVPCASKLCRLAKTGACATSCVGKPSPGCLNDTCGGFPENTVTRVSTGGNLITDVLSVSTTFRPGPGPLATAPAFLFTCGATFLTEGLAAGATGMASLSRARFALPTQLAAAFRFSRKFALCLTSTSAAGAVVFGDAPYAFQPGVDLSKSLLYTPLLVNNVSTAGVSGEKDKSNEYFIGVTAIKVNGRAVPLNASLLVIDKQGGGGTKLSTVAPYTVLETSIHKAVTDAFAAETAMIPRVRAVAPFKLCYDGSKVGSTRVGPAVPTVELVLQSEAASWVVFGANSMVAVKGGALCLGVVDGGAAPRTSVVVGGHMMEDNLLEFDLQRSRLGFSSSLLFRQTTCNNFRLG

SEQ ID NO: 10539 - protein, 435 aa, Triticum aestivum
  misc_feature (1)..(435): Ceres Seq. ID no. 13596379
MARSTRLVASTATALLLLLLSACSCRAAGDSPSAVVLAVRKDGATGQYLTGFRQRTPQVPVTAVLDLGGGTLWVDCDAGYVSSSYARVPCASKLCRLAKTGACATSCVGKPSPGCLNDTCGGFPENTVTRVSTGGNLITDVLSVSTTFRPGPGPLATAPAFLFTCGATFLTEGLAAGATGMASLSRARFALPTQLAAAFRFSRKFALCLTSTSAAGAVVFGDAPYAFQPGVDLSKSLLYTPLLVNNVSTAGVSGEKDKSNEYFIGVTAIKVNGRAVPLNASLLVIDKQGGGGTKLSTVAPYTVLETSIHKAVTDAFAAETAMIPRVRAVAPFKLCYDGSKVGSTRVGPAVPTVELVLQSEAASWVVFGANSMVAVKGGALCLGVVDGGAAPRTSVVVGGHMMEDNLLEFDLQRSRLGFSSSLLFRQTTCNNFRLG

SEQ ID NO: 10540 - DNA, 504 bp, Triticum aestivum
  misc_feature (1)..(504): Ceres Seq. ID no. 13596388
ctgtgcttgaaccacaagacaagctcgatcacgattcacgcgccgcgcgttgtcagtgcgaagcagctgttgtgcgctctgcagagacgacccatggcctcgagaacagcggcggtgccggaggtggccctgcggtccggcgacgcgaggcccatgccggccatcggcatgggcaccgcccagtccccggtggtgccggacaccaccgtgaaggccgtgctggaggccgtggaggtgggctaccgccacttcgacacggcctccatgtacgcgacggagcggcccctgggcgaggccctcgcggaggcggtgcgccgcgggctcctggcgtcccgggaggaggtgttcgtcacgtccaagctctgttgcacgcagtgccacccgcacctcgtgctcccgtccctccaggagagcctccagaacctgcagatggagtacgtggacctgtatctgatccactggccgatcagcctgaagcccgggcccgtggtgttcccggtgaag

SEQ ID NO: 10541 - protein, 168 aa, Triticum aestivum
  misc_feature (1)..(168): Ceres Seq. ID no. 13596389
LCLNHKTSSITIHAPRVVSAKQLLCALQRRPMASRTAAVPEVALRSGDARPMPAIGMGTAQSPVVPDTTVKAVLEAVEVGYRHFDTASMYATERPLGEALAEAVRRGLLASREEVFVTSKLCCTQCHPHLVLPSLQESLQNLQMEYVDLYLIHWPISLKPGPVVFPVK

SEQ ID NO: 10542 - protein, 167 aa, Triticum aestivum
  misc_feature (1)..(167): Ceres Seq. ID no. 13596390
VLEPQDKLDHDSRAARCQCEAAVVRSAETTHGLENSGGAGGGPAVRRREAHAGHRHGHRPVPGGAGHHREGRAGGRGGGLPPLRHGLHVRDGAAPGRGPRGGGAPRAPGVPGGGVRHVQALLHAVPPAPRAPVPPGEPPEPADGVRGPVSDPLADQPEARARGVPGE

SEQ ID NO: 10543 - protein, 137 aa, Triticum aestivum
  misc_feature (1)..(137): Ceres Seq. ID no. 13596391
MASRTAAVPEVALRSGDARPMPAIGMGTAQSPVVPDTTVKAVLEAVEVGYRHFDTASMYATERPLGEALAEAVRRGLLASREEVFVTSKLCCTQCHPHLVLPSLQESLQNLQMEYVDLYLIHWPISLKPGPVVFPVK

SEQ ID NO: 10544 - DNA, 1321 bp, Triticum aestivum
  misc_feature (1)..(1321): Ceres Seq. ID no. 13596393
tcccccgggctscmggaattcgcaactttattgwgtttamcattacctagaacatcctaatcgaaaaaatatttgctccgcctctcgttctctcccccccccccgtctctctctctagcctctccattccgtgtggcgaccgagcgaaccctagccgagattagactaccatccccaatctaccggaggaggacgaggacgacgccgacgagatgctgagggttgcggggaggaggctctcgtcttccctctcctggcgccccgcggcgaccgtcggagccaggggcccgctcgccggcgccggcggccctgggagagacgacgacgacggttcggcctaccagcggcggttcgccatcgagtcccccttcttcaccgccgcgagaggcttttcttcggctgaaacacttgttccacggaaccaagatgctgggttggctgaactcccagccactgttgctgcactgaagaaccccaactcaaaaatcctttatgaccagtacaaccatgaaagatatcctcctggagatcccagcaagcgtgcctttgcctactttgttctgagtggtgggagattcgtatatgcatcactgctgcgtctccttgtcttgaagtttgtcttgagcatgtcagcaagtaaggatgttcttgcacttgcttcccttgaggttgatctatccagcattgaacccggcagcacagtgactgtcaagtggcgtggaaagccagtcttcatcaggcgacggacagacgatgacatcaagctggccaacagcgtggatgttgcatccctgcgccacccagagcaagacgctgagcgtgtgaagaacccagagtggctggtggttattggtgtctgcactcatcttggttgcattccccttcccaactctggagactttggtggctggttctgcccgtgccatggctcccactatgacatctctggcagaatccgcaagggccctgccccgtacaaccttgaggtgcccacctacagtttcttggaagataacaagatgctcataggctaagagcctaaaaccagtacctaccaacatatattctccacaggagtgaattcctgttgcgctgttattttgttttcaatgtggctaggagtttttgtttcaggactatcgcaacggtgatccactgttacctaccgaagttcatttgcagtgcgaaataattgtttctcctatgttgctactggattgtaagttttgtactgattttctgagaccctattggaaggatattgtacacctcttctggttcttgctccctatatatttgataaataagcaaacattcttcc

SEQ ID NO: 10545 - protein, 273 aa, Triticum aestivum
  misc_feature (1)..(273): Ceres Seq. ID no. 15221859
MLRVAGRRLSSSLSWRPAATVGARGPLAGAGGPGRDDDDGSAYQRRFAIESPFFTAARGFSSAETLVPRNQDAGLAELPATVAALKNPNSKILYDQYNHERYPPGDPSKRAFAYFVLSGGRFVYASLLRLLVLKFVLSMSASKDVLALASLEVDLSSIEPGSTVTVKWRGKPVFIRRRTDDDIKLANSVDVASLRHPEQDAERVKNPEWLVVIGVCTHLGCIPLPNSGDFGGWFCPCHGSHYDISGRIRKGPAPYNLEVPTYSFLEDNKMLIG

SEQ ID NO: 10546 - DNA, 1117 bp, Triticum aestivum
  misc_feature (1)..(1117): Ceres Seq. ID no. 13596416
tctggggtgcaccgtacaattccacgccgcgttttctgcactttccagacagcacggaagcaaaacgatagaggcgtatccactatggcggcaacctactgcgcctaccccgccgccgccgccgccgccgccgcaaaccctaccagacgccgcctgcaaaccctaaccgcgccgggcgccctacctgctgctcggaaacccagccgccaaccccccaccttcctctctttccggctccccaatgcagcgctgccgccgctccgcgtcgctggcgctgacccgcaggttgtaaatggcgaagatttccctcctatgaatgacctaattcgactatacaagaaagcctttctagatggaaacgaagatgttgttagtgacatcgagaaggcaatcactagcatggaggaagagagaagtaaatcagcttctcagtttgaaagtatcacagctgaaatagcttcagggaagaataagtttcttcgcttaaatgctgatctagagaattttcggaagcagactgaaaaggaccgtgcaaagtttacatcgaatatacaagtggaacttgtacagagtctgttgcctctggttgacagctttgagaaaacaaatgtagagatcaccctagagactgagaaagagcagaagattagcgcaagctatcaaggcatatacaagcaattagtagaaacactgaaaaacttaggcgtaggggttgtggaaactgttggcaagccatttgatccagtggttcatgaggctatcgcgcgtgaagaatctacagagttcaaggcaggcatcgtctcacacgaagtccaccgagggttccttctgagggagagggtgctaaggcctgccgcggtgaaggtctctaatggtcctggtgaccaaaacgtgagctccacatcttcggaggagcctgtggaggataccaaagaggatgccgctgtgtgaatccgccagaaacctggcgccaacatttaccaagtcgttgtagctggagcaccattgtttgggagctctcgttgtactgttaatatggagcagagtcatttatgagaatgtacatctatggtgatctgcaactttgcaagtatcctaaagaattttactttggtgc

SEQ ID NO: 10547 - protein, 316 aa, Triticum aestivum
  misc_feature (1)..(316): Ceres Seq. ID no. 13596417
SGVHRTIPRRVFCTFQTARKQNDRGVSTMAATYCAYPAAAAAAAANPTRRRLQTLTAPGALPAARKPSRQPPTFLSFRLPNAALPPLRVAGADPQVVNGEDFPPMNDLIRLYKKAFLDGNEDVVSDIEKAITSMEEERSKSASQFESITAEIASGKNKFLRLNADLENFRKQTEKDRAKFTSNIQVELVQSLLPLVDSFEKTNVEITLETEKEQKISASYQGIYKQLVETLKNLGVGVVETVGKPFDPVVHEAIAREESTEFKAGIVSHEVHRGFLLRERVLRPAAVKVSNGPGDQNVSSTSSEEPVEDTKEDAAV

SEQ ID NO: 10548 - protein, 288 aa, Triticum aestivum
  misc_feature (1)..(288): Ceres Seq. ID no. 13596418
MAATYCAYPAAAAAAAANPTRRRLQTLTAPGALPAARKPSRQPPTFLSFRLPNAALPPLRVAGADPQVVNGEDFPPMNDLIRLYKKAFLDGNEDVVSDIEKAITSMEEERSKSASQFESITAEIASGKNKFLRLNADLENFRKQTEKDRAKFTSNIQVELVQSLLPLVDSFEKTNVEITLETEKEQKISASYQGIYKQLVETLKNLGVGVVETVGKPFDPVVHEAIAREESTEFKAGIVSHEVHRGFLLRERVLRPAAVKVSNGPGDQNVSSTSSEEPVEDTKEDAAV

SEQ ID NO: 10549 - protein, 212 aa, Triticum aestivum
  misc_feature (1)..(212): Ceres Seq. ID no. 13596419
MNDLIRLYKKAFLDGNEDVVSDIEKAITSMEEERSKSASQFESITAEIASGKNKFLRLNADLENFRKQTEKDRAKFTSNIQVELVQSLLPLVDSFEKTNVEITLETEKEQKISASYQGIYKQLVETLKNLGVGVVETVGKPFDPVVHEAIAREESTEFKAGIVSHEVHRGFLLRERVLRPAAVKVSNGPGDQNVSSTSSEEPVEDTKEDAAV

SEQ ID NO: 10550 - DNA, 984 bp, Triticum aestivum
  misc_feature (1)..(984): Ceres Seq. ID no. 13596420
acaccaaccaccacctcctccgaggcacgaagtccaccacgcccccgcccgccccgcagccggccggcgacgatgtgcaccctggagcggcgcggccgggtcttcgtcctcaccctgacgggcgaggaccagcaccggctgggccacccgctcatcgccgccatccgctccgcgctggccgaggtcctggccgcggcccaggcccagccgcagggcccgggggcggccctggtgacggtcgccgagggccgcttcttctccaacgggctcgacatcgggtgggcgggcacctcccgcgcgcggctcggggagctcgtcgacgcgctccgccccgtcgccgccgacctgctggccctccccatgcccaccgtcgccgccgtcacgggccacgcctccgccgccggcttcctcctcgcgctctgccacgactaccgcgtcatgcgcgccgaccgcggcgtgctctacatgagcgaggtcgacatcggcctccccctcccgccctacttcgtgcacgtgctccgcgccaagatctcccaggcgcaggccctgcgggacgtggtgctgcgcgggaagaagctccgggcgcccgaggccagggagatgggcgtcgtcgacgtcgtctgccccggcgcccccgagaccgccgccgaggccctcaagctcgccgagcagctcgccgccaggaagtgggacggcgccgtgtacgcgtcgattaggatgtccatgttccccgatgcgtgcagggccgtcgggatcgccgtggagagcgacgaggagaagagcaggcacttcgcctccaggctctgatcaggacacagattggagagtgtctatgtaacctgaaatctctcttggtattctgcacctgtacattgatcagccatcggtgctctgtatgaagcaagcagtacatacttctgcagacgttgtatctccttgctttgggagcatgaaataaacacaacgcttgtgtacgactgttgg

SEQ ID NO: 10551 - protein, 268 aa, Triticum aestivum
  misc_feature (1)..(268): Ceres Seq. ID no. 13596421
TPTTTSSEARSPPRPRPPRSRPATMCTLERRGRVFVLTLTGEDQHRLGHPLIAAIRSALAEVLAAAQAQPQGPGAALVTVAEGRFFSNGLDIGWAGTSRARLGELVDALRPVAADLLALPMPTVAAVTGHASAAGFLLALCHDYRVMRADRGVLYMSEVDIGLPLPPYFVHVLRAKISQAQALRDVVLRGKKLRAPEAREMGVVDVVCPGAPETAAEALKLAEQLAARKWDGAVYASIRMSMFPDACRAVGIAVESDEEKSRHFASRL

SEQ ID NO: 10552 - protein, 244 aa, Triticum aestivum
  misc_feature (1)..(244): Ceres Seq. ID no. 13596422
MCTLERRGRVFVLTLTGEDQHRLGHPLIAAIRSALAEVLAAAQAQPQGPGAALVTVAEGRFFSNGLDIGWAGTSRARLGELVDALRPVAADLLALPMPTVAAVTGHASAAGFLLALCHDYRVMRADRGVLYMSEVDIGLPLPPYFVHVLRAKISQAQALRDVVLRGKKLRAPEAREMGVVDVVCPGAPETAAEALKLAEQLAARKWDGAVYASIRMSMFPDACRAVGIAVESDEEKSRHFASRL

SEQ ID NO: 10553 - protein, 237 aa, Triticum aestivum
  misc_feature (1)..(237): Ceres Seq. ID no. 13596423
TNHHLLRGTKSTTPPPAPQPAGDDVHPGAARPGLRPHPDGRGPAPAGPPAHRRHPLRAGRGPGRGPGPAAGPGGGPGDGRRGPLLLQRARHRVGGHLPRAARGARRRAPPRRRRPAGPPHAHRRRRHGPRLRRRLPPRALPRLPRHARRPRRALHERGRHRPPPPALLRARAPRQDLPGAGPAGRGAAREEAPGARGQGDGRRRRRLPRRPRDRRRGPQARRAARRQEVGRRRVRVD

SEQ ID NO: 10554 - DNA, 532 bp, Triticum aestivum
  misc_feature (1)..(532): Ceres Seq. ID no. 13596434
agcaagcagctgatccgagttaaccattagccaaaagtaatcttgcttttccatttcccgagagagctcagttcgtgtctgcactccagtccagtgtttgtttgagcagcagccatggcctccaaccaggacaaggcaagctaccgcgccggcgaggccaaggcccacaccgaggagaaggccggacaggtgaccggcgcggccaaggacgaggcgtgcgacgccaaggaccgggcgtcgggcgcggcggggcaagcgacggggaaggggcagggcgccgtggaggccacgaagcagaaggccggcgaggcggggcagaagacgtccgagacggcgcaggccggcaaggaccgggccgccgagggcaaggaccggaccggcagctacctcggccacgcgaccgaggggaccaagcagaaggcctccgaggcgacggggtacacgcaggacagggcttccgacgcggcgcagtacaccaaggactccgccgtcgccggcaaggacaagaccggcagcgtcctcagccaggccc

SEQ ID NO: 10555 - protein, 139 aa, Triticum aestivum
  misc_feature (1)..(139): Ceres Seq. ID no. 13596435
MASNQDKASYRAGEAKAHTEEKAGQVTGAAKDEACDAKDRASGAAGQATGKGQGAVEATKQKAGEAGQKTSETAQAGKDRAAEGKDRTGSYLGHATEGTKQKASEATGYTQDRASDAAQYTKDSAVAGKDKTGSVLSQA

SEQ ID NO: 10556 - DNA, 1259 bp, Triticum aestivum
  misc_feature (1)..(1259): Ceres Seq. ID no. 13596450
aacgagctctccccgtcccggccccgctccccgccacgccaagtcgacggccgctcgccgccgcccctccctccgcctcgccgtcgccgacctcggccgttcggcccctcccgcgggtgggtgagcggcgagcctcccttgcttctctgtcctgccctgcacggcaagcaagacgagagcgatcggcgtcgggatgctgaggcggcggctgagctcccttctcctccgatccccgtgctcctccgccgtcgcctcctcaatccagcagcagcaccacctcatcctccccacccacgccgagaaaccgccggccctgaatctgctcaggctcttcacatccctagctggaaccgatggtgacaggccgttcatcgcttttgtcttagggggacctgggagtgggaaaggaacgcaatgtagtaggatcgcttcggattttggattttctcatgtgagtgctggtgaccttctgcggaatgaaatatctgctggcactgatcaaggggagtggatcctggagataataagggaagggaggattgttccatcagagataaccgttgaactggtcagaaaagcaattgaatcaagcactgctaaacgggttcttatcgatggttttccaaggtgtgaggaaaacagaatcgcctttgaaaaaataactggaactgaaccagaccttgtgcttttttttgactgtcctgaggatgagatggttaaacgtctcctaagccgtaaccagggacgagttgatgataacattgagacaatcaagaagcgtctaaaagtgttcgagagtttgaatcttcctgttgttgagtactactcttcaaggggaaaggcacacaagataaacgcaacgggaactgaagatgaaatctttgaagcagttcgcaagttgttttcctccttaaggctatgaggaggctgtcgtcgtcttccgcaggagcctgagggaattagaattgcgcctggcggaaatactcttttctttccttttacttttacatctcttagcacaataattgtacatattctgatacacggtctatgcctgtgaaaacagagggccactggtgaaacgcccagcctgctatgataaacccttaccctcacgctctcgtcgtgcgccacggtataacccatgacacgctggtatggcagcagcaaaactgctacgacgatatttttcttaccagaatatgatataattgtaraaaaaaaaaraaaaaagctctatcgataccgtcgacctcgag

SEQ ID NO: 10557 - protein, 242 aa, Triticum aestivum
  misc_feature (1)..(242): Ceres Seq. ID no. 15221881
MLRRRLSSLLLRSPCSSAVASSIQQQHHLILPTHAEKPPALNLLRLFTSLAGTDGDRPFIAFVLGGPGSGKGTQCSRIASDFGFSHVSAGDLLRNEISAGTDQGEWILEIIREGRIVPSEITVELVRKAIESSTAKRVLIDGFPRCEENRIAFEKITGTEPDLVLFFDCPEDEMVKRLLSRNQGRVDDNIETIKKRLKVFESLNLPVVEYYSSRGKAHKINATGTEDEIFEAVRKLFSSLRL

SEQ ID NO: 10558 - DNA, 1570 bp, Triticum aestivum
  misc_feature (1)..(1570): Ceres Seq. ID no. 13596470
ttacctagaacatcctaatctaaaaatggaaagcacgcaccggaagcatcttagaagaagaagagccagcaacaaggaacgatatccgtctgtgttggacgcgccaagacgatcgaggcatgcctgctgccgtctctgggtgcctcttggcgaggagcatggcgagccaccacaaacaccagcagcggggagcggcggcgacggcgccgggggcactgccggtgatcaacattggccggctcggcgacaaggaccccgccgcgcgggcgctcgtggtccaggacatcgcccgggcgtgccgcgaccgggggtgcttccaggtggtaaaccacggcgtcagcaagtcggccatggacggcgccctggaggccgcctcggagttcttcgacatgcccgcggagcgcaaggcggcgttcgcctgcgccgacatccgcagcccggtccggtacgacaccagctccaaggacggcatcagcaaggccaggtctttcctcaagcactacgccaatcccctcgaccactgggtcgactcctggccaacccaaccagcaacatacaggaagaagatggggacgtacgcggtggagatacataaactgtcaatgcagctcacaggggccatcgtgcaggggctggggctatgcccaatgcacctgcaggagaagctcggagcagggatgcagttcatggggctcaacaactacccgcaggggtcgtcccgggcgggcgacacggtcgggctggcgccgcactccgacattggcttcatcaccatcctgctgcagagctcgccggggctcgaggtgacgcaccacgacgacggcggcgtctggacgcccgtcccggccatcccgggggcgctccacgtcgacctcggcgaccacctggaggtgctgagcaacgggcggctcaggtccctcctgcaccgggccatcctcaacaccgacgaggcgaggatctccatcgccagcatccacggcgcggccatggacgagaaggtcgggtgcgccgaggagctcgtcgacgagcgccacccgaggatgtacagggagagcagcttccatgacttcctcgacttcctgcccaccaacgtcaaggcgtaccggaggttcgtcgagaccctcaagatcgacagcgcttaattccttctgctgcattaagacacacttagctgaatgagacactgcacataagtgtccatttagttgtgtagtcttactgctagctgaagaacaaaattacggtttaattatgcctccattatcaagtagtatctcagtacgaataagggagtatggtatcagcagctggataggcgtgtgattagcagggtgccttttttttcactccatttctttctttggggaaatgcagtatgtctgcatgtctcttccatcaaaaggaggatcaaaggaaccttgccaagttcttccggttctttggtagtacctacatacaccatgtgttgatcagtgcagtcctatatgtgtatcagttgatttcacctatagaaatttactttctcatgggatatattgcgcaacgatatattaaatacaatttactgttt

SEQ ID NO: 10559 - protein, 340 aa, Triticum aestivum
  misc_feature (1)..(340): Ceres Seq. ID no. 13596471
MPAAVSGCLLARSMASHHKHQQRGAAATAPGALPVINIGRLGDKDPAARALVVQDIARACRDRGCFQVVNHGVSKSAMDGALEAASEFFDMPAERKAAFACADIRSPVRYDTSSKDGISKARSFLKHYANPLDHWVDSWPTQPATYRKKMGTYAVEIHKLSMQLTGAIVQGLGLCPMHLQEKLGAGMQFMGLNNYPQGSSRAGDTVGLAPHSDIGFITILLQSSPGLEVTHHDDGGVWTPVPAIPGALHVDLGDHLEVLSNGRLRSLLHRAILNTDEARISIASIHGAAMDEKVGCAEELVDERHPRMYRESSFHDFLDFLPTNVKAYRRFVETLKIDSA

SEQ ID NO: 10560 - protein, 327 aa, Triticum aestivum
  misc_feature (1)..(327): Ceres Seq. ID no. 13596472
MASHHKHQQRGAAATAPGALPVINIGRLGDKDPAARALVVQDIARACRDRGCFQVVNHGVSKSAMDGALEAASEFFDMPAERKAAFACADIRSPVRYDTSSKDGISKARSFLKHYANPLDHWVDSWPTQPATYRKKMGTYAVEIHKLSMQLTGAIVQGLGLCPMHLQEKLGAGMQFMGLNNYPQGSSRAGDTVGLAPHSDIGFITILLQSSPGLEVTHHDDGGVWTPVPAIPGALHVDLGDHLEVLSNGRLRSLLHRAILNTDEARISIASIHGAAMDEKVGCAEELVDERHPRMYRESSFHDFLDFLPTNVKAYRRFVETLKIDSA

SEQ ID NO: 10561 - protein, 263 aa, Triticum aestivum
  misc_feature (1)..(263): Ceres Seq. ID no. 13596473
MDGALEAASEFFDMPAERKAAFACADIRSPVRYDTSSKDGISKARSFLKHYANPLDHWVDSWPTQPATYRKKMGTYAVEIHKLSMQLTGAIVQGLGLCPMHLQEKLGAGMQFMGLNNYPQGSSRAGDTVGLAPHSDIGFITILLQSSPGLEVTHHDDGGVWTPVPAIPGALHVDLGDHLEVLSNGRLRSLLHRAILNTDEARISIASIHGAAMDEKVGCAEELVDERHPRMYRESSFHDFLDFLPTNVKAYRRFVETLKIDSA

SEQ ID NO: 10562 - DNA, 1304 bp, Triticum aestivum
  misc_feature (1)..(1304): Ceres Seq. ID no. 13596474
atcaatcatctcgtgccattccccaaaagcaagctagacccttgcaatggcggcgtccttcaccaccagctggcgttgcgcattcctcgcgctactggcccttttcgtctccggcgcctacgggcagctcagcccgacgttctacgcgtcgacctgcccgaacctaacgaccatcgtgcgcgacgccatggtcacggccttgaacccggcagtcggcggcgagcgcaggatgggcgcttccctgctcaggctccacttccacgactgcttcgttgagggatgcgacggatcggtcctcctggacaacgtgcctgctaatgggagcactccggctttctttggcgagaagaacgccttcgggaacatcaactccgtccgcggcttcgaggtcatcgacacgatcaaggccgcagtggagcaagcctgccctggcgtcgtctcctgtgccgacatcctcaccctcgccgcacgggacggcacctttctgctcggcgggccgacctgggcagtgccgctcggccggcgcgactcgacgacggcgagcatggacctggcgaacagggacctcccgccgccgttcgctaacctcgtcactaatcctcctgacggcagcgacctcatcgcgaggttccaaaggaagggcctgagcgcgaccgagatgaccgtgctctccggcgcgcacaccatcggctccgcgcagtgccagaattaccggctccgcctctacaacgaaaaccgcatcgattttcagtttgcccagggtctcaaggccaactgcccccaaaatggccccgccggcgacaccttcctggcgccgttggactcgacggggtccaccttcgacaataagtactacacggatctcaccgggttgcgcggcctcctccactccgaccaggtgctgtacccccagaacaaccagacgcaggctaagatagtgctcaagtacaagggagacaacaccgccttctttgccgatttcgcggccgcgatgataaagatggggaacctcagcccgctcaccggaaccgccggccaaatcaggaccaactgtaggttggtcaacccggcctgatcatacggtctggcatatataccactgttaattaccgcgtaaccaaagataaataaatgcaacctctgtgataatctttcacctttgtaataactatactatgttgtgctacatactggcttactggttaaattattaatcgttccaattgactattgagctccaaatcatgtatatgtgtgtatcctttgtaaacaatattattatcaacgacaacaagaagatcctc

SEQ ID NO: 10563 - protein, 342 aa, Triticum aestivum
  misc_feature (1)..(342): Ceres Seq. ID no. 15221887
MAASFTTSWRCAFLALLALFVSGAYGQLSPTFYASTCPNLTTIVRDAMVTALNPAVGGERRMGASLLRLHFHDCFVEGCDGSVLLDNVPANGSTPAFFGEKNAFGNINSVRGFEVIDTIKAAVEQACPGVVSCADILTLAARDGTFLLGGPTWAVPLGRRDSTTASMDLANRDLPPPFANLVTNPPDGSDLIARFQRKGLSATEMTVLSGAHTIGSAQCQNYRLRLYNENRIDFQFAQGLKANCPQNGPAGDTFLAPLDSTGSTFDNKYYTDLTGLRGLLHSDQVLYPQNNQTQAKIVLKYKGDNTAFFADFAAAMIKMGNLSPLTGTAGQIRTNCRLVNPA

SEQ ID NO: 10564 - protein, 295 aa, Triticum aestivum
  misc_feature (1)..(295): Ceres Seq. ID no. 15221888
MVTALNPAVGGERRMGASLLRLHFHDCFVEGCDGSVLLDNVPANGSTPAFFGEKNAFGNINSVRGFEVIDTIKAAVEQACPGVVSCADILTLAARDGTFLLGGPTWAVPLGRRDSTTASMDLANRDLPPPFANLVTNPPDGSDLIARFQRKGLSATEMTVLSGAHTIGSAQCQNYRLRLYNENRIDFQFAQGLKANCPQNGPAGDTFLAPLDSTGSTFDNKYYTDLTGLRGLLHSDQVLYPQNNQTQAKIVLKYKGDNTAFFADFAAAMIKMGNLSPLTGTAGQIRTNCRLVNPA

SEQ ID NO: 10565 - protein, 281 aa, Triticum aestivum
  misc_feature (1)..(281): Ceres Seq. ID no. 15221889
MGASLLRLHFHDCFVEGCDGSVLLDNVPANGSTPAFFGEKNAFGNINSVRGFEVIDTIKAAVEQACPGVVSCADILTLAARDGTFLLGGPTWAVPLGRRDSTTASMDLANRDLPPPFANLVTNPPDGSDLIARFQRKGLSATEMTVLSGAHTIGSAQCQNYRLRLYNENRIDFQFAQGLKANCPQNGPAGDTFLAPLDSTGSTFDNKYYTDLTGLRGLLHSDQVLYPQNNQTQAKIVLKYKGDNTAFFADFAAAMIKMGNLSPLTGTAGQIRTNCRLVNPA

SEQ ID NO: 10566 - DNA, 1109 bp, Triticum aestivum
  misc_feature (1)..(1109): Ceres Seq. ID no. 13596484
aaatgctcgtactctctctcccatctcccgcccggctgcttaaaagcccattatcggcgccgcctgtgacctcacctcactccgcctcgcagtcataattctccctagcatctttcttaccactagtattagtaggaggacctcctcctgttgctgctggagtggttgcttgtgtggtagagaggagaggagagggagatggaaggaggaggcgcggacggggtgacgagggtgctgctggtggacgactccccggtggacaggaaggtggtggaactggtgctcggcagcaacaccttcgccggctccttccacgtcgtcgccgtggacagcgccaagaaggccatggagttcctggggctcaaggacggcaaggagcaggccgtcgacatggtgctcactgactactgcatgcctgagatgaccggctacgacctcctcaaagccatcaaggcgatgagtcctctcaagcccatcccggtgatcgtcatgtcgtcggagaacgagccccagaggatcagcagatgcctcaaggctggtgctgaagattacatcgtcaagcctcttcagagcaaggatgtgccgcgtctgaggagctgctcgaacgtgaaacccaaggaccctccatgcagcactgtgagcaagagctcggaccatatagctgctgtcgatggcaagtcgtcgctgcgacggcgagcacacctcaccgatattgccatggttctccactcgtcgagcgccgggctctcgcactacttcccgttcctcttcaagttcatcctgctggtctacgccatcctgtgcgtcggcgagctcctgcacagatggtccaacggctgcttcctctcctacctgaggtgatggtgccgcggtccagtgacatgctgcagctctgcaaggagtagctcgtgtgtcgtagcttatgagtgagcagtgaacctccatgtttcaacaaccatggatggagctttaggtagtagattcgtttgctttgagattctctgaccgggcgtcagttcttggccttgttgggctgacgagttgaggaagaaccccttgtatccatccttgtacaaaacgcacaatgaggcaggcggtatctgatgtcc

SEQ ID NO: 10567 - protein, 220 aa, Triticum aestivum
  misc_feature (1)..(220): Ceres Seq. ID no. 13596485
MEGGGADGVTRVLLVDDSPVDRKVVELVLGSNTFAGSFHVVAVDSAKKAMEFLGLKDGKEQAVDMVLTDYCMPEMTGYDLLKAIKAMSPLKPIPVIVMSSENEPQRISRCLKAGAEDYIVKPLQSKDVPRLRSCSNVKPKDPPCSTVSKSSDHIAAVDGKSSLRRRAHLTDIAMVLHSSSAGLSHYFPFLFKFILLVYAILCVGELLHRWSNGCFLSYLR

SEQ ID NO: 10568 - protein, 171 aa, Triticum aestivum
  misc_feature (1)..(171): Ceres Seq. ID no. 13596486
MEFLGLKDGKEQAVDMVLTDYCMPEMTGYDLLKAIKAMSPLKPIPVIVMSSENEPQRISRCLKAGAEDYIVKPLQSKDVPRLRSCSNVKPKDPPCSTVSKSSDHIAAVDGKSSLRRRAHLTDIAMVLHSSSAGLSHYFPFLFKFILLVYAILCVGELLHRWSNGCFLSYLR

SEQ ID NO: 10569 - protein, 156 aa, Triticum aestivum
  misc_feature (1)..(156): Ceres Seq. ID no. 13596487
MVLTDYCMPEMTGYDLLKAIKAMSPLKPIPVIVMSSENEPQRISRCLKAGAEDYIVKPLQSKDVPRLRSCSNVKPKDPPCSTVSKSSDHIAAVDGKSSLRRRAHLTDIAMVLHSSSAGLSHYFPFLFKFILLVYAILCVGELLHRWSNGCFLSYLR

SEQ ID NO: 10570 - DNA, 1353 bp, Triticum aestivum
  misc_feature (1)..(1353): Ceres Seq. ID no. 13596492
attcgaaaaccttcctcgcgaaaccccagccccgctcctccgctccaccccccacctcccctggtccctcgcgagagcaggtccgggtcgcgtctccggcggcggagaagcaagacaagggcggcggagatgtcggtcagcaacatagggatgatggacggcgcctacttcgtggggcggaacgagatcctcgcctggatcaacactaccctgcagctcggcctcgccaaggtcgaggaggcggcgtcgggcgcggtggcgtcccagctcatggacgcggcgcaccccggggcggtgcccatgcacaaggtcaacttcgacgccaagaacgagtacgacatgatccagaactacaaggtcctgcaggatgtgttcaacaagctgaagatcaccaagcacattgaggttaataagctcatcaaaggaaggcccctagacaacctggagttcatgcagtggatgaaaagatactgtgattctgttaatggtggattcatgaccagctacaatgcttccgagagaagagaaagcagcaagggtgggaaagacaccaacagaaggacatcagggacttcccaggcgcctgccaagtctgcatccgccacccacaaagctcagcctccgtcgcacgcagctaagcgggccaacgggcatgcttcaaatgctccacagcggtgcgcaaagccgcctccagcttatgatgcacagatgaccgagctgaaactccttgttgatagcgccgagaaagagagagatttctatttctctaagctgcgggacgttgagatcttgtgccagagccccgaggttgagcatttaccgattgcgaaggctatccagaagatactctatgcttcggaggacgacccctcgacggtggcggaagcccaggcagagatggtggcgcagcagaaccagatgcagcagcagccaatgctgagccccatcctggaggcgtccgaggccccaagcatcacccccaaggattcttccgaggagagcttgaggcaggaagcagcggcagcacacaagaggaagagcatctcggacctggaggagttcgagatggggtcgagctccaggatgaggctctcagacgtctcggacgtgcagctgtgcggctcaccgttgatgagcttcacctgaaagaaaggagggaccgaattgcaggggctgagttgatgtcattgccggttatgacttgtgggtttatcttgtgttgtttcgtttgttgtttggtgtcataatgtgtgtgctcttgtggagctggagttgaacctgcctttgactgtgatcgatctgccacagcatttgtggccttctgcaacatgttattattgaatagcctctttt

SEQ ID NO: 10571 - protein, 381 aa, Triticum aestivum
  misc_feature (1)..(381): Ceres Seq. ID no. 13596493
IRKPSSRNPSPAPPLHPPPPLVPRESRSGSRLRRRRSKTRAAEMSVSNIGMMDGAYFVGRNEILAWINTTLQLGLAKVEEAASGAVASQLMDAAHPGAVPMHKVNFDAKNEYDMIQNYKVLQDVFNKLKITKHIEVNKLIKGRPLDNLEFMQWMKRYCDSVNGGFMTSYNASERRESSKGGKDTNRRTSGTSQAPAKSASATHKAQPPSHAAKRANGHASNAPQRCAKPPPAYDAQMTELKLLVDSAEKERDFYFSKLRDVEILCQSPEVEHLPIAKAIQKILYASEDDPSTVAEAQAEMVAQQNQMQQQPMLSPILEASEAPSITPKDSSEESLRQEAAAAHKRKSISDLEEFEMGSSSRMRLSDVSDVQLCGSPLMSFT

SEQ ID NO: 10572 - protein, 338 aa, Triticum aestivum
  misc_feature (1)..(338): Ceres Seq. ID no. 13596494
MSVSNIGMMDGAYFVGRNEILAWINTTLQLGLAKVEEAASGAVASQLMDAAHPGAVPMHKVNFDAKNEYDMIQNYKVLQDVFNKLKITKHIEVNKLIKGRPLDNLEFMQWMKRYCDSVNGGFMTSYNASERRESSKGGKDTNRRTSGTSQAPAKSASATHKAQPPSHAAKRANGHASNAPQRCAKPPPAYDAQMTELKLLVDSAEKERDFYFSKLRDVEILCQSPEVEHLPIAKAIQKILYASEDDPSTVAEAQAEMVAQQNQMQQQPMLSPILEASEAPSITPKDSSEESLRQEAAAAHKRKSISDLEEFEMGSSSRMRLSDVSDVQLCGSPLMSFT

SEQ ID NO: 10573 - protein, 331 aa, Triticum aestivum
  misc_feature (1)..(331): Ceres Seq. ID no. 13596495
MMDGAYFVGRNEILAWINTTLQLGLAKVEEAASGAVASQLMDAAHPGAVPMHKVNFDAKNEYDMIQNYKVLQDVFNKLKITKHIEVNKLIKGRPLDNLEFMQWMKRYCDSVNGGFMTSYNASERRESSKGGKDTNRRTSGTSQAPAKSASATHKAQPPSHAAKRANGHASNAPQRCAKPPPAYDAQMTELKLLVDSAEKERDFYFSKLRDVEILCQSPEVEHLPIAKAIQKILYASEDDPSTVAEAQAEMVAQQNQMQQQPMLSPILEASEAPSITPKDSSEESLRQEAAAAHKRKSISDLEEFEMGSSSRMRLSDVSDVQLCGSPLMSFT

SEQ ID NO: 10574 - DNA, 1389 bp, Triticum aestivum
  misc_feature (1)..(1389): Ceres Seq. ID no. 13596496
atcccacacgccccacccctattccgccgcctcccttctctcttctcctcactccctctcgccgcagagaagatggcgtccgacggcagcggcgttgtcacggtgtacggcagcggcaacaacggcgccggtacgcagctggagcccaagtcgtccccgttctctgtcaaggtgggcctggcccagatgctccgcggcggcgtcatcatggacgtcgtcaacgccgagcaggcgcgcatcgccgaggaggccggcgcctgcgccgtcatggcgctcgagcgcgtccccgccgacatccgcgcccagggcggcgtcgcccgcatgtccgacccgggcctcatccgcgaaatcaagcgcgccgtcaccatccctgtcatggccaaggcccgcatcgggcacttcgtcgaggcccagatcctcgagtccatcggcgtcgactacgtggacgagagcgaggtcctcacgctcgccgacgacgcccaccacatcaacaagcacaacttccgcgtccccttcgtctgcggctgccgcaacctgggcgaggccctccgccgcatccgcgagggcgccgccatgatccgcaccaagggcgaggccggcaccggcaatgtcatcgaggccgtccgccacgtccgctccgtcatgggcgacgtgcgtgccctccgcagcatggacgacgacgaggtattcacctatgccaagagcatcgccgcaccgtacgacctcgtcatgcagaccaagcagctcggccgcctgcccgtcgtccagttcgccgccggcggggtcgccacgccggccgatgcggccctcatgatgcagctcggctgcgacggtgtcttcgtcggctccggtgtcttcaagagcggcgaccccgcgcgccgcgcgcgcgccatcgtgcaggccgtcacccactacagcgaccctaatgtgctcgccgaggtgagctgcgacctcggtgaggccatggtgggcatcaacctctccgatcccaaggtcgagcgctttgcggcgcgctccgagtgatctttgttggccaccgtcaataccagctcccaaaataatactccatggatcaatgataaggacaaaaaagaagtacttagaaacgattcctagttattatcatgtgatttcttcatgatgatcattctagctccgataacaattcaagcggtagcaagcatgcacctccagtcagtcagtcggtcagtcgctcgctttatatatgtacacacatgttgtcgtcttccatttcatttctgttgttgttaacacaagttaagtatccatccatccttttcctccgtgttctcttgctactatgcattttgctgtttcagattcgttgttgtttctctgatcgattttgctactgttgttgccaattgc

SEQ ID NO: 10575 - protein, 340 aa, Triticum aestivum
  misc_feature (1)..(340): Ceres Seq. ID no. 15221893
IPHAPPLFRRLPSLFSSLPLAAEKMASDGSGVVTVYGSGNNGAGTQLEPKSSPFSVKVGLAQMLRGGVIMDVVNAEQARIAEEAGACAVMALERVPADIRAQGGVARMSDPGLIREIKRAVTIPVMAKARIGHFVEAQILESIGVDYVDESEVLTLADDAHHINKHNFRVPFVCGCRNLGEALRRIREGAAMIRTKGEAGTGNVIEAVRHVRSVMGDVRALRSMDDDEVFTYAKSIAAPYDLVMQTKQLGRLPVVQFAAGGVATPADAALMMQLGCDGVFVGSGVFKSGDPARRARAIVQAVTHYSDPNVLAEVSCDLGEAMVGINLSDPKVERFAARSE

SEQ ID NO: 10576 - protein, 316 aa, Triticum aestivum
  misc_feature (1)..(316): Ceres Seq. ID no. 15221894
MASDGSGVVTVYGSGNNGAGTQLEPKSSPFSVKVGLAQMLRGGVIMDVVNAEQARIAEEAGACAVMALERVPADIRAQGGVARMSDPGLIREIKRAVTIPVMAKARIGHFVEAQILESIGVDYVDESEVLTLADDAHHINKHNFRVPFVCGCRNLGEALRRIREGAAMIRTKGEAGTGNVIEAVRHVRSVMGDVRALRSMDDDEVFTYAKSIAAPYDLVMQTKQLGRLPVVQFAAGGVATPADAALMMQLGCDGVFVGSGVFKSGDPARRARAIVQAVTHYSDPNVLAEVSCDLGEAMVGINLSDPKVERFAARSE

SEQ ID NO: 10577 - protein, 307 aa, Triticum aestivum
  misc_feature (1)..(307): Ceres Seq. ID no. 15221895
PTRPTPIPPPPFSLLLTPSRRREDGVRRQRRCHGVRQRQQRRRYAAGAQVVPVLCQGGPGPDAPRRRHHGRRQRRAGAHRRGGRRLRRHGARARPRRHPRPGRRRPHVRPGPHPRNQARRHHPCHGQGPHRALRRGPDPRVHRRRLRGRERGPHARRRRPPHQQAQLPRPLRLRLPQPGRGPPPHPRGRRHDPHQGRGRHRQCHRGRPPRPLRHGRRACPPQHGRRRGIHLCQEHRRTVRPRHADQAARPPARRPVRRRRGRHAGRCGPHDAARLRRCLRRLRCLQERRPRAPRARHRAGRHPLQRP

SEQ ID NO: 10578 - DNA, 735 bp, Triticum aestivum
  misc_feature (1)..(735): Ceres Seq. ID no. 13596500
aaacccatccgctccacgccaaactgtacaaagcgcgcggtggccggacaagaaagaagctcaccgagaaaccacaccaccgtccaccgagcacacaagcaagcaagcaagcgggcaggagaggagaggagacggcggtgcgcggcggcggccagcagcacgaacaagccgggtgcgacgatggctgcggcggcggggagcggcggcgtggtgaagcacctcgtcatcgtgcagttcaaggaggacgtgaccccggagcggctggccgggctcatccgcggctacgccggcctcgtcgacaaggtcccctccatgaaggccttccactggggaaccgatgtgagcatagagaacatgcatcaggggttcacacacgtcttcgagtccacctttgaaagcacagagggagtcaaggagtacgtttaccacccagcacacgtcgagtttgcaactgatttcttgggttcaacggagaaagtcctcataatcgacttcaagccggcagcggtcaactaatggcttcggccaagtgagacgccgaggacttctgttgccgcctgccttatcggtgctgcttctgtgtgtttgtgtttgaattgcatctggtattcacaagctatgtaccttgtgctaaataaatctgttcgacctgttgtatctgttgagaatgaacgctggatttggtgtaactgtgttctgacattttgtagcacttaataatcagtattatgtgtg

SEQ ID NO: 10579 - protein, 171 aa, Triticum aestivum
  misc_feature (1)..(171): Ceres Seq. ID no. 15221896
KPIRSTPNCTKRAVAGQERSSPRNHTTVHRAHKQASKRAGEERRRRCAAAASSTNKPGATMAAAAGSGGVVKHLVIVQFKEDVTPERLAGLIRGYAGLVDKVPSMKAFHWGTDVSIENMHQGFTHVFESTFESTEGVKEYVYHPAHVEFATDFLGSTEKVLIIDFKPAAVN

SEQ ID NO: 10580 - protein, 130 aa, Triticum aestivum
  misc_feature (1)..(130): Ceres Seq. ID no. 15221897
THPLHAKLYKARGGRTRKKLTEKPHHRPPSTQASKQAGRRGEETAVRGGGQQHEQAGCDDGCGGGERRRGEAPRHRAVQGGRDPGAAGRAHPRLRRPRRQGPLHEGLPLGNRCEHREHASGVHTRLRVHL

SEQ ID NO: 10581 - protein, 111 aa, Triticum aestivum
  misc_feature (1)..(111): Ceres Seq. ID no. 15221898
MAAAAGSGGVVKHLVIVQFKEDVTPERLAGLIRGYAGLVDKVPSMKAFHWGTDVSIENMHQGFTHVFESTFESTEGVKEYVYHPAHVEFATDFLGSTEKVLIIDFKPAAVN

SEQ ID NO: 10582 - DNA, 577 bp, Triticum aestivum
  misc_feature (1)..(577): Ceres Seq. ID no. 13596508
cctaatcgaaaaaggaagaaaaaacgtttcttttctcggctagggtttgcctctgcctctgtctcccggcggccggcggcgaacggactcagacgatgtcgaagaagaacagcctctccaagcggaagaagcagcacgagttcgacctccagagggagaagaaggccaaggaggagcaggccaagaagctgcaggccaagaagtccaagatgaagattgatggaagcgagaagaagaagaagggcaacagcttcaaggtcggcaagaagaaggtgaagacaaagctctccgccctgggaaaagccaaggccgcgcaagccatggagctcgacaactgactgattcccatggcctaaaactgctgcaccaatgccactcgttttgtcgtaatcgtcgtagaaatgaagttcatttgctctggccaggtgcatgtagtcgagcggcgttaatagataaggattttggtacttatccagtcagatcttgcggttcctgatcgtgcattatccagtatccacccctggaaacatttctgcttcaaatgccaagatcatatcttcttgcctaaaaagctatc

SEQ ID NO: 10583 - protein, 80 aa, Triticum aestivum
  misc_feature (1)..(80): Ceres Seq. ID no. 15221899
MSKKNSLSKRKKQHEFDLQREKKAKEEQAKKLQAKKSKMKIDGSEKKKKGNSFKVGKKKVKTKLSALGKAKAAQAMELDN

SEQ ID NO: 10584 - protein, 70 aa, Triticum aestivum
  misc_feature (1)..(70): Ceres Seq. ID no. 15221900
PNRKRKKKRFFSRLGFASASVSRRPAANGLRRCRRRTASPSGRSSTSSTSRGRRRPRRSRPRSCRPRSPR

SEQ ID NO: 10585 - protein, 42 aa, Triticum aestivum
  misc_feature (1)..(42): Ceres Seq. ID no. 15221901
MKIDGSEKKKKGNSFKVGKKKVKTKLSALGKAKAAQAMELDN

SEQ ID NO: 10586 - DNA, 1577 bp, Triticum aestivum
  misc_feature (1)..(1577): Ceres Seq. ID no. 13596512
ccttccccttctcctctccaactgctagatctagagtagccccgttaaagcccaaacaaaaaccccgccgcgagatctgcgcatctcgccacaccaccaccacgacggccatggcggcgccgcgcgtcctcctcctcctcgccgccgcggccatcctcgccgtcgcctccctcggggacgcttcgggcgagggcccccgcgggcgcaagctgctggtgctcgtcgacgatctggccgtccgctcatcccactcggccttcttcggctcgcttcaggcccgcgggctagatctggagttccgcctcgccgacgaccccaagctctcgctccaccgctacggtcagtacctctacgacggcctcgtcctcttcgccccatcgaccccgcgtttcggcggatcggtggaccagaatgctgttctggagtttatcgatgctgggcacgatatgattctggcagcagatcattcggcttcagatctgatccgcggcatcgcgacggagtgtggggttgactttgatgaggacccggaagcaatggttattgaccacatcaattatgcctccagtgaggttgaaggtgaccacaccttgattgctggcgatgacctgattcagtcagatgtgatattgggatccaaaaagattgaggctcctgttctgttccgagggattgcgcatgcggctaatccatccaacagcttggttttaaaggttctatctgcctcgccatcagcgtattcagcaaacccggaggctaagctggcatccgttccatctctcacagggtcggccatatcactggtttctgttatgcaggctaggaataatgctcgtgtgttaatatctggatcactggatttgtttagcaacaggttcctaaagtctggtgtgcagaaggctggcagcaaaatgagccatgacaaagctggaaatgaacaatttgtgacagagacgagcaaatgggtcttccatgagaggggtcatctgaaggcagtgaatgtgatgcaccataaggttggggagacaaatgagcctagcatgtaccgcatcaatgatgacttggaatactcagttgagatatatgaatggtctggtacaagttggaagccatatgttgctgatgatgttcagattcagtttttcatgatgagcccttatgttctgaaaaatatgtcaactgacaaatcggctgtatattcagcatccttcaaagttccagatgtttatggagttttccagttcaaggttgagtaccaaaggcttggatacactggcctctctcttgcaaagcagattccagtccgtccatacaggcatgacgagtatgagaggttcataacttcagcgtttccatactatgctgcctcattttcaacaatgggagccttcttcatattctcagttgcgtacctgtatcacaaatagatagctcatcaagtagtggaagtaaatcaaggcggtgatggaattgtgatgtcataagcatggtgatcttaggtgcaattttatggaaccatctttttgtagcgccaatctgtagtacctttatttttaagaaatgggcttctccctgcc

SEQ ID NO: 10587 - protein, 474 aa, Triticum aestivum
  misc_feature (1)..(474): Ceres Seq. ID no. 15221911
FPFSSPTARSRVAPLKPKQKPRREICASRHTTTTTAMAAPRVLLLLAAAAILAVASLGDASGEGPRGRKLLVLVDDLAVRSSHSAFFGSLQARGLDLEFRLADDPKLSLHRYGQYLYDGLVLFAPSTPRFGGSVDQNAVLEFIDAGHDMILAADHSASDLIRGIATECGVDFDEDPEAMVIDHINYASSEVEGDHTLIAGDDLIQSDVILGSKKIEAPVLFRGIAHAANPSNSLVLKVLSASPSAYSANPEAKLASVPSLTGSAISLVSVMQARNNARVLISGSLDLFSNRFLKSGVQKAGSKMSHDKAGNEQFVTETSKWVFHERGHLKAVNVMHHKVGETNEPSMYRINDDLEYSVEIYEWSGTSWKPYVADDVQIQFFMMSPYVLKNMSTDKSAVYSASFKVPDVYGVFQFKVEYQRLGYTGLSLAKQIPVRPYRHDEYERFITSAFPYYAASFSTMGAFFIFSVAYLYHK

SEQ ID NO: 10588 - protein, 438 aa, Triticum aestivum
  misc_feature (1)..(438): Ceres Seq. ID no. 15221912
MAAPRVLLLLAAAAILAVASLGDASGEGPRGRKLLVLVDDLAVRSSHSAFFGSLQARGLDLEFRLADDPKLSLHRYGQYLYDGLVLFAPSTPRFGGSVDQNAVLEFIDAGHDMILAADHSASDLIRGIATECGVDFDEDPEAMVIDHINYASSEVEGDHTLIAGDDLIQSDVILGSKKIEAPVLFRGIAHAANPSNSLVLKVLSASPSAYSANPEAKLASVPSLTGSAISLVSVMQARNNARVLISGSLDLFSNRFLKSGVQKAGSKMSHDKAGNEQFVTETSKWVFHERGHLKAVNVMHHKVGETNEPSMYRINDDLEYSVEIYEWSGTSWKPYVADDVQIQFFMMSPYVLKNMSTDKSAVYSASFKVPDVYGVFQFKVEYQRLGYTGLSLAKQIPVRPYRHDEYERFITSAFPYYAASFSTMGAFFIFSVAYLYHK

SEQ ID NO: 10589 - protein, 326 aa, Triticum aestivum
  misc_feature (1)..(326): Ceres Seq. ID no. 15221913
MILAADHSASDLIRGIATECGVDFDEDPEAMVIDHINYASSEVEGDHTLIAGDDLIQSDVILGSKKIEAPVLFRGIAHAANPSNSLVLKVLSASPSAYSANPEAKLASVPSLTGSAISLVSVMQARNNARVLISGSLDLFSNRFLKSGVQKAGSKMSHDKAGNEQFVTETSKWVFHERGHLKAVNVMHHKVGETNEPSMYRINDDLEYSVEIYEWSGTSWKPYVADDVQIQFFMMSPYVLKNMSTDKSAVYSASFKVPDVYGVFQFKVEYQRLGYTGLSLAKQIPVRPYRHDEYERFITSAFPYYAASFSTMGAFFIFSVAYLYHK

SEQ ID NO: 10590 - DNA, 630 bp, Triticum aestivum
  misc_feature (1)..(630): Ceres Seq. ID no. 13596513
aacatttcacatgccatctagcatcactcactgcaatcacactctatcactagctagctcagctgccctacagtgcacgcggattaactagccatggcagctcacgactcggacctcggcggcgccgtccacgtcctcctgctcccgtacccgagccagggccacatcaaccccatcctccagttcggcaagcgcctcgcctcccacgccggcgtccgctgcacgctcgccgtcacgcgctacctcctcggccagggccgggacccgtgcccgggcgccgtgcacctcgccgagatctccgacggctttgaccgcggcggcttcgccgaggccgacggcgacgtcgcggcgtacctcgcccggctggagtccgtcgggtcacgcactgtcgacgagctgctgcggtccgaggcggagaagggccggcccgtgcgcgccgtggtgtacgacgcgttcctgcagccgtgggcgccccgcgtggcccggcagcacggcgccgcgtgcgcgtccctcttcacgcaggcgcccgcggtgaacgtggcgtacgcgcacgccggtgctgggcgcnngnccgttcngntcctcgcgggcacggtgccgccggagcttcccgggctgcctgccgggctc

SEQ ID NO: 10591 - protein, 179 aa, Triticum aestivum
  misc_feature (1)..(179): Ceres Seq. ID no. 13596514
  misc_feature (159)..(159): Xaa is any aa, unknown or other
  misc_feature (160)..(160): Xaa is any aa, unknown or other
  misc_feature (162)..(162): Xaa is any aa, unknown or other
  misc_feature (163)..(163): Xaa is any aa, unknown or other
MAAHDSDLGGAVHVLLLPYPSQGHINPILQFGKRLASHAGVRCTLAVTRYLLGQGRDPCPGAVHLAEISDGFDRGGFAEADGDVAAYLARLESVGSRTVDELLRSEAEKGRPVRAVVYDAFLQPWAPRVARQHGAACASLFTQAPAVNVAYAHAGAGRXXVXXLAGTVPPELPGLPAGL

SEQ ID NO: 10592 - DNA, 1444 bp, Triticum aestivum
  misc_feature (1)..(1444): Ceres Seq. ID no. 13596523
acaacaccacaattcactcctcttgctccgctcctctcctctcccgccggcgaccatggcgaaggccgcaacagcagcagcagcggcgcctctccacagcggcctcccggacgagatcgccatctgggagatcctcgtccgcctgccccccaaatcgctcctccgctgtcgcgccgtctgccgcgcctggcgcagcgccacctccgcccgcgacttcctcctcgcccaccacgcccgccagcccgccctccccctcgcctgcggcctggaagacgacggtggcagctgctactacctggcggcccagcaccagcccgtcgcccggcttgccaaggccttctatctgtgcgcctcctgcgacggcctcctcctcctctccaagcgcaaccagctctccatctgcaacccggccactcgtcagtatgctcccctgccggcgagttctgccttcattccgttgggaatgtaccggcaccgccccacaggcgagtaccgaatactgctgtacaaggaaattggtcttccagcgaccgacgggcaagatgcctgccacatcttcgcattgggctctgtccagccgccgaggagcatcgggtcgctgcaggaggcggagcaactgaggttcagcggggtacctgtcccgttccgcggtaacctgcattggcacctgaataagcattggtacctacaaaagtattggtacttgcccgagaatcatgagagcagaagcaacattataattgtattcgacaccacagccgagaggtttcgtgagatgtgtgctccggttgttcctgaccaccataaactgtttgagatggatggcatgctcggcatgtccagctttaacaatacatggccaatcattgatgtctggatgatgcaggagcaggactatgaaagtgaggtctggaccttgaaataccgagttgaattgtccaatgcagatcttctccttgtgcagtttggtcagtttgtcgattattggaatgtggtggtcgcctcttgtgatggcgctgtgcttgtgctggtcaagtttggcaagtctatacttcagtttgatattgatggcaagttggtcagttttcatcacaaagacctcttagttactcaacatcggctcaagcaaactcttgttccacataccttctttccgagactagatggtcattccgtgaatgcttggcctttcatctgagtggtgttgagtgagttggtccttcttagaggccaacctgtctttatccttgaagcctgcaatatgtatgaatttgatccaccatgagccctagcttctttatcgatgtaatgcaaagttatgatcaagaacctcctactgtaatatgattgcatgaaattcatatttctttggatatggttttgggctgaagtggctaacggacaagctgatgctaaaattaccaactctttaggttagtgtttg

SEQ ID NO: 10593 - protein, 398 aa, Triticum aestivum
  misc_feature (1)..(398): Ceres Seq. ID no. 13596524
QHHNSLLLLRSSPLPPATMAKAATAAAAAPLHSGLPDEIAIWEILVRLPPKSLLRCRAVCRAWRSATSARDFLLAHHARQPALPLACGLEDDGGSCYYLAAQHQPVARLAKAFYLCASCDGLLLLSKRNQLSICNPATRQYAPLPASSAFIPLGMYRHRPTGEYRILLYKEIGLPATDGQDACHIFALGSVQPPRSIGSLQEAEQLRFSGVPVPFRGNLHWHLNKHWYLQKYWYLPENHESRSNIIIVFDTTAERFREMCAPVVPDHHKLFEMDGMLGMSSFNNTWPIIDVWMMQEQDYESEVWTLKYRVELSNADLLLVQFGQFVDYWNVVVASCDGAVLVLVKFGKSILQFDIDGKLVSFHHKDLLVTQHRLKQTLVPHTFFPRLDGHSVNAWPFI

SEQ ID NO: 10594 - protein, 380 aa, Triticum aestivum
  misc_feature (1)..(380): Ceres Seq. ID no. 13596525
MAKAATAAAAAPLHSGLPDEIAIWEILVRLPPKSLLRCRAVCRAWRSATSARDFLLAHHARQPALPLACGLEDDGGSCYYLAAQHQPVARLAKAFYLCASCDGLLLLSKRNQLSICNPATRQYAPLPASSAFIPLGMYRHRPTGEYRILLYKEIGLPATDGQDACHIFALGSVQPPRSIGSLQEAEQLRFSGVPVPFRGNLHWHLNKHWYLQKYWYLPENHESRSNIIIVFDTTAERFREMCAPVVPDHHKLFEMDGMLGMSSFNNTWPIIDVWMMQEQDYESEVWTLKYRVELSNADLLLVQFGQFVDYWNVVVASCDGAVLVLVKFGKSILQFDIDGKLVSFHHKDLLVTQHRLKQTLVPHTFFPRLDGHSVNAWPFI

SEQ ID NO: 10595 - protein, 244 aa, Triticum aestivum
  misc_feature (1)..(244): Ceres Seq. ID no. 13596526
MYRHRPTGEYRILLYKEIGLPATDGQDACHIFALGSVQPPRSIGSLQEAEQLRFSGVPVPFRGNLHWHLNKHWYLQKYWYLPENHESRSNIIIVFDTTAERFREMCAPVVPDHHKLFEMDGMLGMSSFNNTWPIIDVWMMQEQDYESEVWTLKYRVELSNADLLLVQFGQFVDYWNVVVASCDGAVLVLVKFGKSILQFDIDGKLVSFHHKDLLVTQHRLKQTLVPHTFFPRLDGHSVNAWPFI

SEQ ID NO: 10596 - DNA, 594 bp, Triticum aestivum
  misc_feature (1)..(594): Ceres Seq. ID no. 13596527
atcaacccatccatccaccgagcgatcggcactcccactctaagagctccgagccagccaacaatggcgtcctctccgctgctcgtggcgcttgtgatggtctcggcgtgcttcctggccgtgtccggccagaagttcaacgccatctacagcttcggcgactccatgtcggacaccggcaacctctgcgtcaacgggccccccgccggcctcaccctcacccagcccccctacggcgagaccttctttggccgtgccacctgccgctgctccgacggccgcctcgtcgtcgacttcctcgccgagaagttcgggctgccgctgctgaagccgtcgaagcagggcggcgcggacttcaagcagggcgccaacatggccatcatcggcgccaccgccatgggctccagcttcttccagtcgctcggcgtcggcgacaagatctggaacaacgggcccctcgacacccagatccagtggttccagaacctcctcccctccgtctgcggctcatcgtgcaagacgtacctgtccaagtccctgttcgtgctgggcgagctgggcgggaacgactacaacgcgcagctcttcggcggc

SEQ ID NO: 10597 - protein, 198 aa, Triticum aestivum
  misc_feature (1)..(198): Ceres Seq. ID no. 13596528
INPSIHRAIGTPTLRAPSQPTMASSPLLVALVMVSACFLAVSGQKFNAIYSFGDSMSDTGNLCVNGPPAGLTLTQPPYGETFFGRATCRCSDGRLVVDFLAEKFGLPLLKPSKQGGADFKQGANMAIIGATAMGSSFFQSLGVGDKIWNNGPLDTQIQWFQNLLPSVCGSSCKTYLSKSLFVLGELGGNDYNAQLFGG

SEQ ID NO: 10598 - protein, 197 aa, Triticum aestivum
  misc_feature (1)..(197): Ceres Seq. ID no. 13596529
QPIHPPSDRHSHSKSSEPANNGVLSAARGACDGLGVLPGRVRPEVQRHLQLRRLHVGHRQPLRQRAPRRPHPHPAPLRRDLLWPCHLPLLRRPPRRRLPRREVRAAAAEAVEAGRRGLQAGRQHGHHRRHRHGLQLLPVARRRRQDLEQRAPRHPDPVVPEPPPLRLRLIVQDVPVQVPVRAGRAGRERLQRAALRR

SEQ ID NO: 10599 - protein, 177 aa, Triticum aestivum
  misc_feature (1)..(177): Ceres Seq. ID no. 13596530
MASSPLLVALVMVSACFLAVSGQKFNAIYSFGDSMSDTGNLCVNGPPAGLTLTQPPYGETFFGRATCRCSDGRLVVDFLAEKFGLPLLKPSKQGGADFKQGANMAIIGATAMGSSFFQSLGVGDKIWNNGPLDTQIQWFQNLLPSVCGSSCKTYLSKSLFVLGELGGNDYNAQLFGG

SEQ ID NO: 10600 - DNA, 1037 bp, Triticum aestivum
  misc_feature (1)..(1037): Ceres Seq. ID no. 13596535
aacacaacaccaccgcaatctttactcgagaaaagaaaaacacaacaccgcaatcgccacctgcaccgaaccggagcaaatctccggcgagctcgagccgaagcggcgaacccgcgcgagcaggagagatggatccggacgaggtgaagtcgaagctccaaggcctggccttcggcaacgtcctggccgccgccgcccgcgactacaagaaggaagttatagctaaagagaaggctcaagcagcacctgcgatcccatgatgaagtcgatcttgatgagttactggatgacccagagcttgagaaattgcatgctgaacggcttgctgctcttaagagagaggtcgagaagcgtgaggtgctaaagaggcaaggtcatggtgaatacagggaaataaccgaaggggacttcttaggagaggtcactcgtggtgacaaggtcatctgtcatttctaccatcgtgaattttaccgctgcaagatcatggataagcatttgaaggcacttgcaccggtctatttgggaactaaattcgtcaagcttgatgccgaaaatgctcccttctttgtggcaaaactagcaatcaaaacgttgccatgtgttatattgttcaagaagggtattgctcttgatcggttggttggtttcgatgaccttggaagtaaagatgatttttctaccagggctttggaaaatgtactgaagaggaaaggtataattgaggaaaagaagaaagacgatgatgacgaagatgatgagactgacatgtcaaaggataggagggttagatcttccactgcttacgattcggattcagattgaaaagatgaagtgatatgatcctgtcttttgtaacattataattttgtctcttttgtactctagctctcggaagttccttatgatttatgtgtgccgtattgtatcgaacaagagaactggaagccggatgtattagtgatctgtcagtaactccagttttacaccagttatcggagtacaatacatatgtatgactaagtattagtgctgcaatt

SEQ ID NO: 10601 - protein, 112 aa, Triticum aestivum
  misc_feature (1)..(112): Ceres Seq. ID no. 15221914
MDKHLKALAPVYLGTKFVKLDAENAPFFVAKLAIKTLPCVILFKKGIALDRLVGFDDLGSKDDFSTRALENVLKRKGIIEEKKKDDDDEDDETDMSKDRRVRSSTAYDSDSD

SEQ ID NO: 10602 - protein, 85 aa, Triticum aestivum
  misc_feature (1)..(85): Ceres Seq. ID no. 15221915
HNTTAIFTREKKNTTPQSPPAPNRSKSPASSSRSGEPARAGEMDPDEVKSKLQGLAFGNVLAAAARDYKKEVIAKEKAQAAPAIP

SEQ ID NO: 10603 - protein, 74 aa, Triticum aestivum
  misc_feature (1)..(74): Ceres Seq. ID no. 15221916
TQHHRNLYSRKEKHNTAIATCTEPEQISGELEPKRRTRASRRDGSGRGEVEAPRPGLRQRPGRRRPRLQEGSYS

SEQ ID NO: 10604 - DNA, 1488 bp, Triticum aestivum
  misc_feature (1)..(1488): Ceres Seq. ID no. 13596541
gtggattttttagcgtgcattccctcgaacgagctcagtagagccagcctcgccggtctaggctgaatcggtaatgtaaccaaccacgccctaaacgagcaggcggaaagggtggttcagttgcgttcgctcgattgatccaaaaaaaaaagttgcgttcgctcgatcgagcagcagggaaacaagccatggagagctcgccgcccaccatcaccgtccaggtgaagttcgccggccgaaccattccggtggaactcccgacatccgcctccaccgcggagctgaagctcctcctccagccgctaaccaacgttcttccccgcggccagaaactcatctgcaaaggaaaagttcttgccgacgccgcgagtctgagctcgatgcaggttggggacagatccaaggtcatgctcatcgcttcgcagggtcttcatcagggggaaggccccatcactaagaatagcagtggtcttgcagcaagtgcaaaaagaacctcaaatgttaaggataatcaaacactaaaaccggagattatcagcaaaagccgagcggagcgttggaaaataacaggtgtcattgctttatctggttccagcttgaaggcagtgcctgaggaagtctgggactgtggctcctccatacgagtactagatgtctgtaacaacttaattgaagcaattccacagaaaattgctgcccttaaatcattaaataaattgttgctaaccgccaatgacatatctgatgggggcatcagctgggaaggtctatcatgtgttgatacattaacagttttatctttaagccaaaatcgattggtcactttacctccgagtttgggcacattgacttttctacgtgaacttcgcattgcaaataacatgcttggcagcctacctgttgaaataggtttgctgaagcagctagagattcttatagcaaataataataggataacttcgctgccttcctctataggcgattgtgaatctctctttgaggtggacttatcatcaaatcttttagccgaactaccaaaggcttgcggaaaccttcacaatctgaagactctgcatctaaggaacaatggccttaattccctaccgccaactttattcaagaagtgctggcggcttactacacttgatctccatggcactggaatcacaaatgacattcttcgacagatggagggctgggaggagtttgatgaacgtaggcggcagaagtatcaaaagcagctggattttcgtgtgggatcatcaggtgttttcgacgagggtgcggatgatgataaccggcatgcataagtgtttcttattacagacagggttttgcgcttccaatattgtcccagaattattctagaattgaacacagacacggagctgatattattcctcacattttggttgtgtatttgtttattcctctcatttcattacattttagtgccaagtgatgaaaagtggtggctacctgttaaac

SEQ ID NO: 10605 - protein, 373 aa, Triticum aestivum
  misc_feature (1)..(373): Ceres Seq. ID no. 15221917
MESSPPTITVQVKFAGRTIPVELPTSASTAELKLLLQPLTNVLPRGQKLICKGKVLADAASLSSMQVGDRSKVMLIASQGLHQGEGPITKNSSGLAASAKRTSNVKDNQTLKPEIISKSRAERWKITGVIALSGSSLKAVPEEVWDCGSSIRVLDVCNNLIEAIPQKIAALKSLNKLLLTANDISDGGISWEGLSCVDTLTVLSLSQNRLVTLPPSLGTLTFLRELRIANNMLGSLPVEIGLLKQLEILIANNNRITSLPSSIGDCESLFEVDLSSNLLAELPKACGNLHNLKTLHLRNNGLNSLPPTLFKKCWRLTTLDLHGTGITNDILRQMEGWEEFDERRRQKYQKQLDFRVGSSGVFDEGADDDNRHA

SEQ ID NO: 10606 - protein, 309 aa, Triticum aestivum
  misc_feature (1)..(309): Ceres Seq. ID no. 15221918
MQVGDRSKVMLIASQGLHQGEGPITKNSSGLAASAKRTSNVKDNQTLKPEIISKSRAERWKITGVIALSGSSLKAVPEEVWDCGSSIRVLDVCNNLIEAIPQKIAALKSLNKLLLTANDISDGGISWEGLSCVDTLTVLSLSQNRLVTLPPSLGTLTFLRELRIANNMLGSLPVEIGLLKQLEILIANNNRITSLPSSIGDCESLFEVDLSSNLLAELPKACGNLHNLKTLHLRNNGLNSLPPTLFKKCWRLTTLDLHGTGITNDILRQMEGWEEFDERRRQKYQKQLDFRVGSSGVFDEGADDDNRHA

SEQ ID NO: 10607 - protein, 300 aa, Triticum aestivum
  misc_feature (1)..(300): Ceres Seq. ID no. 15221919
MLIASQGLHQGEGPITKNSSGLAASAKRTSNVKDNQTLKPEIISKSRAERWKITGVIALSGSSLKAVPEEVWDCGSSIRVLDVCNNLIEAIPQKIAALKSLNKLLLTANDISDGGISWEGLSCVDTLTVLSLSQNRLVTLPPSLGTLTFLRELRIANNMLGSLPVEIGLLKQLEILIANNNRITSLPSSIGDCESLFEVDLSSNLLAELPKACGNLHNLKTLHLRNNGLNSLPPTLFKKCWRLTTLDLHGTGITNDILRQMEGWEEFDERRRQKYQKQLDFRVGSSGVFDEGADDDNRHA

SEQ ID NO: 10608 - DNA, 1348 bp, Triticum aestivum
  misc_feature (1)..(1348): Ceres Seq. ID no. 13596554
ctcgaaccgaccgacaggccgtggtgcgcatctctcccactatctggctcaggtttcttgcctcggctctcgattttgtcatagcattcgctgttcccgtggtgtctgtagccgcgggcgggtgggcgagatccggttgcggcggccatggtgaaggagaccgcctactacgaaaccctgggggtcagcgtcgacgcctccccctccgacatcaagaaggcctactacgtccaggccaggctggtgcacccggacaagaatcccggcaaccccgacgcggcgcgcaaattccaggatctcggagaggcctaccaagtcctaagcgatccagcgaagaaggaggcttatgataagcatggaaaggagggtctttcccaggataacatggttgatcctgctgctgtatttgggatgctttttggaagcgactattttgaagattatgttggtcagcttgctctggcatccatcgcttcagtggaggttgatgaaggtttaagcagtcaagatgccagagcaaaggttcaagataagataaaagagttgcaaactgaaagagagaaaaagcttactcagagcctaaaggatcgacttcagccatatgtggatggtagaaaggatgattttgtgcactgggcgaatgcagaagccaagcgtttatcagaagcagcttttggtgaggctatgcttcacactgttggatatatttatgtaaggcaagcggcaagagaacttggaaagagtaaattgtatatgggtgtaccattcatagctgagtgggtaagagacaagggtcataccattaaatcacaagttcatgctgcttcaggtgctattgctctgatgcagctacaagaaggaatgaaaaaggtggaggagggtgccgacaaggaagagcagcttatgaagagttttgaggagaaaaaagaagccatgcttaattctctatggaaaattaatgtggtcgatatcgagtcaactctttcccgagtatgccaagcagttcttaaagatagcactgtctcaaaagatgttctgaagttgcgaggaaaagcgttgaaaaagcttggaacgatattccaaggcgcggaatctctgtaccatcgtgagaacagcctacgtgtggagtctccgatgaaagaggatggaacgacatcgtcgcactgaagactgataacatttttaacaatttgtgaattattcggatctctgtgcattattgtctgcttgtattattttgacacagcaggtttgctctggacgcaccctgtatgtatgggtttccttgttttctgtaaaaagggtgaatgctgagacacgaagcatctctgttattgacccggcattc

SEQ ID NO: 10609 - protein, 339 aa, Triticum aestivum
  misc_feature (1)..(339): Ceres Seq. ID no. 15221926
MVKETAYYETLGVSVDASPSDIKKAYYVQARLVHPDKNPGNPDAARKFQDLGEAYQVLSDPAKKEAYDKHGKEGLSQDNMVDPAAVFGMLFGSDYFEDYVGQLALASIASVEVDEGLSSQDARAKVQDKIKELQTEREKKLTQSLKDRLQPYVDGRKDDFVHWANAEAKRLSEAAFGEAMLHTVGYIYVRQAARELGKSKLYMGVPFIAEWVRDKGHTIKSQVHAASGAIALMQLQEGMKKVEEGADKEEQLMKSFEEKKEAMLNSLWKINVVDIESTLSRVCQAVLKDSTVSKDVLKLRGKALKKLGTIFQGAESLYHRENSLRVESPMKEDGTTSSH

SEQ ID NO: 10610 - protein, 260 aa, Triticum aestivum
  misc_feature (1)..(260): Ceres Seq. ID no. 15221927
MVDPAAVFGMLFGSDYFEDYVGQLALASIASVEVDEGLSSQDARAKVQDKIKELQTEREKKLTQSLKDRLQPYVDGRKDDFVHWANAEAKRLSEAAFGEAMLHTVGYIYVRQAARELGKSKLYMGVPFIAEWVRDKGHTIKSQVHAASGAIALMQLQEGMKKVEEGADKEEQLMKSFEEKKEAMLNSLWKINVVDIESTLSRVCQAVLKDSTVSKDVLKLRGKALKKLGTIFQGAESLYHRENSLRVESPMKEDGTTSSH

SEQ ID NO: 10611 - protein, 251 aa, Triticum aestivum
  misc_feature (1)..(251): Ceres Seq. ID no. 15221928
MLFGSDYFEDYVGQLALASIASVEVDEGLSSQDARAKVQDKIKELQTEREKKLTQSLKDRLQPYVDGRKDDFVHWANAEAKRLSEAAFGEAMLHTVGYIYVRQAARELGKSKLYMGVPFIAEWVRDKGHTIKSQVHAASGAIALMQLQEGMKKVEEGADKEEQLMKSFEEKKEAMLNSLWKINVVDIESTLSRVCQAVLKDSTVSKDVLKLRGKALKKLGTIFQGAESLYHRENSLRVESPMKEDGTTSSH

SEQ ID NO: 10612 - DNA, 1156 bp, Triticum aestivum
  misc_feature (1)..(1156): Ceres Seq. ID no. 13596555
gaaaaatctaggcatgcatctcgccgccgactacccccaccgcggcggtggccgcctcggcctagggccattcgcggcagcggtgctccgcaccgacaaccgtcgccgtgcgattgcaggcggcgcggtcctcgcctcggcgctgcttctcgtggccacaccacgactccgccactcgccggcgctccacctcttcgccgacatgcgcaacctcctcggcgtgcccaacaccctcaacgtgctcaccgcctacccgcttctccttgctggagtaccaggactcatcctgtgcctcttcggcggtggatgcttcggcataagcttaaggtgggaggccttgggatggttcctcttctatgtggggaatgtaggggcagcatttggctcagcttactatcacctcaagccagatgatgaccggttaatttgggacaggttgccgatgatgatgtcggcctcctcgcttttgtcgatattggtaattgaaagagttgatgagagggctgggttatcttgtttgatctcgctcttgtctcttttactggtgagcagtgcgtgtgaaaggattcttgatgatatgcgcctgtgggtagttttaaacctggttccttgtgttgccattcctgcaatgctattcttgttcgcgccaaagtatacacactcaagattttggtttcttgctacaggcttttaccttctggcaagattcgaaggccttgccgacagaaaggtttacagtgtgaatagatatttcattagcggtcattccttggagcacctttgcttcgccatggttacattgatacttactgtgatgctatccttcagaaatattaagatcaccagggactcgtgactacaactccaccattgcttgtttgtaacaaatggcaaatttcctgtcagaatttctatgttcggaagggcccctccagagtccggaagcacctgaagaaacataaataggtgatctatgtatcctatctttccactacctgggtgactgacgccctccatccctgggcggcatagacaagtcctgtgagattatttcaatgtgtgttcatgtcgtgagttatttgtgtttggagcttgttaactggaccagcagaaacattggacgactatattgcaatttatacagatttcagctgtc

SEQ ID NO: 10613 - protein, 284 aa, Triticum aestivum
  misc_feature (1)..(284): Ceres Seq. ID no. 13596556
KNLGMHLAADYPHRGGGRLGLGPFAAAVLRTDNRRRAIAGGAVLASALLLVATPRLRHSPALHLFADMRNLLGVPNTLNVLTAYPLLLAGVPGLILCLFGGGCFGISLRWEALGWFLFYVGNVGAAFGSAYYHLKPDDDRLIWDRLPMMMSASSLLSILVIERVDERAGLSCLISLLSLLLVSSACERILDDMRLWVVLNLVPCVAIPAMLFLFAPKYTHSRFWFLATGFYLLARFEGLADRKVYSVNRYFISGHSLEHLCFAMVTLILTVMLSFRNIKITRDS

SEQ ID NO: 10614 - protein, 280 aa, Triticum aestivum
  misc_feature (1)..(280): Ceres Seq. ID no. 13596557
MHLAADYPHRGGGRLGLGPFAAAVLRTDNRRRAIAGGAVLASALLLVATPRLRHSPALHLFADMRNLLGVPNTLNVLTAYPLLLAGVPGLILCLFGGGCFGISLRWEALGWFLFYVGNVGAAFGSAYYHLKPDDDRLIWDRLPMMMSASSLLSILVIERVDERAGLSCLISLLSLLLVSSACERILDDMRLWVVLNLVPCVAIPAMLFLFAPKYTHSRFWFLATGFYLLARFEGLADRKVYSVNRYFISGHSLEHLCFAMVTLILTVMLSFRNIKITRDS

SEQ ID NO: 10615 - protein, 217 aa, Triticum aestivum
  misc_feature (1)..(217): Ceres Seq. ID no. 13596558
MRNLLGVPNTLNVLTAYPLLLAGVPGLILCLFGGGCFGISLRWEALGWFLFYVGNVGAAFGSAYYHLKPDDDRLIWDRLPMMMSASSLLSILVIERVDERAGLSCLISLLSLLLVSSACERILDDMRLWVVLNLVPCVAIPAMLFLFAPKYTHSRFWFLATGFYLLARFEGLADRKVYSVNRYFISGHSLEHLCFAMVTLILTVMLSFRNIKITRDS

SEQ ID NO: 10616 - DNA, 1065 bp, Triticum aestivum
  misc_feature (1)..(1065): Ceres Seq. ID no. 13596609
ctagaacatcctaatcgaaaagatttgttcccgtttcatttggtgtctttgctcagcagcgtgtctctgttgagctctagctgtactgcatcgttatccaatactggcgatacttgtggtgggttttgggttttggatgagcacccacaatgacgagtgccggcggtcactcacaatccctgtcatgggtcttggaggagtcatttttctcatgtcgctggcgggatttgtgggtgcttggaagaacatttcttgcttgctttggacatatctaataatgctgttcgtggtcctggtggcaatcatggtcttcacagtgcttgcgtttatcattacaaatactggaactggtcatgctgttcctgggtccagatataaagagtatcgtcttcaggactacagttcttggttcgtcaaacagctcaatgacactgataaatggactcatctgagaagttgccttgtgaagtcggatgattgcaatagcttgtcaaaaagatataagactctaaaacaatacaagctcgctgagctgactcccattgagtctggctgttgccgcccaccagcggagtgtggatatccagctttgaatgcttccaattttgatctgagctaccatccggtgagcacaaacgtcgactgcaaactgtacaaaaatgatcggttcctcaggtgctatgactgtaattcttgcaaagctggtgttgcgcaatacatgaagacagagtggcgagtggttgccatcttcaatgtgatattgtttatcattttgtcattcgtgtactttgttggctgctgcgcacgtcgacatgctggaggtagtgattctaaagttcctcgaagatgactcttactttgaagtgaatcctctctatgattcacgtgtcacagcgagagttagctttaccgtcccttgtaaaacattgttcattcaagttcagctgatgaaatggagtgtcaaggcttctgttctgtgggcgatttctttgtgccagtagcattttggacatctatgaaaatgaacgtcccacaatcttctgaaatacagcctcatgatcttgt

SEQ ID NO: 10617 - protein, 237 aa, Triticum aestivum
  misc_feature (1)..(237): Ceres Seq. ID no. 13596610
MSTHNDECRRSLTIPVMGLGGVIFLMSLAGFVGAWKNISCLLWTYLIMLFVVLVAIMVFTVLAFIITNTGTGHAVPGSRYKEYRLQDYSSWFVKQLNDTDKWTHLRSCLVKSDDCNSLSKRYKTLKQYKLAELTPIESGCCRPPAECGYPALNASNFDLSYHPVSTNVDCKLYKNDRFLRCYDCNSCKAGVAQYMKTEWRVVAIFNVILFIILSFVYFVGCCARRHAGGSDSKVPRR

SEQ ID NO: 10618 - protein, 221 aa, Triticum aestivum
  misc_feature (1)..(221): Ceres Seq. ID no. 13596611
MGLGGVIFLMSLAGFVGAWKNISCLLWTYLIMLFVVLVAIMVFTVLAFIITNTGTGHAVPGSRYKEYRLQDYSSWFVKQLNDTDKWTHLRSCLVKSDDCNSLSKRYKTLKQYKLAELTPIESGCCRPPAECGYPALNASNFDLSYHPVSTNVDCKLYKNDRFLRCYDCNSCKAGVAQYMKTEWRVVAIFNVILFIILSFVYFVGCCARRHAGGSDSKVPRR

SEQ ID NO: 10619 - protein, 212 aa, Triticum aestivum
  misc_feature (1)..(212): Ceres Seq. ID no. 13596612
MSLAGFVGAWKNISCLLWTYLIMLFVVLVAIMVFTVLAFIITNTGTGHAVPGSRYKEYRLQDYSSWFVKQLNDTDKWTHLRSCLVKSDDCNSLSKRYKTLKQYKLAELTPIESGCCRPPAECGYPALNASNFDLSYHPVSTNVDCKLYKNDRFLRCYDCNSCKAGVAQYMKTEWRVVAIFNVILFIILSFVYFVGCCARRHAGGSDSKVPRR

SEQ ID NO: 10620 - DNA, 1476 bp, Triticum aestivum
  misc_feature (1)..(1476): Ceres Seq. ID no. 13596625
aaaaatcctcctcgcgtcacgcgtgaacccagccggatccccaaacctccttccggtccgacgcctcgtgccgccggcgccgacgggggacccctccgcctctcacgcgtgccgccgcccccgccgtcgccgtcccgtctccctcgccggggcatcgcgttccaccccgccggcgactaggaacacggcaccctgaagctcctgagctagagtaggaggggcaaaccatccagctgaagaatgaaaacacatgagcgtgctgccaacttggctcttgctggtttgagcttggcaccgctcgtgatcaatgtgaacccaaatttgaatgtgatactgacagcatgtcttactgtctatgtgggctgttaccgttctgtcaagtcaactccacccgctgagacaatgtccaaagagcatgctatgcggttccctttggtggggagtgctatgcttctgtcgctattccttctattcaagtttctctccaaggacctggtcaatactgttctcactgcctactttttcattcttggcattgctgcgctctgtgcaacgttgctccctaccgtcaaacgttttcttccagaaggatggaatgataatgccatcgtctggcgtgctccatatttccactcactgtcggtggagtttaccaagtctcaagttgtcgcttcagtccctggttttttcttttgcgtatggtatgccatgaagaagcattggctagcaaacaatgttttgggacttgctttctgcattcagggaattgagatgttatcactaggatcattcaaaaccggtggtattctcttggctggactttttgtgtatgacattttctgggttttcttcactccagttatggtcagtgttgctaaatcatttgatgctccaataaagcttctatttcccaccgcggatgccgcacggccgttctctatgcttggtcttggtgatattgttatacctggtatatttgttgcacttgcactccgtttcgatgtctcgagaaacattaagaaccgttacttcaatagtgcatttttgggatacactgcgggcatgacagtaacaatcgttgtgatgaactggtttcaagctgcacagcctgctctgctatacatcgttcctggcgtgactggttttgtggctgttcactctttgtggaatggtgaagtaaagccgctactggagttcaccgagacgcagcccgaggagggagccgccgaggaagaagaagattccagtcagagcaaaaaggtggactagcgctcgctcgggtcgggtcgggtctttttaattaattaggagaggagaaccaaaccaaagcaggatttcaaataggctgtatgatcttgagaatcgaaaaacgattcacatgatagaactctttttgttttgaaaggtcattaactatctgttttggtgagtggtagatgatggacgaaaagggaacatatatgctaaaagacttgc

SEQ ID NO: 10621 - protein, 342 aa, Triticum aestivum
  misc_feature (1)..(342): Ceres Seq. ID no. 13596626
MKTHERAANLALAGLSLAPLVINVNPNLNVILTACLTVYVGCYRSVKSTPPAETMSKEHAMRFPLVGSAMLLSLFLLFKFLSKDLVNTVLTAYFFILGIAALCATLLPTVKRFLPEGWNDNAIVWRAPYFHSLSVEFTKSQVVASVPGFFFCVWYAMKKHWLANNVLGLAFCIQGIEMLSLGSFKTGGILLAGLFVYDIFWVFFTPVMVSVAKSFDAPIKLLFPTADAARPFSMLGLGDIVIPGIFVALALRFDVSRNIKNRYFNSAFLGYTAGMTVTIVVMNWFQAAQPALLYIVPGVTGFVAVHSLWNGEVKPLLEFTETQPEEGAAEEEEDSSQSKKVD

SEQ ID NO: 10622 - protein, 288 aa, Triticum aestivum
  misc_feature (1)..(288): Ceres Seq. ID no. 13596627
MSKEHAMRFPLVGSAMLLSLFLLFKFLSKDLVNTVLTAYFFILGIAALCATLLPTVKRFLPEGWNDNAIVWRAPYFHSLSVEFTKSQVVASVPGFFFCVWYAMKKHWLANNVLGLAFCIQGIEMLSLGSFKTGGILLAGLFVYDIFWVFFTPVMVSVAKSFDAPIKLLFPTADAARPFSMLGLGDIVIPGIFVALALRFDVSRNIKNRYFNSAFLGYTAGMTVTIVVMNWFQAAQPALLYIVPGVTGFVAVHSLWNGEVKPLLEFTETQPEEGAAEEEEDSSQSKKVD

SEQ ID NO: 10623 - protein, 282 aa, Triticum aestivum
  misc_feature (1)..(282): Ceres Seq. ID no. 13596628
MRFPLVGSAMLLSLFLLFKFLSKDLVNTVLTAYFFILGIAALCATLLPTVKRFLPEGWNDNAIVWRAPYFHSLSVEFTKSQVVASVPGFFFCVWYAMKKHWLANNVLGLAFCIQGIEMLSLGSFKTGGILLAGLFVYDIFWVFFTPVMVSVAKSFDAPIKLLFPTADAARPFSMLGLGDIVIPGIFVALALRFDVSRNIKNRYFNSAFLGYTAGMTVTIVVMNWFQAAQPALLYIVPGVTGFVAVHSLWNGEVKPLLEFTETQPEEGAAEEEEDSSQSKKVD

SEQ ID NO: 10624 - DNA, 1658 bp, Triticum aestivum
  misc_feature (1)..(1658): Ceres Seq. ID no. 13596635
agcgcaccacggtcgacctaccgcgcaggaccaccgagcccctcccttctcccgtgcctgctgcggatcccctttcctttgccttctctcctccagtcagctcctcttccgcgcgtgtggtggccgatggcggcggcggcggacacttccgcggcttccacgaccgggctcgcgctctcggaggcgagcatcaactgggagaggttggacaagacaaagtttcatgtcattggagcaatcctatttacggcccagcaaggtgttctgcacccaacagctgttgtgaagactagaatgcaggttgccgaaggaggactttcacatatgtctggctttgtcgtttttagaaagatattgaggagtgatggcatccctggtgttttcagaggatttggcaccagtgcagttggagctctgcctggacgaatcttggctctaacttcactagagatctccaaagaaatggcatttaaatactctgagcatttcgatatgtccgaggcatcaaggattgctgttgctaatggtgtagcaggcttagtgtcaagtaccttttcaagttcatattctgtacccctagatgtggtttgtcagagactcatggttcagggattgccagggatgcaaacatatagaggcccatttgatgtgataaataaggttgtcaggagtgaaggcctccggggcctttaccgaggttttggaattacccttttaactcaatcaccagcttctgccctttggtggagttcatatggtggggctcaacatgctatctggaggagcttgggctatggaaatggtacgcagaagaaaccctcccatacagaacttgttgctgtgcaagcaacagctggaacaattgctggagcttgctcatcgattatcactacaccaatagataccatcaagacccggcttcaggtaatggacaactacgggagtggaaggccatccgtcatgaagactaccaggctgctactgcgagaagaaggttggagaggtttataccgagggtttggaccacgctttcttaacatgtctctttggggtacatcaatgattgtcacatatgagctaataaaaagactttctgtgaaacctgagcaatgaaccttttggcttctgctccgcctatctggtcatcatttccgttttggccatctagtgaattccttttggtacagggattggcatgtaacactggttggaaattcttgatgcaagtccccttataaagtctgacatgtttctgtacggaactaccctgtaaatacctccaagtgcaagggtgctcgtttcagatgagagccagaggatcgatctgggcactggagcgccttgtagttgttgagcaaaaatttccctgtaagtgctgaagggagctcgtttcaggatgagagccagaggctggatctgggtactgagcaccttgtagttgttcagcaaaaattccggaaacatagttttgtgtcttcccatctaattggcatagttaccccacttgaattttcaatttcgcattacttttgtagctcacttcttgggatgagatgtggcatgtccaaatcaatttagcatcatcagtgaggtggtaggctgcaatgtataccttgtcgagtgtcgacattctacagtgagaggtagatactttcttt

SEQ ID NO: 10625 - protein, 370 aa, Triticum aestivum
  misc_feature (1)..(370): Ceres Seq. ID no. 13596636
SAPRSTYRAGPPSPSLLPCLLRIPFPLPSLLQSAPLPRVWWPMAAAADTSAASTTGLALSEASINWERLDKTKFHVIGAILFTAQQGVLHPTAVVKTRMQVAEGGLSHMSGFVVFRKILRSDGIPGVFRGFGTSAVGALPGRILALTSLEISKEMAFKYSEHFDMSEASRIAVANGVAGLVSSTFSSSYSVPLDVVCQRLMVQGLPGMQTYRGPFDVINKVVRSEGLRGLYRGFGITLLTQSPASALWWSSYGGAQHAIWRSLGYGNGTQKKPSHTELVAVQATAGTIAGACSSIITTPIDTIKTRLQVMDNYGSGRPSVMKTTRLLLREEGWRGLYRGFGPRFLNMSLWGTSMIVTYELIKRLSVKPEQ

SEQ ID NO: 10626 - protein, 328 aa, Triticum aestivum
  misc_feature (1)..(328): Ceres Seq. ID no. 13596637
MAAAADTSAASTTGLALSEASINWERLDKTKFHVIGAILFTAQQGVLHPTAVVKTRMQVAEGGLSHMSGFVVFRKILRSDGIPGVFRGFGTSAVGALPGRILALTSLEISKEMAFKYSEHFDMSEASRIAVANGVAGLVSSTFSSSYSVPLDVVCQRLMVQGLPGMQTYRGPFDVINKVVRSEGLRGLYRGFGITLLTQSPASALWWSSYGGAQHAIWRSLGYGNGTQKKPSHTELVAVQATAGTIAGACSSIITTPIDTIKTRLQVMDNYGSGRPSVMKTTRLLLREEGWRGLYRGFGPRFLNMSLWGTSMIVTYELIKRLSVKPEQ

SEQ ID NO: 10627 - protein, 272 aa, Triticum aestivum
  misc_feature (1)..(272): Ceres Seq. ID no. 13596638
MQVAEGGLSHMSGFVVFRKILRSDGIPGVFRGFGTSAVGALPGRILALTSLEISKEMAFKYSEHFDMSEASRIAVANGVAGLVSSTFSSSYSVPLDVVCQRLMVQGLPGMQTYRGPFDVINKVVRSEGLRGLYRGFGITLLTQSPASALWWSSYGGAQHAIWRSLGYGNGTQKKPSHTELVAVQATAGTIAGACSSIITTPIDTIKTRLQVMDNYGSGRPSVMKTTRLLLREEGWRGLYRGFGPRFLNMSLWGTSMIVTYELIKRLSVKPEQ

SEQ ID NO: 10628 - DNA, 470 bp, Triticum aestivum
  misc_feature (1)..(470): Ceres Seq. ID no. 13596647
gaaccctaacttttctaaaccctaattccagcctgtcatccccttcgcgacactctaccgctctcccgatggatccgcagcagccggagcccgtcagctatctatgcggagattgcggagctgagaacacgctgaagacaggggatgtgatccagtgccgtgagtgtggctaccgcatcctctacaagaagcgcacccgcaggattgttcaatacgaagctcgctgaagacagaagaacaaacatcattcactgttggtaggtgcctcgattgatgtggagtgtgccctgagacaaagctacaatggagaaatgtattatatacagtacttttaggtcttatttgtccgttggactttggcttgaagtggtaaaacttgttgtaaccgtattgagattttagacatttgagaatccagattatgcatcccaaaagctggatgtcgaaaaatggttattattgctattgcc

SEQ ID NO: 10629 - protein, 74 aa, Triticum aestivum
  misc_feature (1)..(74): Ceres Seq. ID no. 15221937
TLTFLNPNSSLSSPSRHSTALPMDPQQPEPVSYLCGDCGAENTLKTGDVIQCRECGYRILYKKRTRRIVQYEAR

SEQ ID NO: 10630 - protein, 52 aa, Triticum aestivum
  misc_feature (1)..(52): Ceres Seq. ID no. 15221938
MDPQQPEPVSYLCGDCGAENTLKTGDVIQCRECGYRILYKKRTRRIVQYEAR

SEQ ID NO: 10631 - DNA, 1216 bp, Triticum aestivum
  misc_feature (1)..(1216): Ceres Seq. ID no. 13596660
ctctgcctccctatcccgcctcgggccgctgcctctgcctcatcgtcctcctcgcgctcgcactccttcgccgctgccggacgggtttccctccgccgtcgccgccgccgcgcttccttcaccgactgccgctgctcctcctcctcctccccagaaatggaggccggcgctggcacggctctgtaccccgcgcaccgatgcaaaaccatatacctggtgaggcatgcccagggtattcacaatgtggaaggcgagaaggattttgcagcatacaagtcacatgcgctgcttgatgctcaacttacccctttgggctggagccaagttgataccctgcgagatcatgtgacaaaatgtggactagcaaaaaagattgagttggttattgtttcccctctactcaggactatacaaactgcagtgggggtctttggtggtgggaactatattgatggagcaagtgcatcaccattgatggtagagggtgctggaaacagtgaacgtcagccgatttcaagtttgaactgcccaccgtttctcgcagttgaggcttgcagagagcacctgggtgttcatccctgtgacaagaggagcagcataacaaaataccgtactctctttcctgccattgatttttccttgatcgagaatgatgaagatgttctctgggaacccgatgtcagagaaacaaatgagtctgttgctctcaggggcatgaagttctttgactggttatggacgagagaagagaaagagatagctattgtcagccatagtggtttcttgtatcacaccttgaacatgtatggtaaagagtgtcatccaacaatagcagaggaactgggaaagcacttcgccaactgtgagctccggtcgatggtcttggtcgacagaagtaaccttggatcggatgcctctaaatacaacttcgctgggaagataccgaccgggcttgatatgcccagcgatgtcgcagacgagaagcaggctgaagaagctagcaagaactgaggctgtcgagcatgtggatgtctttgattcttttgtcaaaccttggttctggctgacaatgaactgagaatagatactaagcgacatctaaggataggacttgccgtctgttgttccggtgtatgatgggcacgattggttatgtttatctgatttgttgtttgaacagatacccaaattcatgggaaataaggacttatacact

SEQ ID NO: 10632 - protein, 336 aa, Triticum aestivum
  misc_feature (1)..(336): Ceres Seq. ID no. 15221943
LCLPIPPRAAASASSSSSRSHSFAAAGRVSLRRRRRRASFTDCRCSSSSSPEMEAGAGTALYPAHRCKTIYLVRHAQGIHNVEGEKDFAAYKSHALLDAQLTPLGWSQVDTLRDHVTKCGLAKKIELVIVSPLLRTIQTAVGVFGGGNYIDGASASPLMVEGAGNSERQPISSLNCPPFLAVEACREHLGVHPCDKRSSITKYRTLFPAIDFSLIENDEDVLWEPDVRETNESVALRGMKFFDWLWTREEKEIAIVSHSGFLYHTLNMYGKECHPTIAEELGKHFANCELRSMVLVDRSNLGSDASKYNFAGKIPTGLDMPSDVADEKQAEEASKN

SEQ ID NO: 10633 - protein, 284 aa, Triticum aestivum
  misc_feature (1)..(284): Ceres Seq. ID no. 15221944
MEAGAGTALYPAHRCKTIYLVRHAQGIHNVEGEKDFAAYKSHALLDAQLTPLGWSQVDTLRDHVTKCGLAKKIELVIVSPLLRTIQTAVGVFGGGNYIDGASASPLMVEGAGNSERQPISSLNCPPFLAVEACREHLGVHPCDKRSSITKYRTLFPAIDFSLIENDEDVLWEPDVRETNESVALRGMKFFDWLWTREEKEIAIVSHSGFLYHTLNMYGKECHPTIAEELGKHFANCELRSMVLVDRSNLGSDASKYNFAGKIPTGLDMPSDVADEKQAEEASKN

SEQ ID NO: 10634 - protein, 178 aa, Triticum aestivum
  misc_feature (1)..(178): Ceres Seq. ID no. 15221945
MVEGAGNSERQPISSLNCPPFLAVEACREHLGVHPCDKRSSITKYRTLFPAIDFSLIENDEDVLWEPDVRETNESVALRGMKFFDWLWTREEKEIAIVSHSGFLYHTLNMYGKECHPTIAEELGKHFANCELRSMVLVDRSNLGSDASKYNFAGKIPTGLDMPSDVADEKQAEEASKN

SEQ ID NO: 10635 - DNA, 1061 bp, Triticum aestivum
  misc_feature (1)..(1061): Ceres Seq. ID no. 13596727
tacctagaacatcctaatcgaaaaaatagtccttcgcctgagccgctgaacccgaaccgaaccattttcactctctaaaccctacgccctcctccgccgccgcatccggccacccttcgccgccgcatccgaccatgggtagcaggctgggccgccgcgtgctccacttcgccaacctccccatcaagctcatgctccccccggcccccctatcctccgtccaggagttcgctgtcaggaccgtcccctccgcctccaaggtcgacatccgccgctgcctcgagtccgtctacggcttctccatcgccgaagtccgcaccctcaacatggagggaaagaagcaccgccgaggacccttcctcgccgccaagccagactacaagaaggcctacgtcactcttcaggccccgctctccgtttcccccgacatcttccccatcggcgcgatcctcggggagagggaacggaaggccagcgcagccgcggcgaggaggaaggttgtggaaggggcagaggtcgagggggagagggaggggaaggggaaacattggatggaggacgagagggagggcttctccagggccggatgcggcaagatcgtgtatgggaaccctgggaggctggggaacaagaggaggggacgtgccagggcgaatgagcaagctgacgaaaaggggggaaacttcccgtggaacgggatgcagctggctaccgagaaacctgctaggaaaagacactatcctcccaaggcacagggaggcatggtcttgaagcagagatcacacaggggatcagcgctgcgtggaaagagttgagttgtcgtcgcctcaaccatgagagagcaccgcgccatgaaacgcgatgcagtacgtgcatccatgactaatccgccagatccatgccgttttgcagtcacacaataaagatgcgttgatttagtatttataattggctttggttcccttttactttgctattaaagcgtgtagtgatttcagtctctcatgcacatggctggttacaatgtaacagcatttccttatctaaatttgattgtcttc

SEQ ID NO: 10636 - protein, 226 aa, Triticum aestivum
  misc_feature (1)..(226): Ceres Seq. ID no. 13596728
MGSRLGRRVLHFANLPIKLMLPPAPLSSVQEFAVRTVPSASKVDIRRCLESVYGFSIAEVRTLNMEGKKHRRGPFLAAKPDYKKAYVTLQAPLSVSPDIFPIGAILGERERKASAAAARRKVVEGAEVEGEREGKGKHWMEDEREGFSRAGCGKIVYGNPGRLGNKRRGRARANEQADEKGGNFPWNGMQLATEKPARKRHYPPKAQGGMVLKQRSHRGSALRGKS

SEQ ID NO: 10637 - protein, 207 aa, Triticum aestivum
  misc_feature (1)..(207): Ceres Seq. ID no. 13596729
MLPPAPLSSVQEFAVRTVPSASKVDIRRCLESVYGFSIAEVRTLNMEGKKHRRGPFLAAKPDYKKAYVTLQAPLSVSPDIFPIGAILGERERKASAAAARRKVVEGAEVEGEREGKGKHWMEDEREGFSRAGCGKIVYGNPGRLGNKRRGRARANEQADEKGGNFPWNGMQLATEKPARKRHYPPKAQGGMVLKQRSHRGSALRGKS

SEQ ID NO: 10638 - protein, 162 aa, Triticum aestivum
  misc_feature (1)..(162): Ceres Seq. ID no. 13596730
MEGKKHRRGPFLAAKPDYKKAYVTLQAPLSVSPDIFPIGAILGERERKASAAAARRKVVEGAEVEGEREGKGKHWMEDEREGFSRAGCGKIVYGNPGRLGNKRRGRARANEQADEKGGNFPWNGMQLATEKPARKRHYPPKAQGGMVLKQRSHRGSALRGKS

SEQ ID NO: 10639 - DNA, 1612 bp, Triticum aestivum
  misc_feature (1)..(1612): Ceres Seq. ID no. 13596743
actgatttccccctccacctatctacccgccgccgccacgcccgccgccgacgacgatggcaactaccgcctcaccctccaccacgaccaccccccggtccttcctctcgtcgccttccttctccctcagggcatcgaagtcgagccacctccggacgacgagaaggctgcccgttaatgtacgctgcgccagtagctctccggccgccgatacatcttacacgacgaaggtctcgcggaatgccaacatagccaagctccaagcaggctatttgtttccggagattgccagaagaagggcagctcatctgctaaagcatcctgacgccaaaattataagtctgggaataggtgacactactgagcccattccggaggtcataacaaatgccatggcagagagagcacatgctttatccacagtggatggctacagtggttatggagctgaacaaggtgaaaagaaactaagggcagcaattgctgcaacctactatgcggatcttggtattgacgaaactgatatatttgtctctgatggtgccaaatgtgacatttctcgcctacaggttctttttggatctaaagtgaagattgcagttcaagatccatcatatcccgcatatgttgattcaagtgttatcatggggcaaactgacttatatcagcaggatgttcagaagtatggaaatattgaatacatgagatgcagtcctgaaaatggatttttccctgatctttccaaggtcccacggacagatatcatattcttctgttcacccaacaatcctactggtgctgctgcatctagggaccagctaacacagttggtcaaattcgcaaaggacaatgggtccataatagtctatgattctgcttatgccatgtacatatcagatgacagcccaaaatccatctttgaaattcctggggcgaaggaggttgccctcgagacagcatctttctctaaatatgctgggttcactggtgtccgactgggttggactgtggtccctaaggagctccttttctccgatgggcatccagtcgctaaagatttcaaccgcatagtctgcacttccttcaatggcgcatcgaccatctctcaggccggtggtttaggctgcctctctccagagggtctaaaggctatgcaagacgttgtcggattctacaaggagaacaccaaaatcattgtcgacacgtttgagtcgctcggattcaacgtctacggtgcgaagaatgccccctatgtgtgggtgcacttccctgaccgcaattcctgggatgtctttgccgagatccttgagaaggcaaacgtggtcactactcccggcagtggatttgggcccggcggtgagggctttgtgagggtcagtgcatttggccacagagagaacattattgaagctgcgagaagactgaagcagctatacaaatgagcgttggtttagcaggtggccccctctgtcgctggggagccaggcaataagaacccagcagcatttggagcacgaggtttgcttctcggctgctgggaagtgttagaatagagacagggtgttgtttttgctccattcgtaaccatttaatactggaaatttgcttgttc

SEQ ID NO: 10640 - protein, 461 aa, Triticum aestivum
  misc_feature (1)..(461): Ceres Seq. ID no. 15221966
MATTASPSTTTTPRSFLSSPSFSLRASKSSHLRTTRRLPVNVRCASSSPAADTSYTTKVSRNANIAKLQAGYLFPEIARRRAAHLLKHPDAKIISLGIGDTTEPIPEVITNAMAERAHALSTVDGYSGYGAEQGEKKLRAAIAATYYADLGIDETDIFVSDGAKCDISRLQVLFGSKVKIAVQDPSYPAYVDSSVIMGQTDLYQQDVQKYGNIEYMRCSPENGFFPDLSKVPRTDIIFFCSPNNPTGAAASRDQLTQLVKFAKDNGSIIVYDSAYAMYISDDSPKSIFEIPGAKEVALETASFSKYAGFTGVRLGWTVVPKELLFSDGHPVAKDFNRIVCTSFNGASTISQAGGLGCLSPEGLKAMQDVVGFYKENTKIIVDTFESLGFNVYGAKNAPYVWVHFPDRNSWDVFAEILEKANVVTTPGSGFGPGGEGFVRVSAFGHRENIIEAARRLKQLYK

SEQ ID NO: 10641 - protein, 349 aa, Triticum aestivum
  misc_feature (1)..(349): Ceres Seq. ID no. 15221967
MAERAHALSTVDGYSGYGAEQGEKKLRAAIAATYYADLGIDETDIFVSDGAKCDISRLQVLFGSKVKIAVQDPSYPAYVDSSVIMGQTDLYQQDVQKYGNIEYMRCSPENGFFPDLSKVPRTDIIFFCSPNNPTGAAASRDQLTQLVKFAKDNGSIIVYDSAYAMYISDDSPKSIFEIPGAKEVALETASFSKYAGFTGVRLGWTVVPKELLFSDGHPVAKDFNRIVCTSFNGASTISQAGGLGCLSPEGLKAMQDVVGFYKENTKIIVDTFESLGFNVYGAKNAPYVWVHFPDRNSWDVFAEILEKANVVTTPGSGFGPGGEGFVRVSAFGHRENIIEAARRLKQLYK

SEQ ID NO: 10642 - protein, 265 aa, Triticum aestivum
  misc_feature (1)..(265): Ceres Seq. ID no. 15221968
MGQTDLYQQDVQKYGNIEYMRCSPENGFFPDLSKVPRTDIIFFCSPNNPTGAAASRDQLTQLVKFAKDNGSIIVYDSAYAMYISDDSPKSIFEIPGAKEVALETASFSKYAGFTGVRLGWTVVPKELLFSDGHPVAKDFNRIVCTSFNGASTISQAGGLGCLSPEGLKAMQDVVGFYKENTKIIVDTFESLGFNVYGAKNAPYVWVHFPDRNSWDVFAEILEKANVVTTPGSGFGPGGEGFVRVSAFGHRENIIEAARRLKQLYK

SEQ ID NO: 10643 - DNA, 1490 bp, Triticum aestivum
  misc_feature (1)..(1490): Ceres Seq. ID no. 13596744
gaacatcctaatcgaaaactccattttcctctccaccccgcaacccacgcagacgcagctcgaccgaccacaactgtgcgcagcagcggcggccggcggagaccgtatcgtaccatggcgatggagggctacgaccgcgagttctggcagttcggcgaccagctccgcctccagacggccaccttctccggcctctccctcggcgactccatctggtcccccgccgacgccgccccccgcgcccgcaacgccgaccccggcctcttctccccctcccaggcggcccacaacaacgccggaaccggattcgccgccgccaagatgaacggcagcctcaacgggcccggcctcatcggctccggcaagctcgccttcggcgccaccaccaccagcaaggccgaccgctacaacaacgtcagcctccccgccgccgccgacgccaagccctacgccaacgccaacggcctgtacggtgccaagcccaacaacaccaataacaacggcttcgggctcaacaagatggctgccggcggcgggggctacagcaacttcaacggcggcaacgagggggtgaagagctacttcaacaagtccatcgggaggccggccagcaacaacaacagcagcagcaacaacttcagcggctacggcggcaagaagggcgccgcggacggcaagaagaagcacgccaagaacgagcgaggggacaacaaccacggcgccgcgtcggagaagcggttcaagacgctgccggcgtccgaggcgctgccccggaacgagcccatcggcggctacatcttcgtctgcaacaacgacaccatggaggagaacctcaagaggcagctcttcgggttgccatccagatacagagattcagtgagggcgatcaggccagggctgcccctcttcctctacaactactccacccaccagctccacggcatcttcgaggctgcgagctttggcggagcgaacatcgacccggcggcctgggaggacaagaagtgcaacggcgagtctcgcttccctgcacaggtgagggtggccacaaggaagatctgcgacccactggaggaggacgccttccgccctatcctgcaccactacgacgggcccaagttccggctggagctcagcatcaccgaggctctctcccttcttgatatatttgaagacaaggacgatgcctgatcgagggctgatcagggattcttgaggaaggaatagcacaataagatcggatcggagaatatatacatacatatgattaatatcattatcaattaatggtgatatatacgtgagttttatgtattgggttttccatctcgcgggctatgaaattatgcgtcccccgttgtggtatcatgcgtggtgatggctgcacaagatgagccctcgtgaacataactaatctattgtcacggctatgtatgtataatattgagactttaaaaaaaaaaaaaaaaaagcttatcgataccgtcgac

SEQ ID NO: 10644 - protein, 396 aa, Triticum aestivum
  misc_feature (1)..(396): Ceres Seq. ID no. 15221969
EHPNRKLHFPLHPATHADAARPTTTVRSSGGRRRPYRTMAMEGYDREFWQFGDQLRLQTATFSGLSLGDSIWSPADAAPRARNADPGLFSPSQAAHNNAGTGFAAAKMNGSLNGPGLIGSGKLAFGATTTSKADRYNNVSLPAAADAKPYANANGLYGAKPNNTNNNGFGLNKMAAGGGGYSNFNGGNEGVKSYFNKSIGRPASNNNSSSNNFSGYGGKKGAADGKKKHAKNERGDNNHGAASEKRFKTLPASEALPRNEPIGGYIFVCNNDTMEENLKRQLFGLPSRYRDSVRAIRPGLPLFLYNYSTHQLHGIFEAASFGGANIDPAAWEDKKCNGESRFPAQVRVATRKICDPLEEDAFRPILHHYDGPKFRLELSITEALSLLDIFEDKDDA

SEQ ID NO: 10645 - protein, 358 aa, Triticum aestivum
  misc_feature (1)..(358): Ceres Seq. ID no. 15221970
MAMEGYDREFWQFGDQLRLQTATFSGLSLGDSIWSPADAAPRARNADPGLFSPSQAAHNNAGTGFAAAKMNGSLNGPGLIGSGKLAFGATTTSKADRYNNVSLPAAADAKPYANANGLYGAKPNNTNNNGFGLNKMAAGGGGYSNFNGGNEGVKSYFNKSIGRPASNNNSSSNNFSGYGGKKGAADGKKKHAKNERGDNNHGAASEKRFKTLPASEALPRNEPIGGYIFVCNNDTMEENLKRQLFGLPSRYRDSVRAIRPGLPLFLYNYSTHQLHGIFEAASFGGANIDPAAWEDKKCNGESRFPAQVRVATRKICDPLEEDAFRPILHHYDGPKFRLELSITEALSLLDIFEDKDDA

SEQ ID NO: 10646 - protein, 356 aa, Triticum aestivum
  misc_feature (1)..(356): Ceres Seq. ID no. 15221971
MEGYDREFWQFGDQLRLQTATFSGLSLGDSIWSPADAAPRARNADPGLFSPSQAAHNNAGTGFAAAKMNGSLNGPGLIGSGKLAFGATTTSKADRYNNVSLPAAADAKPYANANGLYGAKPNNTNNNGFGLNKMAAGGGGYSNFNGGNEGVKSYFNKSIGRPASNNNSSSNNFSGYGGKKGAADGKKKHAKNERGDNNHGAASEKRFKTLPASEALPRNEPIGGYIFVCNNDTMEENLKRQLFGLPSRYRDSVRAIRPGLPLFLYNYSTHQLHGIFEAASFGGANIDPAAWEDKKCNGESRFPAQVRVATRKICDPLEEDAFRPILHHYDGPKFRLELSITEALSLLDIFEDKDDA

SEQ ID NO: 10647 - DNA, 1214 bp, Triticum aestivum
  misc_feature (1)..(1214): Ceres Seq. ID no. 13596762
agagagagagaggtagccaagaacgccatggcctccgctgcttgctagctagccagccagtagtatataaggagcggcaccgcctgtgcgacccggccccgtatcccaagtcagtcgtctcatgctccggtccacgcacccgctcagccccagcagcagcagctcggccccggcgtccagctccggcgagacgatggtggggggcgcgccgagcggggcgaagctgctgcagatcctgaacgtgcgcgtggtgggcaccggcgagcgcgtggtggtgctgtcgcacggcttcggcacggaccagtcggcgtggagccgcgtgctgccgtacctcatccgtgagcaccgcgtggtgctctacgacctcgtctgcgccggcagcgtcaacccggaccacttcgacttccgccgctacaacaacctggacgcctacgtggacgacctcctctccatcctcgacgcgctccgcatcccgcgctgcgccttcgtcggccactccgtctccgccatgatcggcatcctcgcctccatccgccgccccgacctcttcgccaagctcgtcctcatcggcgcctcgcctaggttcttgaacgacagcgactaccacggcgggttcgagctggaggagatccagcaggtgttccaggcgatgtcggccaactacgaggcgtgggccaaggggtacgcgccgctggcggtgggcgcggacgtgccggcggcggtgcaggagttcagccggacgctgttcaacatgcggccggacatctcgctccacgtctgccagagcgtgttcaagacggacctccgcggcgtgctgggcatggtgcaggcgccgtgcgtggtggtgcagaccacccgcgacgtctccgtgccggccaacgtggcggcgtacctcagggcccacctcggcgggcgcaccaccatcgagcccctgccgacggagggccacctcccccacctcagcgcccccagcctcctcgcccaggtgctccgccgcgcgctcgcccggttctagcacgagaaaaaagtgagagagaagaaattactgcagctgcctgctggtttcaccgacccgcgcgtacgtacggggtctaccccgtatttcttctctgtatttttaccgcatccgcatgaatttgtacttgcctcatagactcggaagaaaatgccaggagtgtgtcctgtagcacgtatgagcactcgaaatatttctc

SEQ ID NO: 10648 - protein, 297 aa, Triticum aestivum
  misc_feature (1)..(297): Ceres Seq. ID no. 13596763
MLRSTHPLSPSSSSSAPASSSGETMVGGAPSGAKLLQILNVRVVGTGERVVVLSHGFGTDQSAWSRVLPYLIREHRVVLYDLVCAGSVNPDHFDFRRYNNLDAYVDDLLSILDALRIPRCAFVGHSVSAMIGILASIRRPDLFAKLVLIGASPRFLNDSDYHGGFELEEIQQVFQAMSANYEAWAKGYAPLAVGADVPAAVQEFSRTLFNMRPDISLHVCQSVFKTDLRGVLGMVQAPCVVVQTTRDVSVPANVAAYLRAHLGGRTTIEPLPTEGHLPHLSAPSLLAQVLRRALARF

SEQ ID NO: 10649 - protein, 273 aa, Triticum aestivum
  misc_feature (1)..(273): Ceres Seq. ID no. 13596764
MVGGAPSGAKLLQILNVRVVGTGERVVVLSHGFGTDQSAWSRVLPYLIREHRVVLYDLVCAGSVNPDHFDFRRYNNLDAYVDDLLSILDALRIPRCAFVGHSVSAMIGILASIRRPDLFAKLVLIGASPRFLNDSDYHGGFELEEIQQVFQAMSANYEAWAKGYAPLAVGADVPAAVQEFSRTLFNMRPDISLHVCQSVFKTDLRGVLGMVQAPCVVVQTTRDVSVPANVAAYLRAHLGGRTTIEPLPTEGHLPHLSAPSLLAQVLRRALARF

SEQ ID NO: 10650 - protein, 168 aa, Triticum aestivum
  misc_feature (1)..(168): Ceres Seq. ID no. 13596765
MIGILASIRRPDLFAKLVLIGASPRFLNDSDYHGGFELEEIQQVFQAMSANYEAWAKGYAPLAVGADVPAAVQEFSRTLFNMRPDISLHVCQSVFKTDLRGVLGMVQAPCVVVQTTRDVSVPANVAAYLRAHLGGRTTIEPLPTEGHLPHLSAPSLLAQVLRRALARF

SEQ ID NO: 10651 - DNA, 534 bp, Triticum aestivum
  misc_feature (1)..(534): Ceres Seq. ID no. 13596776
ctcggtcctcgcccacccgcctctccctttcccatctcccttgccttcgccaaaccctcagagatggcctcgacctgcttccgcgccgccgcccgcgccgccaccgcggcatgccgctcggcggcctcccgctccatgccctccgtcggccgctccgccgcccgccgcgccccgctaatctccagggtgccgctggagctgggatgctgcgcgggaatgtcgctgctgccgctgcacagcgcggtggccgcggcgaggctgacttcgcggctgagcacggcgtcccggagctcctccgctctctctcaggatgaaaatgatgatacgtgaaacatttacacaatgtcttaaggtgggcgcttggctattgtggatatgctccaaacatattgctcgacatctgtcttagccgtagtgttatgtcttagacagtcaattccttgtaacattattatttctagtatcaggaacacttcaacgctgtatgcttccatgcttataaatttaaagaataaaggtgctgttgcgatgttc

SEQ ID NO: 10652 - protein, 109 aa, Triticum aestivum
  misc_feature (1)..(109): Ceres Seq. ID no. 13596777
LGPRPPASPFPISLAFAKPSEMASTCFRAAARAATAACRSAASRSMPSVGRSAARRAPLISRVPLELGCCAGMSLLPLHSAVAAARLTSRLSTASRSSSALSQDENDDT

SEQ ID NO: 10653 - protein, 103 aa, Triticum aestivum
  misc_feature (1)..(103): Ceres Seq. ID no. 13596778
RSSPTRLSLSHLPCLRQTLRDGLDLLPRRRPRRHRGMPLGGLPLHALRRPLRRPPRPANLQGAAGAGMLRGNVAAAAAQRGGRGEADFAAEHGVPELLRSLSG

SEQ ID NO: 10654 - protein, 88 aa, Triticum aestivum
  misc_feature (1)..(88): Ceres Seq. ID no. 13596779
MASTCFRAAARAATAACRSAASRSMPSVGRSAARRAPLISRVPLELGCCAGMSLLPLHSAVAAARLTSRLSTASRSSSALSQDENDDT

SEQ ID NO: 10655 - DNA, 1687 bp, Triticum aestivum
  misc_feature (1)..(1687): Ceres Seq. ID no. 13596803
ccttcccccttccccgtctgactttttctccaagttcaactccgccgcccgccccctctccccgatcccgggagagagagagagagatgtcctggcggtgggctctggcgcggcgcgtcgccacgctcgtcggcggcggcaccggcggcccaggcgccgcccaggcgcagaggctcttctcctcctccggcgccctcccggggaggctccaccctgcgccgcctcagattcggaacaaggtggtgggttgcagaggagctgctttcgtgaactcgcggtggctgcatgatgccacccaatgccagactcgccaggacggagtttcgagggctgaagaacaacatgatccatttgaattggttgctgatgaactatcgattcttggaaatagactacggtccatggtggttgctgaggtccctaaactagaatcagctgctgaatatttttttaaagtaggagctgagggaaaaagattccgacctacggttttattgctgatggcatcagctctgaaattcccaataccagaatcgacagatgttggagttttcagtatattggcaagtaagctgcgcacacggcagcaaaacattgccgagataactgaaatgatccatgttgcaagtcttctgcatgatgatgttctggatgatgctgacactaggcgaggtgtcacttcattgaattgcattatgggcaacaagctttctgttttggctggtgactttctcctgtccagagcatgtgtggcacttgcagcacttgggaatacagaggtggtatctctaatggcaactgcagttggacatctagttactggtgaaactatgcaaatgtcaacaagcagagagcaacggcgaagtatggagtactacttgcagaagacgtactacaaaacagcatcattgatatcaaacagttgcaaggctgttgctattcttgcagggcacactgctgagatttcagtgcttgcatacgaatatggtcgaaacctgggtctagccttccagttgatcgacgatgttcttgatttcacaggaacctctgcttcacttgggaagggttcattatctgatattcgtcatggaatcattactgctccaatgctatatgcgatggaagaattcccacaactacaagatgtcgttgaccagggttttgacaatcctgcaaatgttgagatcgccttggactacctccagaagagccggggaatcgaaagaacaaaagagcttgcgcaagaacacgttaaccttgcggtcaaagccatcgaatctctcccagacagtgacgatgaagatgttctgatttcaaggcgcgctcttattgatatcacacagagagtcatcacaaggacaaaatagcatgattatacacagggtggagaagataaggcggagtttcgccacaggtgtagtgttccgcttggaaatttttggtcgccttggtcattgcattctttccattgcccgggttttgtgtaacatttgatgagacttcagggtaaccattcctgggaatcatcctaagtcgcagctgtagtggttttagttactggtggcagcagaatctgtgtattaatatcacgattggcgattgcacgatgacctgatcataagactgtaaccttataaatcgaagtatgtaacactatatacgaggaaaaagtaacctgcttgtgttg

SEQ ID NO: 10656 - protein, 454 aa, Triticum aestivum
  misc_feature (1)..(454): Ceres Seq. ID no. 13596804
FPLPRLTFSPSSTPPPAPSPRSREREREMSWRWALARRVATLVGGGTGGPGAAQAQRLFSSSGALPGRLHPAPPQIRNKVVGCRGAAFVNSRWLHDATQCQTRQDGVSRAEEQHDPFELVADELSILGNRLRSMVVAEVPKLESAAEYFFKVGAEGKRFRPTVLLLMASALKFPIPESTDVGVFSILASKLRTRQQNIAEITEMIHVASLLHDDVLDDADTRRGVTSLNCIMGNKLSVLAGDFLLSRACVALAALGNTEVVSLMATAVGHLVTGETMQMSTSREQRRSMEYYLQKTYYKTASLISNSCKAVAILAGHTAEISVLAYEYGRNLGLAFQLIDDVLDFTGTSASLGKGSLSDIRHGIITAPMLYAMEEFPQLQDVVDQGFDNPANVEIALDYLQKSRGIERTKELAQEHVNLAVKAIESLPDSDDEDVLISRRALIDITQRVITRTK

SEQ ID NO: 10657 - protein, 426 aa, Triticum aestivum
  misc_feature (1)..(426): Ceres Seq. ID no. 13596805
MSWRWALARRVATLVGGGTGGPGAAQAQRLFSSSGALPGRLHPAPPQIRNKVVGCRGAAFVNSRWLHDATQCQTRQDGVSRAEEQHDPFELVADELSILGNRLRSMVVAEVPKLESAAEYFFKVGAEGKRFRPTVLLLMASALKFPIPESTDVGVFSILASKLRTRQQNIAEITEMIHVASLLHDDVLDDADTRRGVTSLNCIMGNKLSVLAGDFLLSRACVALAALGNTEVVSLMATAVGHLVTGETMQMSTSREQRRSMEYYLQKTYYKTASLISNSCKAVAILAGHTAEISVLAYEYGRNLGLAFQLIDDVLDFTGTSASLGKGSLSDIRHGIITAPMLYAMEEFPQLQDVVDQGFDNPANVEIALDYLQKSRGIERTKELAQEHVNLAVKAIESLPDSDDEDVLISRRALIDITQRVITRTK

SEQ ID NO: 10658 - protein, 321 aa, Triticum aestivum
  misc_feature (1)..(321): Ceres Seq. ID no. 13596806
MVVAEVPKLESAAEYFFKVGAEGKRFRPTVLLLMASALKFPIPESTDVGVFSILASKLRTRQQNIAEITEMIHVASLLHDDVLDDADTRRGVTSLNCIMGNKLSVLAGDFLLSRACVALAALGNTEVVSLMATAVGHLVTGETMQMSTSREQRRSMEYYLQKTYYKTASLISNSCKAVAILAGHTAEISVLAYEYGRNLGLAFQLIDDVLDFTGTSASLGKGSLSDIRHGIITAPMLYAMEEFPQLQDVVDQGFDNPANVEIALDYLQKSRGIERTKELAQEHVNLAVKAIESLPDSDDEDVLISRRALIDITQRVITRTK

SEQ ID NO: 10659 - DNA, 1372 bp, Triticum aestivum
  misc_feature (1)..(1372): Ceres Seq. ID no. 13596807
gtgtctggcactggcactgagatggcactgccggtgagctcggccggcctcgtctcgctcctcgtcccctgcctcctctccttcgtcctcctccgcttctccgccctgctggaccccggcgccgccgtgccccgcgtcaagaggtcccctcccctgcccctgcgcttccgccatgacggcgccttcaagatcctccaggtggcggacatgcacttcggcaacggcgccgccacgcgctgccgggacgtggcgccggaggtcggcggcgcgcgctgctccgaccgcaacaccacgcgcttcctgcgccggctcatcgaagcggagaggcccgacctcatagccttcaccggggataacatatttgggggcagtgcaactgatgcagcagaatcactgctcagagcaattagccctgctatagagtacaaggtaccatgggccgccatattaggaaatcatgaccaggaatctacaatgacgcgagaggaactgatgatgttcttgtctttgatggattactcagtatctcaagtaaaccctcctggttttctggtacatgggtttggcaattaccatgttggcatacatgggccatttggatcggggttggtcaatactagtctgcttaacctttacttcctggatagtggggatcgtgaagtggtcgacggaattaaaacttatggatggatcaaagaatctcaacttgcttggctcagtgctacttcaagagaactccagaaaaattcgcttgcccccgcgttatcattcttccacatcccaaatccagaagtccgagagctgtggtacacagattttaagggtgagtatcaggaaggagtggcttgctcattaattaactctggtgtccttgacaccctcgtctccatgggagatgtgaaaggtgtctttcttggtcatgatcatcttaatgatttctgtggcaaccttaacggcatatggttctgttatggcggtggctttggttaccatgcctatggaaggcctcattggccgaggagagctcgggtaatttacactcaactcaagaaagggcagaggtcatggatgggagtcgagtcgatacagacttggaagttgcttgacgacgagaacctttccaagatcgatgagcaggttctctggagagacagtgacaatgactcttaccagagtgtccacttgtaagctccggacactaaaagatctctttgtatgttgtaaacatatttgatcaattacaatacatcaaattggtaggtttgatcaaattagtcatggttggccatggaccaaattagacacctgtatatgatactgctgtatcttgttcatatgcaaatcccttgcttgggttgttgagaccagttcc

SEQ ID NO: 10660 - protein, 395 aa, Triticum aestivum
  misc_feature (1)..(395): Ceres Seq. ID no. 15221975
VSGTGTEMALPVSSAGLVSLLVPCLLSFVLLRFSALLDPGAAVPRVKRSPPLPLRFRHDGAFKILQVADMHFGNGAATRCRDVAPEVGGARCSDRNTTRFLRRLIEAERPDLIAFTGDNIFGGSATDAAESLLRAISPAIEYKVPWAAILGNHDQESTMTREELMMFLSLMDYSVSQVNPPGFLVHGFGNYHVGIHGPFGSGLVNTSLLNLYFLDSGDREVVDGIKTYGWIKESQLAWLSATSRELQKNSLAPALSFFHIPNPEVRELWYTDFKGEYQEGVACSLINSGVLDTLVSMGDVKGVFLGHDHLNDFCGNLNGIWFCYGGGFGYHAYGRPHWPRRARVIYTQLKKGQRSWMGVESIQTWKLLDDENLSKIDEQVLWRDSDNDSYQSVHL

SEQ ID NO: 10661 - protein, 388 aa, Triticum aestivum
  misc_feature (1)..(388): Ceres Seq. ID no. 15221976
MALPVSSAGLVSLLVPCLLSFVLLRFSALLDPGAAVPRVKRSPPLPLRFRHDGAFKILQVADMHFGNGAATRCRDVAPEVGGARCSDRNTTRFLRRLIEAERPDLIAFTGDNIFGGSATDAAESLLRAISPAIEYKVPWAAILGNHDQESTMTREELMMFLSLMDYSVSQVNPPGFLVHGFGNYHVGIHGPFGSGLVNTSLLNLYFLDSGDREVVDGIKTYGWIKESQLAWLSATSRELQKNSLAPALSFFHIPNPEVRELWYTDFKGEYQEGVACSLINSGVLDTLVSMGDVKGVFLGHDHLNDFCGNLNGIWFCYGGGFGYHAYGRPHWPRRARVIYTQLKKGQRSWMGVESIQTWKLLDDENLSKIDEQVLWRDSDNDSYQSVHL

SEQ ID NO: 10662 - protein, 326 aa, Triticum aestivum
  misc_feature (1)..(326): Ceres Seq. ID no. 15221977
MHFGNGAATRCRDVAPEVGGARCSDRNTTRFLRRLIEAERPDLIAFTGDNIFGGSATDAAESLLRAISPAIEYKVPWAAILGNHDQESTMTREELMMFLSLMDYSVSQVNPPGFLVHGFGNYHVGIHGPFGSGLVNTSLLNLYFLDSGDREVVDGIKTYGWIKESQLAWLSATSRELQKNSLAPALSFFHIPNPEVRELWYTDFKGEYQEGVACSLINSGVLDTLVSMGDVKGVFLGHDHLNDFCGNLNGIWFCYGGGFGYHAYGRPHWPRRARVIYTQLKKGQRSWMGVESIQTWKLLDDENLSKIDEQVLWRDSDNDSYQSVHL

SEQ ID NO: 10663 - DNA, 816 bp, Triticum aestivum
  misc_feature (1)..(816): Ceres Seq. ID no. 13596812
cctagaacattctaatcgaaaaacacacccaacccccccacccccccaccccctcccccagcagccgccgcaaaagagagcaggaagcgaggaggaactttacaagatagggcatcgaatccgcctccttcttcctcgcgcggtcgtctccgaggcctccgacatggcgaacgcggcatcgggcatggctgtggacgacgaatgcaagctcaagttcctggagctgaaggcgaagcgaacccaccgcttcatcatctacaagatagacgacaagaagaagatggttgttgtggagaaagtcggtgagcctgccctgaactatgaggactttgctgccagcctccccaccaatgaatgcagatacgcgatattcgactatgactttgtcaccgaggagaactgccaaaagagcaagatattcttcgtcgcatggtctcctgacaccgcacgcgtgaggagcaagatgatctacgcaagctccaaggagaggttcaagagggagctcgacggcatccaggtggagctgcaggcgacagacccgaccgaggtcggcttcgatgtcatccaaggccgtgccaactgagcaccatggctgtgctgctgcttaccttaagtatgagcctctgatgaggatttagcgtgctcgccgaggctggtcatgagctgtttaccatgaggcaattgtgatttgagttgccagtatgtaccacctaaggaagatgtaagctatgactggcgcgacgacaaatgtatcctttctggttgttgattcgtggatcctgatatccccttcttgcctgctaaagatcagttgcg

SEQ ID NO: 10664 - protein, 193 aa, Triticum aestivum
  misc_feature (1)..(193): Ceres Seq. ID no. 13596813
LEHSNRKTHPTPPPPHPLPQQPPQKRAGSEEELYKIGHRIRLLLPRAVVSEASDMANAASGMAVDDECKLKFLELKAKRTHRFIIYKIDDKKKMVVVEKVGEPALNYEDFAASLPTNECRYAIFDYDFVTEENCQKSKIFFVAWSPDTARVRSKMIYASSKERFKRELDGIQVELQATDPTEVGFDVIQGRAN

SEQ ID NO: 10665 - protein, 139 aa, Triticum aestivum
  misc_feature (1)..(139): Ceres Seq. ID no. 13596814
MANAASGMAVDDECKLKFLELKAKRTHRFIIYKIDDKKKMVVVEKVGEPALNYEDFAASLPTNECRYAIFDYDFVTEENCQKSKIFFVAWSPDTARVRSKMIYASSKERFKRELDGIQVELQATDPTEVGFDVIQGRAN

SEQ ID NO: 10666 - protein, 132 aa, Triticum aestivum
  misc_feature (1)..(132): Ceres Seq. ID no. 13596815
MAVDDECKLKFLELKAKRTHRFIIYKIDDKKKMVVVEKVGEPALNYEDFAASLPTNECRYAIFDYDFVTEENCQKSKIFFVAWSPDTARVRSKMIYASSKERFKRELDGIQVELQATDPTEVGFDVIQGRAN

SEQ ID NO: 10667 - DNA, 944 bp, Triticum aestivum
  misc_feature (1)..(944): Ceres Seq. ID no. 13596833
agaacatccctaatcgaaaaatccctcataaatcgccgcggtcggtggctcgctggaatccgatccgattccgttcccattcacactccaattccagccggagcggagcggccgggcgccatggcggcggcacgcggcggcggatcggcggcgagggtcggcgactgggacgtcgagctggggcccggctgggattggcgctccatcccgcagttgctctcctccgcctgcatcttcatctgctccggaggctgttttggatgctgtgagaaggccgcaaaacacgtaggccatctttccaagagcttaatggcccatgctcagaatcccacggtggcagaggaattttggagtacgaccaccatcgaggttgatccagcagacctacgagcaccatacaacacatcctcttgggaccttgatctgcatggagtgggaagcagccataacctgggcgactctgctaatcatggtttttctctttggcaacaaactagggatgaatggactgagaatacaaggttaaggcaacaacctgtggtgaaacagatccaggaaccagtgttgagttggaatgcagcgtatgaaagtttgcttggatcaaataaaccattcacgcagcccatccctctacatgagatggttgatttccttgtggacatctgggagcaagaggggctgtatgactagcacagatgtgttccgcgagaataacatagctgtagatctgatgtggtaaggagggtgaggcctgtcatacttgttttttgtgcatggaggcctgtgggctgtggcggttgtattggtagaaagaacggtccagatttaatcaccttgtcgaatttgtcaaagaaagcagctggtgagaaagatgcgtgacagcgatttgtgaacataaatgtcatctgtattgattgagaaatgagaagaagaaattagcttcg

SEQ ID NO: 10668 - protein, 229 aa, Triticum aestivum
  misc_feature (1)..(229): Ceres Seq. ID no. 13596834
RTSLIEKSLINRRGRWLAGIRSDSVPIHTPIPAGAERPGAMAAARGGGSAARVGDWDVELGPGWDWRSIPQLLSSACIFICSGGCFGCCEKAAKHVGHLSKSLMAHAQNPTVAEEFWSTTTIEVDPADLRAPYNTSSWDLDLHGVGSSHNLGDSANHGFSLWQQTRDEWTENTRLRQQPVVKQIQEPVLSWNAAYESLLGSNKPFTQPIPLHEMVDFLVDIWEQEGLYD

SEQ ID NO: 10669 - protein, 189 aa, Triticum aestivum
  misc_feature (1)..(189): Ceres Seq. ID no. 13596835
MAAARGGGSAARVGDWDVELGPGWDWRSIPQLLSSACIFICSGGCFGCCEKAAKHVGHLSKSLMAHAQNPTVAEEFWSTTTIEVDPADLRAPYNTSSWDLDLHGVGSSHNLGDSANHGFSLWQQTRDEWTENTRLRQQPVVKQIQEPVLSWNAAYESLLGSNKPFTQPIPLHEMVDFLVDIWEQEGLYD

SEQ ID NO: 10670 - protein, 126 aa, Triticum aestivum
  misc_feature (1)..(126): Ceres Seq. ID no. 13596836
MAHAQNPTVAEEFWSTTTIEVDPADLRAPYNTSSWDLDLHGVGSSHNLGDSANHGFSLWQQTRDEWTENTRLRQQPVVKQIQEPVLSWNAAYESLLGSNKPFTQPIPLHEMVDFLVDIWEQEGLYD

SEQ ID NO: 10671 - DNA, 739 bp, Triticum aestivum
  misc_feature (1)..(739): Ceres Seq. ID no. 13596861
aatgtccagcatctgcttaatggcagagacctatgtggatcacggtgcagtcttcaagttgattaccgcagcagcaccagttcctatgagcccactcgagagtttggcatcgtcagctgttcggacggctaatgtctccaaggcatcgctcatcttggtcctcacgaggggaggtacgactgcaaggctcgtcgcgaagtacaggccagcgatgccagtcttgaactgcgtggttccagagctgaagaccgacaatgatttcgactggacttgcagcgacgaggctcctgcaaggcagagtcaaattgttaggggcctgatcccaatgttgagtgccgctaccgcaaaggcttctgatactgaggccaccgaggaggccgtcagttttgccctggattatgccaagaagctcggcctctgcaagtcgggagattcagttgttgcggtgcatcgtctcagcgcatcatccctcgtcaggatcttgacagtggattagggtcaggtgatgttggctcatgggggcaaattttgttaggttgttatcggatcatcgctatcattttgttggctcatcccacgtcgtgagtcctatattacgtcttgtgttcagctacgcatagtaaagagttggtgtcgcccattctgaatatcttgctaaataatacatactcgctactcaatatatatgccacttcaaaaaaaaaagaaaaaaaaaaaaaaaaaagcttatcgataccgt

SEQ ID NO: 10672 - protein, 164 aa, Triticum aestivum
  misc_feature (1)..(164): Ceres Seq. ID no. 13596862
MSSICLMAETYVDHGAVFKLITAAAPVPMSPLESLASSAVRTANVSKASLILVLTRGGTTARLVAKYRPAMPVLNCVVPELKTDNDFDWTCSDEAPARQSQIVRGLIPMLSAATAKASDTEATEEAVSFALDYAKKLGLCKSGDSVVAVHRLSASSLVRILTVD

SEQ ID NO: 10673 - protein, 158 aa, Triticum aestivum
  misc_feature (1)..(158): Ceres Seq. ID no. 13596863
MAETYVDHGAVFKLITAAAPVPMSPLESLASSAVRTANVSKASLILVLTRGGTTARLVAKYRPAMPVLNCVVPELKTDNDFDWTCSDEAPARQSQIVRGLIPMLSAATAKASDTEATEEAVSFALDYAKKLGLCKSGDSVVAVHRLSASSLVRILTVD

SEQ ID NO: 10674 - protein, 136 aa, Triticum aestivum
  misc_feature (1)..(136): Ceres Seq. ID no. 13596864
MSPLESLASSAVRTANVSKASLILVLTRGGTTARLVAKYRPAMPVLNCVVPELKTDNDFDWTCSDEAPARQSQIVRGLIPMLSAATAKASDTEATEEAVSFALDYAKKLGLCKSGDSVVAVHRLSASSLVRILTVD

SEQ ID NO: 10675 - DNA, 1415 bp, Triticum aestivum
  misc_feature (1)..(1415): Ceres Seq. ID no. 13596868
attaaaccgagcgccagtggatctctcctcgggcatcggcatcggagcggagagagagagagagagagccacccagccatgagatggtatgcatcggtaggctgagggcgctggtgcttcgtgcggcggcgggcgcgggcgcgggcaggcgccggtgggccagggtcctgtgcggtcgggcggtcgatgtgtgcgtgacaccccgtccgcgcgggcacggttggcgtggattccgggcggtggctggcgccaggacgaagatgatgctcgattcctccgactctgactccggcgctccggcggggcagctgcagctgcagcgccgcgcggttgctgctgggacccagccgcaggatggagggtacgccagtgcggggtggcagagggaagatggtaaactgaaatgtgggtattcaagttttagagggaaaagggctacaatggaggatttctatgatgtaaaactaactgaaattgatggacacgctgttagcctatttggtgtattcgatggtcatggggggtcacgtgctgctgagtatttgaaggagcatttgttcgagaaccttatgaaacaccccaagttcttgactgatacaaagcttgctataagtgaaacatatcagaagacagatgcagatttcttagaatcagaatcaagtgctttcagggatgatggttccacagcttcgactgcggttttagtgggtggccatctatatgtagcaaatgttggtgactcccgtgctgttatttcaaaagccgggaaagctagggcactctcagtagatcacaaacctaacaggtctgatgaacgcaagagaattgaaaatgctggaggtgttgtcatctgggctggtacttggagggtaggtggcgtactggcaatgtcccgtgcgtttggtaatcgtctactgaagccatttgtggtggcagaacctgaaattcaggaagaattgattaatggagaattggagagcctggttcttgccagtgatgggctttgggatgccgtagaaaatgaggaagctgtgtcccttgcaaaaacagaagatgtgccagagtctgcggccaggaaactgacggagattgcctactctcgtggcagcgctgacaatattacatgcatcgtggtgcaattccaccatgataaaattacaggatgagatggactacagctgatttaaggtttctctgcttcaggcctctttttatcctgcaagcggagtggggtttctcccacatctatttttgcctctgtggcaactgctcaggacttcctctattgattctttcctttgtgtggcagaccttttctcttttgagaattgtaatgggaatttttgagtttgatgtatccatgtctatgtctgtactaatacttgttatatttaatataaaaagagtgagttacg

SEQ ID NO: 10676 - protein, 360 aa, Triticum aestivum
  misc_feature (1)..(360): Ceres Seq. ID no. 13596869
MVCIGRLRALVLRAAAGAGAGRRRWARVLCGRAVDVCVTPRPRGHGWRGFRAVAGARTKMMLDSSDSDSGAPAGQLQLQRRAVAAGTQPQDGGYASAGWQREDGKLKCGYSSFRGKRATMEDFYDVKLTEIDGHAVSLFGVFDGHGGSRAAEYLKEHLFENLMKHPKFLTDTKLAISETYQKTDADFLESESSAFRDDGSTASTAVLVGGHLYVANVGDSRAVISKAGKARALSVDHKPNRSDERKRIENAGGVVIWAGTWRVGGVLAMSRAFGNRLLKPFVVAEPEIQEELINGELESLVLASDGLWDAVENEEAVSLAKTEDVPESAARKLTEIAYSRGSADNITCIVVQFHHDKITG

SEQ ID NO: 10677 - protein, 301 aa, Triticum aestivum
  misc_feature (1)..(301): Ceres Seq. ID no. 13596870
MMLDSSDSDSGAPAGQLQLQRRAVAAGTQPQDGGYASAGWQREDGKLKCGYSSFRGKRATMEDFYDVKLTEIDGHAVSLFGVFDGHGGSRAAEYLKEHLFENLMKHPKFLTDTKLAISETYQKTDADFLESESSAFRDDGSTASTAVLVGGHLYVANVGDSRAVISKAGKARALSVDHKPNRSDERKRIENAGGVVIWAGTWRVGGVLAMSRAFGNRLLKPFVVAEPEIQEELINGELESLVLASDGLWDAVENEEAVSLAKTEDVPESAARKLTEIAYSRGSADNITCIVVQFHHDKITG

SEQ ID NO: 10678 - protein, 300 aa, Triticum aestivum
  misc_feature (1)..(300): Ceres Seq. ID no. 13596871
MLDSSDSDSGAPAGQLQLQRRAVAAGTQPQDGGYASAGWQREDGKLKCGYSSFRGKRATMEDFYDVKLTEIDGHAVSLFGVFDGHGGSRAAEYLKEHLFENLMKHPKFLTDTKLAISETYQKTDADFLESESSAFRDDGSTASTAVLVGGHLYVANVGDSRAVISKAGKARALSVDHKPNRSDERKRIENAGGVVIWAGTWRVGGVLAMSRAFGNRLLKPFVVAEPEIQEELINGELESLVLASDGLWDAVENEEAVSLAKTEDVPESAARKLTEIAYSRGSADNITCIVVQFHHDKITG

SEQ ID NO: 10679 - DNA, 1127 bp, Triticum aestivum
  misc_feature (1)..(1127): Ceres Seq. ID no. 13596876
agaacatcctaatcgaaaagaccccaccgccgcccccatcatgccgccgctcctcctcgccgcgctcgcgctcgccctggccctctcccacgccgccgccggaggaggcaccgggttctacgacccggcgcgggttacccagatctcctggcgccccagggcgttcctgtacagcggcttcctctcgcacgccgagtgcgaccacctcatcaagctggccaaggggaggctggagaagtcgatggtggccgacaacgagtccgggaagagtgtcatgagccaggtgcgcacaagctctggcaccttcttgtccaagcgcgaggatgaaattatctctggaattgaaaagcgtgtagctgcttggacgtttctccctgaagaaaatgccgaatcaatgcaggttctgcattatgaagttggtcagaagtatgatgcccacttcgattattttagtgacaaaaagaacgtgaagcgtggtggtcatcgggttgctactgttcttatgtacctgacagatgtgaagaagggtggagagaccgtgttcccaattgctgagggaagagatttacaacataaggatgaaacgtggtcggagcgcgcgagacatggcctggcagtgaagccaagaaaaggcgatgcgctactcttcttcagtctccacgttaacgcgacaacagatccgagcagtcttcacgcgagctgcccagtagtcgagggcgagaagtggtctgccacaaaatggatccacgtccggtcattcgacaaccctccagatgttatgacggacgcacggtgttctgatgacaatgagcaatgccctagatgggctgctcttggtgagtgttacaagaacgcaaaatacatggtgggcacgaaggacaccctcgggtcttgccgcaaaagttgcggggtctgcgatgcttgaaccccggcaccaatcttaactgaatttgcatggttactgagatgtagattacaaaaccaaataggttcttagtagcatggcattagatgtttactctccttgtcatgtagtttgacctcagagcatcttgatataaagcaaaaagggaattgactttgtttcagaagaatttggatataacctgatggtatcaaatatttcc

SEQ ID NO: 10680 - protein, 307 aa, Triticum aestivum
  misc_feature (1)..(307): Ceres Seq. ID no. 15221988
EHPNRKDPTAAPIMPPLLLAALALALALSHAAAGGGTGFYDPARVTQISWRPRAFLYSGFLSHAECDHLIKLAKGRLEKSMVADNESGKSVMSQVRTSSGTFLSKREDEIISGIEKRVAAWTFLPEENAESMQVLHYEVGQKYDAHFDYFSDKKNVKRGGHRVATVLMYLTDVKKGGETVFPIAEGRDLQHKDETWSERARHGLAVKPRKGDALLFFSLHVNATTDPSSLHASCPVVEGEKWSATKWIHVRSFDNPPDVMTDARCSDDNEQCPRWAALGECYKNAKYMVGTKDTLGSCRKSCGVCDA

SEQ ID NO: 10681 - protein, 294 aa, Triticum aestivum
  misc_feature (1)..(294): Ceres Seq. ID no. 15221989
MPPLLLAALALALALSHAAAGGGTGFYDPARVTQISWRPRAFLYSGFLSHAECDHLIKLAKGRLEKSMVADNESGKSVMSQVRTSSGTFLSKREDEIISGIEKRVAAWTFLPEENAESMQVLHYEVGQKYDAHFDYFSDKKNVKRGGHRVATVLMYLTDVKKGGETVFPIAEGRDLQHKDETWSERARHGLAVKPRKGDALLFFSLHVNATTDPSSLHASCPVVEGEKWSATKWIHVRSFDNPPDVMTDARCSDDNEQCPRWAALGECYKNAKYMVGTKDTLGSCRKSCGVCDA

SEQ ID NO: 10682 - protein, 227 aa, Triticum aestivum
  misc_feature (1)..(227): Ceres Seq. ID no. 15221990
MVADNESGKSVMSQVRTSSGTFLSKREDEIISGIEKRVAAWTFLPEENAESMQVLHYEVGQKYDAHFDYFSDKKNVKRGGHRVATVLMYLTDVKKGGETVFPIAEGRDLQHKDETWSERARHGLAVKPRKGDALLFFSLHVNATTDPSSLHASCPVVEGEKWSATKWIHVRSFDNPPDVMTDARCSDDNEQCPRWAALGECYKNAKYMVGTKDTLGSCRKSCGVCDA

SEQ ID NO: 10683 - DNA, 1231 bp, Triticum aestivum
  misc_feature (1)..(1231): Ceres Seq. ID no. 13596891
gaacatcctaatcgaaaaactgttcaccggcagcttacctcacctcggcgagttccactccatccgccaaagacgctctctactccccggacggcggcaatggagcaagcgagcccgccggcggggtcggcgaggaacaggaaggtggtgctgcgggagtacatcagccgcgcgccgagggaggacgacatggcgctcgtcgacggcggcgccgtgccgctgcgcgtccccgagggcgccgccggcccggccgtgctggtgaagaacctctacctctcctgcgacccctacatgcgcggccggatgcgggacttccacggctcctacatccccccgttcaagcccggatctgttatagaagggctgggcgtggcgagagtggtggattccactcatccggggttcgttgccggtgacattgtttcgggaatgactggctgggaggaatacagcttgattgacaagcctgaacagctgaacaagattcagcaaagtggcataccactctcctactatttggggcttctcggcatgcctggttttacagcttatgttggattctatgaaatttgctcgccgaaggaaggagagtttgtctttgtttctgctgcatcgggagcagttggccagattgttggtcaacttgcaaagctccatggctgctatgttgtcggaagtgctggaacaaatgaaaaagttaaactcctaaaagataagtttggattcgatgcagcttttaattacaaagaggagcctgacttgactgcagccctaaaaaggtactttcctgaaggtatcgacatctacttcgagaatgtaggaggaccaatgctagatgctgtactccttaacatgcggatgcatggtcgcatagcagtatgtgggatggtctcccagcacggcatgactgatcctgcagggatccacaacctcttctgcctggtgccaaaacggattagtatgaagggcttcatccagagtgattacatcaacttattcccacagttcctcgattacatgaccaagcattacaaggatggcaagattgcatatgtagaagacatgagcattgggctagagaacacaccagctgcctttgttggtctattcagcggtaaaaatgtgggcaaacaagtcgtgtgtgtgtcacaagagtgaagtacgtgtacattctgatgaatatacaaatatctcatgattcaaataaataataaaaattgtgaaccctctc

SEQ ID NO: 10684 - protein, 385 aa, Triticum aestivum
  misc_feature (1)..(385): Ceres Seq. ID no. 15221991
EHPNRKTVHRQLTSPRRVPLHPPKTLSTPRTAAMEQASPPAGSARNRKVVLREYISRAPREDDMALVDGGAVPLRVPEGAAGPAVLVKNLYLSCDPYMRGRMRDFHGSYIPPFKPGSVIEGLGVARVVDSTHPGFVAGDIVSGMTGWEEYSLIDKPEQLNKIQQSGIPLSYYLGLLGMPGFTAYVGFYEICSPKEGEFVFVSAASGAVGQIVGQLAKLHGCYVVGSAGTNEKVKLLKDKFGFDAAFNYKEEPDLTAALKRYFPEGIDIYFENVGGPMLDAVLLNMRMHGRIAVCGMVSQHGMTDPAGIHNLFCLVPKRISMKGFIQSDYINLFPQFLDYMTKHYKDGKIAYVEDMSIGLENTPAAFVGLFSGKNVGKQVVCVSQE

SEQ ID NO: 10685 - protein, 352 aa, Triticum aestivum
  misc_feature (1)..(352): Ceres Seq. ID no. 15221992
MEQASPPAGSARNRKVVLREYISRAPREDDMALVDGGAVPLRVPEGAAGPAVLVKNLYLSCDPYMRGRMRDFHGSYIPPFKPGSVIEGLGVARVVDSTHPGFVAGDIVSGMTGWEEYSLIDKPEQLNKIQQSGIPLSYYLGLLGMPGFTAYVGFYEICSPKEGEFVFVSAASGAVGQIVGQLAKLHGCYVVGSAGTNEKVKLLKDKFGFDAAFNYKEEPDLTAALKRYFPEGIDIYFENVGGPMLDAVLLNMRMHGRIAVCGMVSQHGMTDPAGIHNLFCLVPKRISMKGFIQSDYINLFPQFLDYMTKHYKDGKIAYVEDMSIGLENTPAAFVGLFSGKNVGKQVVCVSQE

SEQ ID NO: 10686 - protein, 322 aa, Triticum aestivum
  misc_feature (1)..(322): Ceres Seq. ID no. 15221993
MALVDGGAVPLRVPEGAAGPAVLVKNLYLSCDPYMRGRMRDFHGSYIPPFKPGSVIEGLGVARVVDSTHPGFVAGDIVSGMTGWEEYSLIDKPEQLNKIQQSGIPLSYYLGLLGMPGFTAYVGFYEICSPKEGEFVFVSAASGAVGQIVGQLAKLHGCYVVGSAGTNEKVKLLKDKFGFDAAFNYKEEPDLTAALKRYFPEGIDIYFENVGGPMLDAVLLNMRMHGRIAVCGMVSQHGMTDPAGIHNLFCLVPKRISMKGFIQSDYINLFPQFLDYMTKHYKDGKIAYVEDMSIGLENTPAAFVGLFSGKNVGKQVVCVSQE

SEQ ID NO: 10687 - DNA, 1318 bp, Triticum aestivum
  misc_feature (1)..(1318): Ceres Seq. ID no. 13596892
aagcttcttctgtgtcttccagcttgggcagcaggcaggcgtgtgagctcgaatccaagaggccggagacgatggatctggtgaacggcgcgctcaactgggcggcgatgcccgccatggtcgcctccctcctgctcttctacccgccctactacctcttcaagctctgctactccttcctctcctacctcttccccgacgacctcaagcgcaaggtcgtcctcatcaccggcgcctcctccggcatcggcgagcaactggcctaccagtacgccaccaagggggcatgccttgccctgctcgccaggagggagtggagcctgcggcaggtcgccgaccgcgccttcgagctcggcgcgcccgacgtcatcattctccccggcgacgtcgcagaccccgacgactgcaacagatttgttcaggccacaatcgaccactacggccgattggaccatcttgtgtgcaacgctggaattgcgagcgtgggcgcttttcaggagattcctgacgttactaactacagcccgcagcttgatgtcaacttctggggtgcagttcagtccacttttgctgctctgccccatcttaaaaggacccgagggaggatcgtggtcaccgcctccgcaaccggatggaaccctgttccgcgaatggttttctataatgccgccaatgccgcactgattaacttcttcgagaccctacggtcggagcttggtagtgaagttggcatcacaatagtgacgcctgggtggatcgagtccgagatgtccaaaggcaagtttctcaaggagcacggcggcgtggaggttgatcaagaatatcgagatgcccaaatcggtctcttcccggtggagtacgcgaagaactgcgcgagggccatggtgcaggcagctcgccaaggtgaccgttacctcaccgtgccgtcatggttcggaacaatgtacctgtggagggtgtttgcgccggaggtcgtcgagttctgctaccgcctcctgtatatgcacggccatggcggtggcgaccagaccgacgcgccgagcaagacgatggcccagggtggcgggaagcagatgctgtacccctcctcgctgcgctcttcggacgtcaaaaacgactagaaacttactatagttcgcatcctttgatcgaggacgtggatcctggtgtgcaggctagtttgttctctactaagctttaggtgtggatgctactgctggttagctagtttgtaatcccgaataagctgtgttctgtgttttgtaatattagtgttgtgttgtgtgcttgtaatattagttctgtgtttgagactgcg

SEQ ID NO: 10688 - protein, 372 aa, Triticum aestivum
  misc_feature (1)..(372): Ceres Seq. ID no. 15221994
ASSVSSSLGSRQACELESKRPETMDLVNGALNWAAMPAMVASLLLFYPPYYLFKLCYSFLSYLFPDDLKRKVVLITGASSGIGEQLAYQYATKGACLALLARREWSLRQVADRAFELGAPDVIILPGDVADPDDCNRFVQATIDHYGRLDHLVCNAGIASVGAFQEIPDVTNYSPQLDVNFWGAVQSTFAALPHLKRTRGRIVVTASATGWNPVPRMVFYNAANAALINFFETLRSELGSEVGITIVTPGWIESEMSKGKFLKEHGGVEVDQEYRDAQIGLFPVEYAKNCARAMVQAARQGDRYLTVPSWFGTMYLWRVFAPEVVEFCYRLLYMHGHGGGDQTDAPSKTMAQGGGKQMLYPSSLRSSDVKND

SEQ ID NO: 10689 - protein, 349 aa, Triticum aestivum
  misc_feature (1)..(349): Ceres Seq. ID no. 15221995
MDLVNGALNWAAMPAMVASLLLFYPPYYLFKLCYSFLSYLFPDDLKRKVVLITGASSGIGEQLAYQYATKGACLALLARREWSLRQVADRAFELGAPDVIILPGDVADPDDCNRFVQATIDHYGRLDHLVCNAGIASVGAFQEIPDVTNYSPQLDVNFWGAVQSTFAALPHLKRTRGRIVVTASATGWNPVPRMVFYNAANAALINFFETLRSELGSEVGITIVTPGWIESEMSKGKFLKEHGGVEVDQEYRDAQIGLFPVEYAKNCARAMVQAARQGDRYLTVPSWFGTMYLWRVFAPEVVEFCYRLLYMHGHGGGDQTDAPSKTMAQGGGKQMLYPSSLRSSDVKND

SEQ ID NO: 10690 - protein, 337 aa, Triticum aestivum
  misc_feature (1)..(337): Ceres Seq. ID no. 15221996
MPAMVASLLLFYPPYYLFKLCYSFLSYLFPDDLKRKVVLITGASSGIGEQLAYQYATKGACLALLARREWSLRQVADRAFELGAPDVIILPGDVADPDDCNRFVQATIDHYGRLDHLVCNAGIASVGAFQEIPDVTNYSPQLDVNFWGAVQSTFAALPHLKRTRGRIVVTASATGWNPVPRMVFYNAANAALINFFETLRSELGSEVGITIVTPGWIESEMSKGKFLKEHGGVEVDQEYRDAQIGLFPVEYAKNCARAMVQAARQGDRYLTVPSWFGTMYLWRVFAPEVVEFCYRLLYMHGHGGGDQTDAPSKTMAQGGGKQMLYPSSLRSSDVKND

SEQ ID NO: 10691 - DNA, 741 bp, Triticum aestivum
  misc_feature (1)..(741): Ceres Seq. ID no. 13596897
cttcctccgcttccgcctcgtcccgtctccctccctcccctccctcggcggccgccgccgcccccatcgcggcgagtcccctcgcccgcagccgacctaagctgctgccgccgcgtgcgcccggggtcaccgaggaggcggcgccatgaggttggagaagtgctggttctgctcctccaccgtctaccccggccacggcatccagttcgtccgcaacgacgccaagatctttcggttctgccgatcaaaatgccacaagaacttcaagatgaagaggaaccctcgcaaggttaagtggaccaaggcgtacaggcgcctgcgtggaaaggacatgacacaggatgccacgtttgagttcgagaggaagaggaacaggccggagcgctacgaccgtaacgtcactgagcagactctgaaggccatcccgcttatcacgaagatcagacatgaacggcagaagaaacacattacagagagacagaaggctggtaagagcatggtgcgaaagagcgacgccaaggagctggatcaggatattggcatggttcccaagaaggagaccgagaactatgtagccaagcagaaggttctagtttctcagctgaagaccgaagagaatcttatggaagagtaatggaaccaaacagttttgtgtgtgcgcgcatktvatcmttttcwatawagtggagtactttgtgtttcatcagattgtagacgacagtgaacatttgttttgtactt

SEQ ID NO: 10692 - protein, 162 aa, Triticum aestivum
  misc_feature (1)..(162): Ceres Seq. ID no. 15221997
MRLEKCWFCSSTVYPGHGIQFVRNDAKIFRFCRSKCHKNFKMKRNPRKVKWTKAYRRLRGKDMTQDATFEFERKRNRPERYDRNVTEQTLKAIPLITKIRHERQKKHITERQKAGKSMVRKSDAKELDQDIGMVPKKETENYVAKQKVLVSQLKTEENLMEE

SEQ ID NO: 10693 - protein, 121 aa, Triticum aestivum
  misc_feature (1)..(121): Ceres Seq. ID no. 15221998
MKRNPRKVKWTKAYRRLRGKDMTQDATFEFERKRNRPERYDRNVTEQTLKAIPLITKIRHERQKKHITERQKAGKSMVRKSDAKELDQDIGMVPKKETENYVAKQKVLVSQLKTEENLMEE

SEQ ID NO: 10694 - protein, 100 aa, Triticum aestivum
  misc_feature (1)..(100): Ceres Seq. ID no. 15221999
MTQDATFEFERKRNRPERYDRNVTEQTLKAIPLITKIRHERQKKHITERQKAGKSMVRKSDAKELDQDIGMVPKKETENYVAKQKVLVSQLKTEENLMEE

SEQ ID NO: 10695 - DNA, 1237 bp, Triticum aestivum
  misc_feature (1)..(1237): Ceres Seq. ID no. 13596918
agacggctcggcgattggcctcacggcgagctatctaggtcacgaggaatccactcccgactgccgttaggctggccggctggcttgttgccgcggacagccttggcgaatcacggtcctgataggcgcccctcctcccggcgatggggggtcgcaatcggcgatggccgacgaagcgccaccacgacgcctcttcgaaccctcgccccccgcctccgtattccggatacagtcacgtggataatcaatgccaagtcccattatgggaaagggaattttgcagtcttgttggtggcatttcgtggcagaggttctgcgagaacaagcactttgcctatatgtacaaggagatagagcagtgggatgactcgggagcttttgagaatttccagaacgcaaaatcaaggttctggtctcattaccatggccaaccttctgatataccttaccccaaccctgatctgtacattgatgaggtcgaccatcgttgcgaggtcgaccccgagttggtagctgacctggacaaggtgcgggtaccctttgaggcggacaacgagcccgccgtagctgccaataacaggtgtgcccagaaccagtcagggaactgggacatctatctagaaaagccgacccctgaggtgaacaagtgggaggcggacaactcggcatccaacgcaggttggggagcgagtcaggagcctctgagcagctggaacaaaatcagcaccggctggggcgaggccctggcggagcccggttggggcagctcaggcaacaaccattgcccagggaataactggagcagctcccatggagtatccagcaacaataacacatactaccaggatccaggcggcgcatatggcaggaaaaggaacagtggaggcgggtactcccagcagaggaacagcaagcagaggaaccaggctgagagccaccaccagaggggcagatggcaggatcacagggacagggggaggcatggcgagcggttcctgtttgacaataggccaaatgggcagcgagcagagcgcggcttctgagttggtggcggtgagtgtgcgagaaaccgtggaaaggttttggttgtatgataaatgatgcgcattttctagtgtcttttgtgcggagctgcagcttgtaatggttggatgttgcaacaacgctttacctgtaaggagatgtgtcaggttttgttgctgctctttgtgatatgttctgttttctctcttcctgt

SEQ ID NO: 10696 - protein, 299 aa, Triticum aestivum
  misc_feature (1)..(299): Ceres Seq. ID no. 13596919
MGGRNRRWPTKRHHDASSNPRPPPPYSGYSHVDNQCQVPLWEREFCSLVGGISWQRFCENKHFAYMYKEIEQWDDSGAFENFQNAKSRFWSHYHGQPSDIPYPNPDLYIDEVDHRCEVDPELVADLDKVRVPFEADNEPAVAANNRCAQNQSGNWDIYLEKPTPEVNKWEADNSASNAGWGASQEPLSSWNKISTGWGEALAEPGWGSSGNNHCPGNNWSSSHGVSSNNNTYYQDPGGAYGRKRNSGGGYSQQRNSKQRNQAESHHQRGRWQDHRDRGRHGERFLFDNRPNGQRAERGF

SEQ ID NO: 10697 - protein, 234 aa, Triticum aestivum
  misc_feature (1)..(234): Ceres Seq. ID no. 13596920
MYKEIEQWDDSGAFENFQNAKSRFWSHYHGQPSDIPYPNPDLYIDEVDHRCEVDPELVADLDKVRVPFEADNEPAVAANNRCAQNQSGNWDIYLEKPTPEVNKWEADNSASNAGWGASQEPLSSWNKISTGWGEALAEPGWGSSGNNHCPGNNWSSSHGVSSNNNTYYQDPGGAYGRKRNSGGGYSQQRNSKQRNQAESHHQRGRWQDHRDRGRHGERFLFDNRPNGQRAERGF

SEQ ID NO: 10698 - DNA, 1628 bp, Triticum aestivum
  misc_feature (1)..(1628): Ceres Seq. ID no. 13596921
aaagaaattctcgccccccaacccaacccccaaccaaccaaccaaacccaaccgaagaagccgagccgaaccccactccgccgatcagccgctatgcgctgaggccgaatcgccgcagcccgaggaggagaagggggtggaggggatggaggggagtggcgggtccgcgtcgctgccgccgttcctcaccaagacgtacgagatggtggacgagccggccacggacgcggtggtggcgtggacgccgtccggcaccagcttcgtcgtcctcagccaggccgacttctgccgggatcttctccccaagtacttcaagcacaacaacttctccagcttcgtgcgccagctcaacacctacggctttaggaaggtagatccagaacaatgggaatttgcaaatgaagaattcctacgagatcagcggcatcggttgaaaaatatccatagacgcaagccaatattcagccattcatcacacactcagggtgccggaccattagctgatagtgaaaggagggactatgaggaggaaattgagaggctcaagtgtgataatgcatcactaaatttacagcttgagaggaagaaaactgatatggagagtaaaatgaaggctttggaagacaaactatttgctattgaggatcagcagaaaaatcttatatcttatgtcagagaaattgtgaatgcacctggatttctttctagcttcgtagaacaatctgatcatcatggaaagaagaggagactgcctaaaccaatttcattccatgatgatgcttgtactcaggggaaccagattatgcattgtgacttggtcaactcaccagctcatgaactttttaggtcatcatttgacaaaatggaatcatccttaaattccttggagaatttcttcaaagaagcgagtgaggcatttggtaatgatgtttcatctgatggtgatgtcccaggtcattcttcagctgttgttcttacagagctccattcaactggggagagtgacccccacgcgcaatcacctccgtccatgatgcatacttgttcagctggtgtaggagattcacactcttctcgtgatatagcagagtccgccagctgtccagagagtcctctgcttccccaagctcattctcgtgcagattcacgagctaaggtctccgagatagatgtcaatttagaacctgctgttacagaaaatggtccatcgagagatcaacaacccacccaagaccttcctgctgacgcaaatgatggattttggcagcagtttcttaccgagcagcctgggttgacccatgcacaccaggaggcccaatcagaacggcgagacagagaagcaaatcaaacaacagcaggagaccgcggaagtttttggttggacaagagcagcatcgaacagatgacaaaaaaactggggcatctcacctcagctgagaaaacctgagtatgtatttctcatttcttgtagctgaaaatgaccagtacagaaacattaggaccatggcacctcccagtgaggtatgcctgctaacatttactttgcagtgtatcagaattgtgtgtgttagattgttgcagactatgtgctatatactaccttgatatacgttcatactttgttagcg

SEQ ID NO: 10699 - protein, 481 aa, Triticum aestivum
  misc_feature (1)..(481): Ceres Seq. ID no. 15222003
KKFSPPNPTPNQPTKPNRRSRAEPHSADQPLCAEAESPQPEEEKGVEGMEGSGGSASLPPFLTKTYEMVDEPATDAVVAWTPSGTSFVVLSQADFCRDLLPKYFKHNNFSSFVRQLNTYGFRKVDPEQWEFANEEFLRDQRHRLKNIHRRKPIFSHSSHTQGAGPLADSERRDYEEEIERLKCDNASLNLQLERKKTDMESKMKALEDKLFAIEDQQKNLISYVREIVNAPGFLSSFVEQSDHHGKKRRLPKPISFHDDACTQGNQIMHCDLVNSPAHELFRSSFDKMESSLNSLENFFKEASEAFGNDVSSDGDVPGHSSAVVLTELHSTGESDPHAQSPPSMMHTCSAGVGDSHSSRDIAESASCPESPLLPQAHSRADSRAKVSEIDVNLEPAVTENGPSRDQQPTQDLPADANDGFWQQFLTEQPGLTHAHQEAQSERRDREANQTTAGDRGSFWLDKSSIEQMTKKLGHLTSAEKT

SEQ ID NO: 10700 - protein, 433 aa, Triticum aestivum
  misc_feature (1)..(433): Ceres Seq. ID no. 15222004
MEGSGGSASLPPFLTKTYEMVDEPATDAVVAWTPSGTSFVVLSQADFCRDLLPKYFKHNNFSSFVRQLNTYGFRKVDPEQWEFANEEFLRDQRHRLKNIHRRKPIFSHSSHTQGAGPLADSERRDYEEEIERLKCDNASLNLQLERKKTDMESKMKALEDKLFAIEDQQKNLISYVREIVNAPGFLSSFVEQSDHHGKKRRLPKPISFHDDACTQGNQIMHCDLVNSPAHELFRSSFDKMESSLNSLENFFKEASEAFGNDVSSDGDVPGHSSAVVLTELHSTGESDPHAQSPPSMMHTCSAGVGDSHSSRDIAESASCPESPLLPQAHSRADSRAKVSEIDVNLEPAVTENGPSRDQQPTQDLPADANDGFWQQFLTEQPGLTHAHQEAQSERRDREANQTTAGDRGSFWLDKSSIEQMTKKLGHLTSAEKT

SEQ ID NO: 10701 - protein, 414 aa, Triticum aestivum
  misc_feature (1)..(414): Ceres Seq. ID no. 15222005
MVDEPATDAVVAWTPSGTSFVVLSQADFCRDLLPKYFKHNNFSSFVRQLNTYGFRKVDPEQWEFANEEFLRDQRHRLKNIHRRKPIFSHSSHTQGAGPLADSERRDYEEEIERLKCDNASLNLQLERKKTDMESKMKALEDKLFAIEDQQKNLISYVREIVNAPGFLSSFVEQSDHHGKKRRLPKPISFHDDACTQGNQIMHCDLVNSPAHELFRSSFDKMESSLNSLENFFKEASEAFGNDVSSDGDVPGHSSAVVLTELHSTGESDPHAQSPPSMMHTCSAGVGDSHSSRDIAESASCPESPLLPQAHSRADSRAKVSEIDVNLEPAVTENGPSRDQQPTQDLPADANDGFWQQFLTEQPGLTHAHQEAQSERRDREANQTTAGDRGSFWLDKSSIEQMTKKLGHLTSAEKT

SEQ ID NO: 10702 - DNA, 869 bp, Triticum aestivum
  misc_feature (1)..(869): Ceres Seq. ID no. 13596932
cactagacgctcctccctatttagcaaatatgccatcctttgtggcgcgtcggaaaaaaccagagctcgtgctaccggcgcaagcaacaccgcacgagactctggctctctccgacgttgacgacgccatagacctgcgatttctgcagcctgccatcgagttctttcgtgctgtcgacatcgacattgatgaccacgggctggggcggcctgccacagctgccaaggtagtcaaggcggccctcgcgaaggctctggtgcactactacccgctggcaggccgtctccgggaggctgctgggggaaaactagccgtcgagtgcacaggggaaggcgtcgtgttcgtggaggcggaggcagacgtgtccatggatgagctcggcaagccgtcgcctctgccaccatacccgtgcgtggaagaactgttgtgcgaggtgggcgaccctagggttgttcttggagttcccttgttcttcatgcaggaggcactggacttccgatgggcgaagcgagttggcggcggcttacccatggtgggggacatctccttcgactctgtgagttgccacatgaggtgtaagaatggcaagggtcaggacgtgatcgtgataaacatgatattgccaggacctgcaatggacaagtttgagaaggagattgctgtttgggtgtgcaatggacaagacgaaaagtagtggtccggctcaattcgatcagcctcatacacccctactaaaataaaccccagcgagcaagtgcttaatcaccatgtcgttttgagtttgcgactatgtaggtgaggtcgtcgtaaatttgtaaacttctaaataaagtgccccctctcaataaattatgtttatgttaaacac

SEQ ID NO: 10703 - protein, 230 aa, Triticum aestivum
  misc_feature (1)..(230): Ceres Seq. ID no. 13596933
LDAPPYLANMPSFVARRKKPELVLPAQATPHETLALSDVDDAIDLRFLQPAIEFFRAVDIDIDDHGLGRPATAAKVVKAALAKALVHYYPLAGRLREAAGGKLAVECTGEGVVFVEAEADVSMDELGKPSPLPPYPCVEELLCEVGDPRVVLGVPLFFMQEALDFRWAKRVGGGLPMVGDISFDSVSCHMRCKNGKGQDVIVINMILPGPAMDKFEKEIAVWVCNGQDEK

SEQ ID NO: 10704 - protein, 221 aa, Triticum aestivum
  misc_feature (1)..(221): Ceres Seq. ID no. 13596934
MPSFVARRKKPELVLPAQATPHETLALSDVDDAIDLRFLQPAIEFFRAVDIDIDDHGLGRPATAAKVVKAALAKALVHYYPLAGRLREAAGGKLAVECTGEGVVFVEAEADVSMDELGKPSPLPPYPCVEELLCEVGDPRVVLGVPLFFMQEALDFRWAKRVGGGLPMVGDISFDSVSCHMRCKNGKGQDVIVINMILPGPAMDKFEKEIAVWVCNGQDEK

SEQ ID NO: 10705 - DNA, 1828 bp, Triticum aestivum
  misc_feature (1)..(1828): Ceres Seq. ID no. 13596935
cattataccacaccaaaccagcaccagcacacggcataccacaagcagcagcagcagccgccgccgtggacttcgacgctcaagtactcgagctctagcgcttcgctctgtagcggctctcgcacggatcaaagccgatggcgacggcggtccaccagctctccttctccgcgccgagcgcgggcgccaggcggcggcagagccgggcgtccgcgtccgcgtccacgacggaccggcacgaggtgctatcgccgaatcgccggctgccgctgcggaaggtgccgggcgagcacggcccgccgctgctgggcgcgctcaaggaccggctcgagtacttctacgggcccggcgggcgcgacggcttcttcgcggcccgcgtccgcgcgcaccgctccacggtggtgcgcctcaacatgccccccggccccttcgtggccaaggacccccgcgtggtggcgctcctcgacgccgcctccttcccggtcctcttcgacacctcgctcgtcgacaagaccgacctcttcaccggcaccttcatgccctccaccgacctcaccggcggctaccgcgtgctctcctacgtcgaccccgccgagcccaaccacgcgccgctcaagtcgctcctcttccacctcctcacccaccgccgccagcacgtcatccccacgttccgcgaggtctacggcggcctcttcggccgcatggagaacgacctcgcccgcgtcggcaaggccgacttcggcaactacaacgacgacgccgccttcggcttcctctgccaggcgctcctcggccgtgaccccgtcgactcgccgctccgcgacgaagggcccaagctggtagccaagtggcttctgttccagatcagcccgctgctcagcctcggcctggcgggcctgcccaccctcgtggaggacggcctcctccacagcttccgcctcccgccggcgctcattaagaaggactacggccgcctcgccgacttcttccgcgacgccggcaaggcggtgatcgacgagggcgagcggctgggcatcgcgcgggaggaggcggtgcacaacatcctcttcgccatgtgcttcaactccttcggcggcatcaagatcctgttcccgtcgctggtgaagtggctgggccgcgccggcgggcgggtgcacggccggctcgcgacggaggtgcgcgccgtcgtgcgcgccaacggcggggaggtgacgatgcgggcgctggccgagatgccgctggtgaagtcagccgtgtacgaggcgctgcggatcgagccgccggtggcgatgcagtacgggcgcgcgaagcgggacatggtggtggagagccacgactacgggtacgaggtgcgggagggggagctgctgttcgggtaccagcccatggccaccaaggacccgcgcgtgttcccgcgcgccgaggactacgtgcccgacaggttcctgggcgaggacggcgagcggctgctccggtacgtggtgtggtccaacggtcccgagtcggcgacgcccacgctgcaggacaagcagtgcgccggcaaggacttcgtggtgctcatcgcgcgcctcctcgtcgccgagctcttcctccggtacgactccttcgacgtccaggtcgggtcctcgccgctcgggtcgtcggtcaccatcacatcgcttaagaaggccaccttctgaggcatcgccacgtgtactcatttttttccctctgcttttctcgatcgatgccagtattacaccatgcatgcgatacgctagcatggagtgatagaggatttgtgcaacaaaaatttcttttcctagcaaagatgagcccgatttttccc

SEQ ID NO: 10706 - protein, 513 aa, Triticum aestivum
  misc_feature (1)..(513): Ceres Seq. ID no. 13596936
MATAVHQLSFSAPSAGARRRQSRASASASTTDRHEVLSPNRRLPLRKVPGEHGPPLLGALKDRLEYFYGPGGRDGFFAARVRAHRSTVVRLNMPPGPFVAKDPRVVALLDAASFPVLFDTSLVDKTDLFTGTFMPSTDLTGGYRVLSYVDPAEPNHAPLKSLLFHLLTHRRQHVIPTFREVYGGLFGRMENDLARVGKADFGNYNDDAAFGFLCQALLGRDPVDSPLRDEGPKLVAKWLLFQISPLLSLGLAGLPTLVEDGLLHSFRLPPALIKKDYGRLADFFRDAGKAVIDEGERLGIAREEAVHNILFAMCFNSFGGIKILFPSLVKWLGRAGGRVHGRLATEVRAVVRANGGEVTMRALAEMPLVKSAVYEALRIEPPVAMQYGRAKRDMVVESHDYGYEVREGELLFGYQPMATKDPRVFPRAEDYVPDRFLGEDGERLLRYVVWSNGPESATPTLQDKQCAGKDFVVLIARLLVAELFLRYDSFDVQVGSSPLGSSVTITSLKKATF

SEQ ID NO: 10707 - protein, 421 aa, Triticum aestivum
  misc_feature (1)..(421): Ceres Seq. ID no. 13596937
MPPGPFVAKDPRVVALLDAASFPVLFDTSLVDKTDLFTGTFMPSTDLTGGYRVLSYVDPAEPNHAPLKSLLFHLLTHRRQHVIPTFREVYGGLFGRMENDLARVGKADFGNYNDDAAFGFLCQALLGRDPVDSPLRDEGPKLVAKWLLFQISPLLSLGLAGLPTLVEDGLLHSFRLPPALIKKDYGRLADFFRDAGKAVIDEGERLGIAREEAVHNILFAMCFNSFGGIKILFPSLVKWLGRAGGRVHGRLATEVRAVVRANGGEVTMRALAEMPLVKSAVYEALRIEPPVAMQYGRAKRDMVVESHDYGYEVREGELLFGYQPMATKDPRVFPRAEDYVPDRFLGEDGERLLRYVVWSNGPESATPTLQDKQCAGKDFVVLIARLLVAELFLRYDSFDVQVGSSPLGSSVTITSLKKATF

SEQ ID NO: 10708 - protein, 380 aa, Triticum aestivum
  misc_feature (1)..(380): Ceres Seq. ID no. 13596938
MPSTDLTGGYRVLSYVDPAEPNHAPLKSLLFHLLTHRRQHVIPTFREVYGGLFGRMENDLARVGKADFGNYNDDAAFGFLCQALLGRDPVDSPLRDEGPKLVAKWLLFQISPLLSLGLAGLPTLVEDGLLHSFRLPPALIKKDYGRLADFFRDAGKAVIDEGERLGIAREEAVHNILFAMCFNSFGGIKILFPSLVKWLGRAGGRVHGRLATEVRAVVRANGGEVTMRALAEMPLVKSAVYEALRIEPPVAMQYGRAKRDMVVESHDYGYEVREGELLFGYQPMATKDPRVFPRAEDYVPDRFLGEDGERLLRYVVWSNGPESATPTLQDKQCAGKDFVVLIARLLVAELFLRYDSFDVQVGSSPLGSSVTITSLKKATF

SEQ ID NO: 10709 - DNA, 1080 bp, Triticum aestivum
  misc_feature (1)..(1080): Ceres Seq. ID no. 13596939
atcatagattacttccaagtagataattgaatattaaataagtaaaaattctgcacaatgtagtactgataacatggtgttagttcctatgttttttttgcttaaagcctatattagtcgaatttaattggtttttacagttacacccacagattacagcattcaatgagttcgatttgtggcagaatcaatgttgttcgttgttctgttccatgattcctagcagttttttgtttcatcataggtggtcacattcagattcagatttttataattacattcagattttttttacttaatgatgatatgtgtagccatcctccctggcgctgcaatctgtgagtatgttggtgcattgccgaggactggagagaaaaggtcagggtctgatatgcatatgccagcacttcatgttgagaacaattccgaggcaccatcggcaccggagtactgtatcgatgctggatccgttggaagtttcgcaaggttcataaaccacagctgcaaccctaacctctttgcccagtgtgtcctaaccaatcaccacgacatcaagctagaaaaggtgatgctttttgctgccgacacggtagcacctaacgtcgacaactgcgatgtcaggaactccctcacaattgccgaatatgtcgctgaaattacaacttctacagacagaccaaggagttgagttgtgaggcccccacctacatgacacaccaaactgatatcaatgagaaaaggcgtagtattcccattgactggttgactgaggtgcaatacaagcttgagctactaggtgaaacactattccttgctgtcaacatcattgatagatcaatgcatagaaaaacatgtctcgagttttctcttgaatgaaacctgcaagtttctcaactatttagtgaagcttaccttgaaaagaactataaatactacaggaaggagagcaagacaatgacagttcgttggaatatggatttttagaggatatttatgggttcaaacctctgtaattacatattactttccttgctgatgctattgctcatgttataaaactgtcctacttcgcaaaaaatg

SEQ ID NO: 10710 - protein, 129 aa, Triticum aestivum
  misc_feature (1)..(129): Ceres Seq. ID no. 15222006
MMICVAILPGAAICEYVGALPRTGEKRSGSDMHMPALHVENNSEAPSAPEYCIDAGSVGSFARFINHSCNPNLFAQCVLTNHHDIKLEKVMLFAADTVAPNVDNCDVRNSLTIAEYVAEITTSTDRPRS

SEQ ID NO: 10711 - protein, 128 aa, Triticum aestivum
  misc_feature (1)..(128): Ceres Seq. ID no. 15222007
MICVAILPGAAICEYVGALPRTGEKRSGSDMHMPALHVENNSEAPSAPEYCIDAGSVGSFARFINHSCNPNLFAQCVLTNHHDIKLEKVMLFAADTVAPNVDNCDVRNSLTIAEYVAEITTSTDRPRS

SEQ ID NO: 10712 - protein, 98 aa, Triticum aestivum
  misc_feature (1)..(98): Ceres Seq. ID no. 15222008
MHMPALHVENNSEAPSAPEYCIDAGSVGSFARFINHSCNPNLFAQCVLTNHHDIKLEKVMLFAADTVAPNVDNCDVRNSLTIAEYVAEITTSTDRPRS

SEQ ID NO: 10713 - DNA, 1226 bp, Triticum aestivum
  misc_feature (1)..(1226): Ceres Seq. ID no. 13596944
gtgcttctaagtttgctcctagctggcttgcttgctccttgtccatgccagccacggccatggagctctccagcctgccgctagtcctgctgctctgcttgatggcgggctcgtcgacggctgccctgccggcgctgcccgggatggacagggtgcggcagcaggtcgacagggcgaacaggcacggcccgtccattgggctcgtcatgtcgtacgtcgccgaggacaccgcgctccaggcctccggctacttcaggccttggcacgtccagcccttcattgacctctacggacggaggtttcacatcgggagtattcgaggtgtgaatgttatatacgcattgacagggcaacgcaggttgaatgcagctgtcactgtacaaactctcgtcgacgtctttaccgtgtctggtattgtccattatggcacagcaggaagctctaatgattcaatgtcatttggagatgtcagtgtccccaagttagttgcttatacaggcgcttggacatggaagaagtacaaatcacttaaagaagagtcaacagaactaaactttggacaatttaacgtcccgaatggaggagagaacctgctagggtctctgaaatacagaaatgaggagctatactcagttggcaagcccatggaagaagttttctggttacctgtagattcagcatggttcaaaatagcagaaggacttaaggtcaaccttgaaagatgtaatgacactttctgcttaccaaaaacgccacaagtggttcatgggctaaaaggagcatcagccgacatgtttctagacaatgcagaataccggaagttccttttcagagaatttgcagtgtcaacaatagatgaggagagcgcagcagtggtgatgacaacaacatctcctggcgtacctgtgattgtgttccggggagtatctgatctggctggagtggaaccaacatggtcatcaacaagcctgatgaacctggcatctattaatgcactcaaagtggcagtggagttcattgctacaattggcaggcagatgtcgacaccattagcacaaagttcaaaaaactgagacaaaagagagctgacatgtccatggagcaggactgtagaatagttttaaacagcaattgggaacaaaattcagagtgataagtgacccttagcttcaaagtacacaaaacattcaacagaagaattatgtattcaatatatactcaattgt

SEQ ID NO: 10714 - protein, 356 aa, Triticum aestivum
  misc_feature (1)..(356): Ceres Seq. ID no. 13596945
ASKFAPSWLACSLSMPATAMELSSLPLVLLLCLMAGSSTAALPALPGMDRVRQQVDRANRHGPSIGLVMSYVAEDTALQASGYFRPWHVQPFIDLYGRRFHIGSIRGVNVIYALTGQRRLNAAVTVQTLVDVFTVSGIVHYGTAGSSNDSMSFGDVSVPKLVAYTGAWTWKKYKSLKEESTELNFGQFNVPNGGENLLGSLKYRNEELYSVGKPMEEVFWLPVDSAWFKIAEGLKVNLERCNDTFCLPKTPQVVHGLKGASADMFLDNAEYRKFLFREFAVSTIDEESAAVVMTTTSPGVPVIVFRGVSDLAGVEPTWSSTSLMNLASINALKVAVEFIATIGRQMSTPLAQSSKN

SEQ ID NO: 10715 - protein, 342 aa, Triticum aestivum
  misc_feature (1)..(342): Ceres Seq. ID no. 13596946
MPATAMELSSLPLVLLLCLMAGSSTAALPALPGMDRVRQQVDRANRHGPSIGLVMSYVAEDTALQASGYFRPWHVQPFIDLYGRRFHIGSIRGVNVIYALTGQRRLNAAVTVQTLVDVFTVSGIVHYGTAGSSNDSMSFGDVSVPKLVAYTGAWTWKKYKSLKEESTELNFGQFNVPNGGENLLGSLKYRNEELYSVGKPMEEVFWLPVDSAWFKIAEGLKVNLERCNDTFCLPKTPQVVHGLKGASADMFLDNAEYRKFLFREFAVSTIDEESAAVVMTTTSPGVPVIVFRGVSDLAGVEPTWSSTSLMNLASINALKVAVEFIATIGRQMSTPLAQSSKN

SEQ ID NO: 10716 - protein, 337 aa, Triticum aestivum
  misc_feature (1)..(337): Ceres Seq. ID no. 13596947
MELSSLPLVLLLCLMAGSSTAALPALPGMDRVRQQVDRANRHGPSIGLVMSYVAEDTALQASGYFRPWHVQPFIDLYGRRFHIGSIRGVNVIYALTGQRRLNAAVTVQTLVDVFTVSGIVHYGTAGSSNDSMSFGDVSVPKLVAYTGAWTWKKYKSLKEESTELNFGQFNVPNGGENLLGSLKYRNEELYSVGKPMEEVFWLPVDSAWFKIAEGLKVNLERCNDTFCLPKTPQVVHGLKGASADMFLDNAEYRKFLFREFAVSTIDEESAAVVMTTTSPGVPVIVFRGVSDLAGVEPTWSSTSLMNLASINALKVAVEFIATIGRQMSTPLAQSSKN

SEQ ID NO: 10717 - DNA, 1386 bp, Triticum aestivum
  misc_feature (1)..(1386): Ceres Seq. ID no. 13596954
gaacatcctaatcgaaaaataggcctcttcttagaaaaaaaaagaggacagactaagcggagaatcgagggtttcggcttccttgtcatctcgccgtctccgacgccggcgaccagggagcgagacctccaacccccgtcctctcgccggctgcgtgtttccccgttccgtagaccaggtatgaagagggccgcgccgtcggaggagccggtggagctctcttccggcgacgacctgagctcggattccgacgatgaggccgggaacgggaaaggcgagaactccttccggctgcccatgtcctccaaatctgcagctccagcaaaaggtgcattgatcaggagggctgaaatgtatcaagagtacatgaagcacatcccaattcctgatcactgcagctccttgatcccatccacatcatggctgggactcggaagatcggtgaagcagttgtacgagcagcccttgcattacctcaccaacatcctcttgagacagtgggatcaacagagggttgggagcgataatgagcaccagcctctggatgctatcattcaccctatgaaagctcaagccctcatttgggccactgaagaagtccataggctgaccacctctagtgaccacttagagaaggtctgggctaaagaccccatgtatcatgctaacatagatccagtgttcccttccctaaagttgcattagcaaacatcgcaagttggaccgtcttatcctgtctattttgtttctgcctgctgtgtaatctggcacattttggttgttagcgaagtgatatgaaccatatatcactgatgttaaacgtacgatatgtcatggtcagggtctcttttaacgctgattttagctctctgaacagcgtctttgttgaagaagaagaaacctggtggtgtggatttcagtgctttgagccggcacgggtatcgtggcggaccatctatactgacagttgctcctccaaaggttgaacctaactggacttggtccactgggaaagatcgcaacgagaaggaagttctaaccgagtcttttgaagagcgggaacgcacaagggctgcagtaactgaaggagagaagcttatcggtgtgatgaacccccaaccaaggcagaccgagaaagagaaggatgctgcttcattctcacagaaggagaagcggaagagagaccgtgggcaggccagcaggggtaagaactacgtcgaggaggagaagcggctcctgagggggagtggtgtctactctggcttcgatacttgacagtgtccagaacatatgttatttgtccgtgttagcttccgtcgttactgttggtgtgtctgctgtttagttttgtcgcgaagttcactctggtcaatcggggctatgctt

SEQ ID NO: 10718 - protein, 234 aa, Triticum aestivum
  misc_feature (1)..(234): Ceres Seq. ID no. 13596955
EHPNRKIGLFLEKKRGQTKRRIEGFGFLVISPSPTPATRERDLQPPSSRRLRVSPFRRPGMKRAAPSEEPVELSSGDDLSSDSDDEAGNGKGENSFRLPMSSKSAAPAKGALIRRAEMYQEYMKHIPIPDHCSSLIPSTSWLGLGRSVKQLYEQPLHYLTNILLRQWDQQRVGSDNEHQPLDAIIHPMKAQALIWATEEVHRLTTSSDHLEKVWAKDPMYHANIDPVFPSLKLH

SEQ ID NO: 10719 - protein, 174 aa, Triticum aestivum
  misc_feature (1)..(174): Ceres Seq. ID no. 13596956
MKRAAPSEEPVELSSGDDLSSDSDDEAGNGKGENSFRLPMSSKSAAPAKGALIRRAEMYQEYMKHIPIPDHCSSLIPSTSWLGLGRSVKQLYEQPLHYLTNILLRQWDQQRVGSDNEHQPLDAIIHPMKAQALIWATEEVHRLTTSSDHLEKVWAKDPMYHANIDPVFPSLKLH

SEQ ID NO: 10720 - protein, 135 aa, Triticum aestivum
  misc_feature (1)..(135): Ceres Seq. ID no. 13596957
MSSKSAAPAKGALIRRAEMYQEYMKHIPIPDHCSSLIPSTSWLGLGRSVKQLYEQPLHYLTNILLRQWDQQRVGSDNEHQPLDAIIHPMKAQALIWATEEVHRLTTSSDHLEKVWAKDPMYHANIDPVFPSLKLH

SEQ ID NO: 10721 - DNA, 1290 bp, Triticum aestivum
  misc_feature (1)..(1290): Ceres Seq. ID no. 13596993
atccgaatcttcccttgcaacaatcatccgtaaggccgtcatcgccttccgccccgcggccgcggggagacgcgatgcagggactccaccgccgctaccgatggatcaaggagtgggttccgcaggacctcgtcatcgccggcggcccgtgcgcgctttacaagtgggtgcgagaggataggttggctgctcttaagtccaaggacaaggaagaaggggcatgcactgcaaagcctgaccctgccactgaggttcttttcttatgcagctatgatggctgtgggaaaacttttgttgatgcaggtgctcttaggaaacatgcccacgtgcatggggagaggcagtatgtctgtcactacgagggatgtgggaagaaatttttagatagctctaagttgaagaggcattttcttattcatacaggcgagaagaacttcgtctgccctcatgaaggttgtggcaaggctttctcattggattttaatttgaaggcacacatgaaaacccattttgcggataactatcatatgtgtccatacccagaatgtggtcgaagatttacacaggaatctaaactaagggctcatttcagggcacagcatgagaagaatccaggtgggcctgtaatgaaccgcaatgcactaggagatcaccctcataacacagcgaaatctctggtaacaccaccagttccatcagctgatcgtccgtatgtctgcccttacgatgggtgtgccaaggcatacattcacgagtacaaacttaacctccatttgaagaaagagcaccccaaccactattcagatgctggtgctcaagctggtccgtcgaggggcacagtatcgaagaattcccgtagaagcaagccaaacctcacaaccagcatgccactcgccaagatctctaagcgcagcggttatacggtgccatctccagctgtcagtatccctgaggagcatcagtggccaaggaaggtgttgtacgaagatgatagtgaggagaccgaggaagagggagataaccttgaggaggggggattgagatacagagctgctagcgacggcgatgacgatgaggagacggaggaagaagaatgagagctatgggttgctgtgcacatagtttatgatcaccggactggattatagttctgcatacatgtaacaatacatattaagggtggctagttaggcagaaacttgtgggctgcatgtaggtgtctcaatttaaggctattaattaacttattaagaagggtaatagatcatcacgcttccgtgctgagaatcc

SEQ ID NO: 10722 - protein, 364 aa, Triticum aestivum
  misc_feature (1)..(364): Ceres Seq. ID no. 15222013
PNLPLQQSSVRPSSPSAPRPRGDAMQGLHRRYRWIKEWVPQDLVIAGGPCALYKWVREDRLAALKSKDKEEGACTAKPDPATEVLFLCSYDGCGKTFVDAGALRKHAHVHGERQYVCHYEGCGKKFLDSSKLKRHFLIHTGEKNFVCPHEGCGKAFSLDFNLKAHMKTHFADNYHMCPYPECGRRFTQESKLRAHFRAQHEKNPGGPVMNRNALGDHPHNTAKSLVTPPVPSADRPYVCPYDGCAKAYIHEYKLNLHLKKEHPNHYSDAGAQAGPSRGTVSKNSRRSKPNLTTSMPLAKISKRSGYTVPSPAVSIPEEHQWPRKVLYEDDSEETEEEGDNLEEGGLRYRAASDGDDDEETEEEE

SEQ ID NO: 10723 - protein, 340 aa, Triticum aestivum
  misc_feature (1)..(340): Ceres Seq. ID no. 15222014
MQGLHRRYRWIKEWVPQDLVIAGGPCALYKWVREDRLAALKSKDKEEGACTAKPDPATEVLFLCSYDGCGKTFVDAGALRKHAHVHGERQYVCHYEGCGKKFLDSSKLKRHFLIHTGEKNFVCPHEGCGKAFSLDFNLKAHMKTHFADNYHMCPYPECGRRFTQESKLRAHFRAQHEKNPGGPVMNRNALGDHPHNTAKSLVTPPVPSADRPYVCPYDGCAKAYIHEYKLNLHLKKEHPNHYSDAGAQAGPSRGTVSKNSRRSKPNLTTSMPLAKISKRSGYTVPSPAVSIPEEHQWPRKVLYEDDSEETEEEGDNLEEGGLRYRAASDGDDDEETEEEE

SEQ ID NO: 10724 - protein, 199 aa, Triticum aestivum
  misc_feature (1)..(199): Ceres Seq. ID no. 15222015
MKTHFADNYHMCPYPECGRRFTQESKLRAHFRAQHEKNPGGPVMNRNALGDHPHNTAKSLVTPPVPSADRPYVCPYDGCAKAYIHEYKLNLHLKKEHPNHYSDAGAQAGPSRGTVSKNSRRSKPNLTTSMPLAKISKRSGYTVPSPAVSIPEEHQWPRKVLYEDDSEETEEEGDNLEEGGLRYRAASDGDDDEETEEEE

SEQ ID NO: 10725 - DNA, 1116 bp, Triticum aestivum
  misc_feature (1)..(1116): Ceres Seq. ID no. 13597006
gagatctcgacttgggaactctcacaagaagacgccgagaggagaggagaggatgctgctgaggagctcctccacgccattcctgcgctccttcctcacctcctcctcctcccctacgcccccttcctccctccagctccggcgggccttctccgacggccacctcccttcgctcaacccctcctcctccggcgacaacgacagcaacagaaccaccggcctccacaccgagctctccttctctgtctacaacaccttcagcaaggccaagctggagccccaccaggagcaggagatggaggaggagcaggagcaggcgccgcagcctgagctgccggagctgccgctgttcctggcgaggggcatggggatcgaccgcctcgcctccggcctcttcaccgccggcatgggctccgaggctgccctggccaggatggccagcggggtggaccagaaggcggtgctggcgctggacgcccagtacaaggagatggtggacgagcagcccggcaacgccctgttcctacgcaactacgcgcagttcctgcacgaggtgaagtgtgactcgagaagggcggaggagtactactcgcgcgcgatgctcgccgacccaaccgacggcgagatcatgtcgcagtacgcgaagctggtgtgggcggtgcaccgcgaccacgaaaggtccctcacctacttccagaagtcggtgcaggcggccccgcgggacagccacgtcctcgcggcgtacgccagcttcctgtgggagcaggacgaggacgaggacgacgacggtggtcttgggggaggcgagcagggatcacccgggcgtgctacgcagccgaggcagctggcttccacggccgtttgactaccagggtggccgagatgggctaacgatgtgcttgctgaggatgatcatgcttgtagtattgtgtttccgtgtaacctgcaaaatgtttggacggtcgaggtgcgtgcacttgctacagaataaagaacgtaaacggttgagggaatggaaggctggacctgtaaacattggtgattccgtctgcagatgctaagttgtcactatgtttattggctaaattataggagtactaagggggtgtttgttcc

SEQ ID NO: 10726 - protein, 287 aa, Triticum aestivum
  misc_feature (1)..(287): Ceres Seq. ID no. 13597007
RSRLGNSHKKTPRGEERMLLRSSSTPFLRSFLTSSSSPTPPSSLQLRRAFSDGHLPSLNPSSSGDNDSNRTTGLHTELSFSVYNTFSKAKLEPHQEQEMEEEQEQAPQPELPELPLFLARGMGIDRLASGLFTAGMGSEAALARMASGVDQKAVLALDAQYKEMVDEQPGNALFLRNYAQFLHEVKCDSRRAEEYYSRAMLADPTDGEIMSQYAKLVWAVHRDHERSLTYFQKSVQAAPRDSHVLAAYASFLWEQDEDEDDDGGLGGGEQGSPGRATQPRQLASTAV

SEQ ID NO: 10727 - protein, 270 aa, Triticum aestivum
  misc_feature (1)..(270): Ceres Seq. ID no. 13597008
MLLRSSSTPFLRSFLTSSSSPTPPSSLQLRRAFSDGHLPSLNPSSSGDNDSNRTTGLHTELSFSVYNTFSKAKLEPHQEQEMEEEQEQAPQPELPELPLFLARGMGIDRLASGLFTAGMGSEAALARMASGVDQKAVLALDAQYKEMVDEQPGNALFLRNYAQFLHEVKCDSRRAEEYYSRAMLADPTDGEIMSQYAKLVWAVHRDHERSLTYFQKSVQAAPRDSHVLAAYASFLWEQDEDEDDDGGLGGGEQGSPGRATQPRQLASTAV

SEQ ID NO: 10728 - protein, 189 aa, Triticum aestivum
  misc_feature (1)..(189): Ceres Seq. ID no. 13597009
MEEEQEQAPQPELPELPLFLARGMGIDRLASGLFTAGMGSEAALARMASGVDQKAVLALDAQYKEMVDEQPGNALFLRNYAQFLHEVKCDSRRAEEYYSRAMLADPTDGEIMSQYAKLVWAVHRDHERSLTYFQKSVQAAPRDSHVLAAYASFLWEQDEDEDDDGGLGGGEQGSPGRATQPRQLASTAV

SEQ ID NO: 10729 - DNA, 1448 bp, Triticum aestivum
  misc_feature (1)..(1448): Ceres Seq. ID no. 13597018
ctccctctccttccctctctctctctctcgctcgtcttccttgccccctcgcgcaacagcagcgccacaacgcagtgagtggcacttccgtgatttcgccgccgcgggggcggggggaggaggaggagggaaggaggccatgggcaacgccagcggcagggaggaggacgccgccgcgcccggggaggccgacgccgccgacgtcgacgtcgaggacggaggcgacgactcctcggcccgcggcttccctccctacggcggaggcgccaaccacgtgcgccgtgcgtgctcagtgggcgtcgtgggggccagcggcgggcccggatcgccgcccgtgagccccggccgctccctctcgccgcggatgttcgtgccccagacacctgtacctccattgcaaagacctgctgatgtaactccagtattcaatgaaatactgatgaatgaacaagaagaagaatttgatggcccccctcaaaaggaaatacctgctttgattgtgtggactcttggaggaaagaatgtatctgttgaaggatcttgggataactggaaatcaaggaaaccgatgcagaaatctggaaaagatcattctcttctgttgatccttccttctggagtttatcgttatagatttgttgtagatggagagaggagatgttttcctgaccttccatgtgaaactgacgccatgggcaatgctgttaaccttcttgatgttcatgattttgttcctgaaagtgttgaaagtgtatcagaatttgaggctcctccatccccagaatctagctacagtttccaggcacctgaggaaaaggactttgcgaatgagccacctgctcttccgtctcagcttcacctcggcgttcttaactcacagaactcagaggaaatatgtgcacggccccaacacatcgtcctcaaccaccttttcatcgagaagggttggggtgcccatccgctggtggctcttggtgtaacccacagattcgagtccaaatatgtaacggtcgtcttgtataagcccatagaacgatagcatagcaaccgcatgaaagttgaagctaatgcttgacaactcaccgcgaaaccagcaatgaacagcaacagcgtggcctctctccctgtaaaagcacttcaggtacaggaatattttcgataacttgaaggagcttctagtcgtgatattgctccccttctgtatacctcctggcggatggccttatcgtcgtgagttcatacatatacttgtgttgttgttgttgttgtttccaaccccttgggaatgatatgtgtagaattgtcaccgaaaagtgagaactgagaaccgtgggactccgctgaatcgctaagcttcagagttagatcttgtgatccttattcttcattgtttttcattgtgatgatggtgttgtataataatacaaagctaccggttacggatttgg

SEQ ID NO: 10730 - protein, 345 aa, Triticum aestivum
  misc_feature (1)..(345): Ceres Seq. ID no. 15222016
SLSFPLSLSRSSSLPPRATAAPQRSEWHFRDFAAAGAGGGGGGKEAMGNASGREEDAAAPGEADAADVDVEDGGDDSSARGFPPYGGGANHVRRACSVGVVGASGGPGSPPVSPGRSLSPRMFVPQTPVPPLQRPADVTPVFNEILMNEQEEEFDGPPQKEIPALIVWTLGGKNVSVEGSWDNWKSRKPMQKSGKDHSLLLILPSGVYRYRFVVDGERRCFPDLPCETDAMGNAVNLLDVHDFVPESVESVSEFEAPPSPESSYSFQAPEEKDFANEPPALPSQLHLGVLNSQNSEEICARPQHIVLNHLFIEKGWGAHPLVALGVTHRFESKYVTVVLYKPIER

SEQ ID NO: 10731 - protein, 299 aa, Triticum aestivum
  misc_feature (1)..(299): Ceres Seq. ID no. 15222017
MGNASGREEDAAAPGEADAADVDVEDGGDDSSARGFPPYGGGANHVRRACSVGVVGASGGPGSPPVSPGRSLSPRMFVPQTPVPPLQRPADVTPVFNEILMNEQEEEFDGPPQKEIPALIVWTLGGKNVSVEGSWDNWKSRKPMQKSGKDHSLLLILPSGVYRYRFVVDGERRCFPDLPCETDAMGNAVNLLDVHDFVPESVESVSEFEAPPSPESSYSFQAPEEKDFANEPPALPSQLHLGVLNSQNSEEICARPQHIVLNHLFIEKGWGAHPLVALGVTHRFESKYVTVVLYKPIER

SEQ ID NO: 10732 - protein, 224 aa, Triticum aestivum
  misc_feature (1)..(224): Ceres Seq. ID no. 15222018
MFVPQTPVPPLQRPADVTPVFNEILMNEQEEEFDGPPQKEIPALIVWTLGGKNVSVEGSWDNWKSRKPMQKSGKDHSLLLILPSGVYRYRFVVDGERRCFPDLPCETDAMGNAVNLLDVHDFVPESVESVSEFEAPPSPESSYSFQAPEEKDFANEPPALPSQLHLGVLNSQNSEEICARPQHIVLNHLFIEKGWGAHPLVALGVTHRFESKYVTVVLYKPIER

SEQ ID NO: 10733 - DNA, 1280 bp, Triticum aestivum
  misc_feature (1)..(1280): Ceres Seq. ID no. 13597037
aattcccctcccctctccaggtctcctcccgaaacccccaattcgaaaatcgatttggggatttcggcgtcccagatccgctcctccggccggttcgctcggccgcacgtccgatccgcgttcgcggccgccgtcggagctgctgaccggcccgcggctcgattcgtccgggggatttgttgcgggggctctcgcttgctcccgatggcgtcgtccccggtctcctactggtgctaccactgcagccgcttcgtgcgggtctccccggccaccgtcgtctgccccgactgcgacggcggcttcctcgagcagttcccgcagcctccgccgccgcgcggcggcggcggcagcggccggcgcggggccatgaacccggtgatcgtgctgcggggcggctcgctctccggcttcgagctctactacgaggacggctccggcgacgggctgcggccgctgcccggcgacgtctcgcacctcctcatggggtcggggttccaccgcctgctcgaccagttctcgaggctggaggctgccgccccgcgcccgccggcgtccaaggccgcggtggagtcgatgccgtccgtgacggtcgccgggggaggcggggcccactgcgcggtgtgccaggaggccttcgagcccggcgccgcggctcgggagatgccgtgcaagcacgtctaccaccaggactgcatcctcccctggctctccctccgcaactcctgccccatctgccgcagcgagcttccggcggcagccgtgcctgaggcggaggcggatgccgggctcaccatctggcgactcccccgcggcggattcgccgttggaaggttcgccggcgggcccagagagcaactgccggttgtctacacggagctggatggtggtttcagcaacggcgtcgggccgaggcgggtgacatggccagaaggagaagggcaggtggacggcggcgaaggtcggattcgccgtgtatttaggaacctgtttgggtgctttggccggggcggccggcctgagagttcctcgcagtcccgtagtggctgagcaatgttcttcctggtaactcactttcaattgatgatagtggtgaataagtaggagttagtataaggaggaaaccccaggtggtgagttattggttagtttgatgtaaatgaagggcttgcattccccaccttttgtctcgtttttaaaaaaaaaaaaaaaaaaaaaaaaaaaaaaaaaaaaaaaagaaaaaaaaaaaaaaaaaagcttatcgataccgtcgacctcgaggg

SEQ ID NO: 10734 - protein, 348 aa, Triticum aestivum
  misc_feature (1)..(348): Ceres Seq. ID no. 13597038
NSPPLSRSPPETPNSKIDLGISASQIRSSGRFARPHVRSAFAAAVGAADRPAARFVRGICCGGSRLLPMASSPVSYWCYHCSRFVRVSPATVVCPDCDGGFLEQFPQPPPPRGGGGSGRRGAMNPVIVLRGGSLSGFELYYEDGSGDGLRPLPGDVSHLLMGSGFHRLLDQFSRLEAAAPRPPASKAAVESMPSVTVAGGGGAHCAVCQEAFEPGAAAREMPCKHVYHQDCILPWLSLRNSCPICRSELPAAAVPEAEADAGLTIWRLPRGGFAVGRFAGGPREQLPVVYTELDGGFSNGVGPRRVTWPEGEGQVDGGEGRIRRVFRNLFGCFGRGGRPESSSQSRSG

SEQ ID NO: 10735 - protein, 280 aa, Triticum aestivum
  misc_feature (1)..(280): Ceres Seq. ID no. 13597039
MASSPVSYWCYHCSRFVRVSPATVVCPDCDGGFLEQFPQPPPPRGGGGSGRRGAMNPVIVLRGGSLSGFELYYEDGSGDGLRPLPGDVSHLLMGSGFHRLLDQFSRLEAAAPRPPASKAAVESMPSVTVAGGGGAHCAVCQEAFEPGAAAREMPCKHVYHQDCILPWLSLRNSCPICRSELPAAAVPEAEADAGLTIWRLPRGGFAVGRFAGGPREQLPVVYTELDGGFSNGVGPRRVTWPEGEGQVDGGEGRIRRVFRNLFGCFGRGGRPESSSQSRSG

SEQ ID NO: 10736 - protein, 226 aa, Triticum aestivum
  misc_feature (1)..(226): Ceres Seq. ID no. 13597040
MNPVIVLRGGSLSGFELYYEDGSGDGLRPLPGDVSHLLMGSGFHRLLDQFSRLEAAAPRPPASKAAVESMPSVTVAGGGGAHCAVCQEAFEPGAAAREMPCKHVYHQDCILPWLSLRNSCPICRSELPAAAVPEAEADAGLTIWRLPRGGFAVGRFAGGPREQLPVVYTELDGGFSNGVGPRRVTWPEGEGQVDGGEGRIRRVFRNLFGCFGRGGRPESSSQSRSG

SEQ ID NO: 10737 - DNA, 1607 bp, Triticum aestivum
  misc_feature (1)..(1607): Ceres Seq. ID no. 13597043
agcttaggaaatcctaaaccctagccccctctccccactcccatggcgccgccgtcgcaactggtgctcgcggcctcctccaccgacgccggcgtggccgcgtgggacctccgcacggggtccgaggccatccgccaccgcccctgcgcctcccggccacgtgccgtcgctgccgtcgccggccgcttcctcgccgccgcccaaatcgccgccggcaactccgcccccatccactactaccactgggacaagcctcaggtggctgtgaagagcttccccgccgagccaatccgcgcgctcattgctgacccggaggggaactatctcatcggcggcggtgtgtccggtgacatattcttttgggaggtggctagtggagagctgcttgtccgatggcatgctcactatcgtgatgttaggtgccttgccctctatgacatgttgcttgtctcagcgtccgaggatgggagcatcaaaatttgggatcttctcacgatgcttgatgagcaatcaaggtttgaggcaaagacgccatacctatacaacttcaatcagcacacacttcctgtaactgatattgcttgttttcatggagcaattgctgtgtcatcttcagaggaccgcacatgtaaaatatggagtctatcagagggcaggatgctgagaagtatttcatttcctgctatcattgattctgttgaaatagacccaagaagtcatattttctatgctggtggtagagatggaaagatatatgttactgctatgggtgttgatgcctcctctcagggccgtgatgattcgtctattctcggtattctggatgaccacagcaaggcggtaacgagcttaacatcaagtacagatggccttctactagtctctggttcggaggatggtaatgttcgggtttgggataccagaagtcagcaagtaacccgaaaattcaaaccctcccaaggtccagtaactaatgttctcatagtaacacccaaaagattaaacctgccacctttacaaccattgcggaaagtgtgcgcagcaagtggcgaagttgtaccacgagctgtaattctgcccaaccctgaaaatgatgttcatattgctggaaatctcagctctaaccttctagagcagctcttggatgcacagcagcacggcagctctaggttatttgattctggggtgagcactctcaatggcgtaccaaaccaacagggggcagaatggagaagtaaatacctagagttgcaggatctttttgtgcatgaggttcttggtgatatgtcatcttaatggacatatgataccacaagactggatattatgggctactgtcagttaggaggtttgtggtgaagaactgttcaacacatgatttggtgttcaactagcaaacctgggaaatccatggatgccaaagatgacttccttataacaaggaaactccttacctttcattgcgtccacatgtcaattgacatgtggcagagccatatcagaaatagtaggaaaaactataaacggagcaaagatgggacatcttaaactgtaattcgactgtgtaaacagaaatgaagaaattttcgcttattgtggggtactgc

SEQ ID NO: 10738 - protein, 417 aa, Triticum aestivum
  misc_feature (1)..(417): Ceres Seq. ID no. 15222022
MAPPSQLVLAASSTDAGVAAWDLRTGSEAIRHRPCASRPRAVAAVAGRFLAAAQIAAGNSAPIHYYHWDKPQVAVKSFPAEPIRALIADPEGNYLIGGGVSGDIFFWEVASGELLVRWHAHYRDVRCLALYDMLLVSASEDGSIKIWDLLTMLDEQSRFEAKTPYLYNFNQHTLPVTDIACFHGAIAVSSSEDRTCKIWSLSEGRMLRSISFPAIIDSVEIDPRSHIFYAGGRDGKIYVTAMGVDASSQGRDDSSILGILDDHSKAVTSLTSSTDGLLLVSGSEDGNVRVWDTRSQQVTRKFKPSQGPVTNVLIVTPKRLNLPPLQPLRKVCAASGEVVPRAVILPNPENDVHIAGNLSSNLLEQLLDAQQHGSSRLFDSGVSTLNGVPNQQGAEWRSKYLELQDLFVHEVLGDMSS

SEQ ID NO: 10739 - protein, 285 aa, Triticum aestivum
  misc_feature (1)..(285): Ceres Seq. ID no. 15222023
MLLVSASEDGSIKIWDLLTMLDEQSRFEAKTPYLYNFNQHTLPVTDIACFHGAIAVSSSEDRTCKIWSLSEGRMLRSISFPAIIDSVEIDPRSHIFYAGGRDGKIYVTAMGVDASSQGRDDSSILGILDDHSKAVTSLTSSTDGLLLVSGSEDGNVRVWDTRSQQVTRKFKPSQGPVTNVLIVTPKRLNLPPLQPLRKVCAASGEVVPRAVILPNPENDVHIAGNLSSNLLEQLLDAQQHGSSRLFDSGVSTLNGVPNQQGAEWRSKYLELQDLFVHEVLGDMSS

SEQ ID NO: 10740 - protein, 266 aa, Triticum aestivum
  misc_feature (1)..(266): Ceres Seq. ID no. 15222024
MLDEQSRFEAKTPYLYNFNQHTLPVTDIACFHGAIAVSSSEDRTCKIWSLSEGRMLRSISFPAIIDSVEIDPRSHIFYAGGRDGKIYVTAMGVDASSQGRDDSSILGILDDHSKAVTSLTSSTDGLLLVSGSEDGNVRVWDTRSQQVTRKFKPSQGPVTNVLIVTPKRLNLPPLQPLRKVCAASGEVVPRAVILPNPENDVHIAGNLSSNLLEQLLDAQQHGSSRLFDSGVSTLNGVPNQQGAEWRSKYLELQDLFVHEVLGDMSS

SEQ ID NO: 10741 - DNA, 1694 bp, Triticum aestivum
  misc_feature (1)..(1694): Ceres Seq. ID no. 13597044
aaaacagaggcaccaaaatacaatctacgtacgtgcaaagttcagtgaaaccttgagttgacagacaccacaccaacaatggccggagcagcaaacgatctgaagctactgggcatgtgggcgagcccgtacgtcctgcgggtgcgccttgctctcagcatcaagagcatcagctacgagtacgcagaggaggacctccggcacaagagcgagctgctcctgcggtcaaaccccgtccacgatggtctgtttagttacaaggcaacctttgaagcatttgttggggtgcgggatgacgttgcaacttctcaagttaaactctttggtgatcaactcgaggatttggagaaaaatcttccattggacaatatttacaaatcagacaatgtatctgctgctccaattcgcgtgatgaatcttctttacaactctggggatgtgaaaggtcctcaaactatagctttcaatttgccaaatgatgagcggattgtgaatgagcgaggaacttcaatggttatgcttaagaacatttcagaagccaagttcaagaatatcttgaagcctatagccaatgcctgcatcagagaggagcagaaagaatatgttgattttgagccttattatacacatattgtttgccatgagtgctgccatggaattggacctcattccataacccttcctggtggtaaaaagtccacagttagaatggaacttcaagaatgtcattcagcattggaggaggcaaaagctgatatagttggtctgtgggcgctgaattttcttataaacaaggggttgcttcctaagagtctatcaaaatctatgtatgtttctttcctggctggatgctttcggtcaattcgcttcgggctggaagaagctcatgggaagggacaggcattgcagtttaattggttgtatgacaaaggagcttttatcttgcattctgacgggaaattctcaattgactttacaaaggttgaggaagctgttgaaagccttggcagagagatcatgacgatacaggcaaagggcgacaagcctgctgcgcagtctctccttcagtcgcgtgcaaccttgacgcagccattgcgtgtggcattggagaaaatcgaacacatgcaggtgcctgttgatatagccccgatatttggcacagccagtaagctgctcgcaaacaattaagcaccggaggacagcgattcagaaagttttgtgtctcccattgtacctgataaactacaaattgatttttttacgtgaaaaagtacaaattgttgaaacaagatgaagcaccatcctgagccgacacaaatggaaaataacacaaataaatgaatgatttcttaaaaggatggctgttaacatcactgcctaaatggatgaacttctaaaggatcactgttagcatcactgtctatttaccaaggtgtttttagaaagcgatgtctactgtaatctttgaacatattcactcaggaactaggagcggagactatcagaattctgctgaacttttgcggttttgccgcgctgaaggtcatcttgtgcttatatatatcagaatgttggtacacatggttcgttccttgtgagtgaatgctgcaaatatatgccccactctgatcggacccaattcaacgtttcaaacttgtaacgttacttcatacagaaacatgctctttcatctt

SEQ ID NO: 10742 - protein, 369 aa, Triticum aestivum
  misc_feature (1)..(369): Ceres Seq. ID no. 13597045
MAGAANDLKLLGMWASPYVLRVRLALSIKSISYEYAEEDLRHKSELLLRSNPVHDGLFSYKATFEAFVGVRDDVATSQVKLFGDQLEDLEKNLPLDNIYKSDNVSAAPIRVMNLLYNSGDVKGPQTIAFNLPNDERIVNERGTSMVMLKNISEAKFKNILKPIANACIREEQKEYVDFEPYYTHIVCHECCHGIGPHSITLPGGKKSTVRMELQECHSALEEAKADIVGLWALNFLINKGLLPKSLSKSMYVSFLAGCFRSIRFGLEEAHGKGQALQFNWLYDKGAFILHSDGKFSIDFTKVEEAVESLGREIMTIQAKGDKPAAQSLLQSRATLTQPLRVALEKIEHMQVPVDIAPIFGTASKLLANN

SEQ ID NO: 10743 - protein, 357 aa, Triticum aestivum
  misc_feature (1)..(357): Ceres Seq. ID no. 13597046
MWASPYVLRVRLALSIKSISYEYAEEDLRHKSELLLRSNPVHDGLFSYKATFEAFVGVRDDVATSQVKLFGDQLEDLEKNLPLDNIYKSDNVSAAPIRVMNLLYNSGDVKGPQTIAFNLPNDERIVNERGTSMVMLKNISEAKFKNILKPIANACIREEQKEYVDFEPYYTHIVCHECCHGIGPHSITLPGGKKSTVRMELQECHSALEEAKADIVGLWALNFLINKGLLPKSLSKSMYVSFLAGCFRSIRFGLEEAHGKGQALQFNWLYDKGAFILHSDGKFSIDFTKVEEAVESLGREIMTIQAKGDKPAAQSLLQSRATLTQPLRVALEKIEHMQVPVDIAPIFGTASKLLANN

SEQ ID NO: 10744 - protein, 258 aa, Triticum aestivum
  misc_feature (1)..(258): Ceres Seq. ID no. 13597047
MNLLYNSGDVKGPQTIAFNLPNDERIVNERGTSMVMLKNISEAKFKNILKPIANACIREEQKEYVDFEPYYTHIVCHECCHGIGPHSITLPGGKKSTVRMELQECHSALEEAKADIVGLWALNFLINKGLLPKSLSKSMYVSFLAGCFRSIRFGLEEAHGKGQALQFNWLYDKGAFILHSDGKFSIDFTKVEEAVESLGREIMTIQAKGDKPAAQSLLQSRATLTQPLRVALEKIEHMQVPVDIAPIFGTASKLLANN

SEQ ID NO: 10745 - DNA, 1364 bp, Triticum aestivum
  misc_feature (1)..(1364): Ceres Seq. ID no. 13597061
agcatattcgtacgcgaccctgccgggaaagcggcttcccatctgcgggaagcggaaagaggaccggcttcgaagacggcggaggcgactcttgggtcgcgtcgtctccaatcttccactctgaccgactcccgaccgatctccgccggagcccgcacgacgccgtcgccgatggggttcgccgcccggccgctccccctgctcctgctgctcctggtcgccggcgcggccgccaccgaccagatcttcaccacctcaggtgtgccgttcgggaagaactcgcgcgagccgaggtaccgcgtggagttccaccccgtcgattcgccataccacccggagaatggccaggagtctgaaccaatgactgaccacgaggggagacagtacacctgctacctaccagtggaagaaaccaagaccatgaagtcgattgtcccacagaatgcaaccaatgttataatagaaagcgaacggaaagttaagccaaaggagccagatgaactgctggaggttctcaaagaccagtgcttctacaggcatgaaggttggtggtcttatgagttctgctattatgggaaaatccgacaggttcatgtagagaatgagaaggttatccaagagtatgttctaggtgaatatgaccctgatgcaaccgatgcttaccatgacaatcacacctccgaatctgctgatgaggaccacgtgaaagatacttctaagaggtatcatgtccacgtgtacacaaacgggactgtgtgtgatctcacagatataccacggtacacagaggttaggtttgtttgttccgagcccactgtactgatcagttcgataaaggagatatcttcctgcaagtatgttttaactgtccaaagcccaatgctctgcaagaacccgttgtttcagcaggaaaagcgcaccttcttcatccactgcaacgagtcgcttgcggaagcagaagctgaggccgccgaggacgacgactctctcccaaaagaagctcagatgtccatcgttccaaaccccgacgaattgcataactacgcagcttacgctacctgattgcccgccaatcacggtgccctcagctgatgaaagatgccgttattttggaagtacaacagcaagttggcaacatagtataactatcccctggcttgttctgtctgacgccaactagtggttacagggtactctttgagcagatatccattactgaaacagcttgagattaccttagaggaagattaagggcaaagagtgtcctgctgtactgtagtggtatataatttagtaaagggggtatttgagattcagtgacaggctttagacacatcaccaacaattttcctcttgaaatgttc

SEQ ID NO: 10746 - protein, 353 aa, Triticum aestivum
  misc_feature (1)..(353): Ceres Seq. ID no. 13597062
SIFVRDPAGKAASHLREAERGPASKTAEATLGSRRLQSSTLTDSRPISAGARTTPSPMGFAARPLPLLLLLLVAGAAATDQIFTTSGVPFGKNSREPRYRVEFHPVDSPYHPENGQESEPMTDHEGRQYTCYLPVEETKTMKSIVPQNATNVIIESERKVKPKEPDELLEVLKDQCFYRHEGWWSYEFCYYGKIRQVHVENEKVIQEYVLGEYDPDATDAYHDNHTSESADEDHVKDTSKRYHVHVYTNGTVCDLTDIPRYTEVRFVCSEPTVLISSIKEISSCKYVLTVQSPMLCKNPLFQQEKRTFFIHCNESLAEAEAEAAEDDDSLPKEAQMSIVPNPDELHNYAAYAT

SEQ ID NO: 10747 - protein, 296 aa, Triticum aestivum
  misc_feature (1)..(296): Ceres Seq. ID no. 13597063
MGFAARPLPLLLLLLVAGAAATDQIFTTSGVPFGKNSREPRYRVEFHPVDSPYHPENGQESEPMTDHEGRQYTCYLPVEETKTMKSIVPQNATNVIIESERKVKPKEPDELLEVLKDQCFYRHEGWWSYEFCYYGKIRQVHVENEKVIQEYVLGEYDPDATDAYHDNHTSESADEDHVKDTSKRYHVHVYTNGTVCDLTDIPRYTEVRFVCSEPTVLISSIKEISSCKYVLTVQSPMLCKNPLFQQEKRTFFIHCNESLAEAEAEAAEDDDSLPKEAQMSIVPNPDELHNYAAYAT

SEQ ID NO: 10748 - protein, 233 aa, Triticum aestivum
  misc_feature (1)..(233): Ceres Seq. ID no. 13597064
MTDHEGRQYTCYLPVEETKTMKSIVPQNATNVIIESERKVKPKEPDELLEVLKDQCFYRHEGWWSYEFCYYGKIRQVHVENEKVIQEYVLGEYDPDATDAYHDNHTSESADEDHVKDTSKRYHVHVYTNGTVCDLTDIPRYTEVRFVCSEPTVLISSIKEISSCKYVLTVQSPMLCKNPLFQQEKRTFFIHCNESLAEAEAEAAEDDDSLPKEAQMSIVPNPDELHNYAAYAT

SEQ ID NO: 10749 - DNA, 827 bp, Triticum aestivum
  misc_feature (1)..(827): Ceres Seq. ID no. 13597065
cccaagtaagcaaagcagccaggtcggacccaatcaaacccaaagaaagcaagaactttccccggccgtccatggccacctaccccctcctcctcctcttcgccgccgtcgccgtagccgtagcggcggcgtcgtccgcgggggacaagccaacggcgtacgagatgctggagcggtacgacttcccgcggggcatcctgccggagggggtggaggggtacgagctcgatccggacggcggcttccaggtgtacttcccgcgggagtgcgagttcctgctagcgaagcagtggctggtcaagtacgacacgcgcatcgccggcgccgccagcgcgggcaagctcgcggcgctgcagggcatctacgtcaaggtactcttcctgtggatccccgtcgccgaggtcgaccgcgccggcgaccgcctcagcttctacatcggccccgtctccacgtccttcccgctaagcgacttcgccagcagcccgcactgtcgcggctaccacgaccgcgccgccgtcgctgcggccgtctcgtgaatcatatgctttttacatgtactcctacttagctactgctgctggggggaaatagtatatttcacatggaaaactctattgatacggcctgattatttgaacaagacgcacaagagtcattgtttcaattaaccttctgtgccgtggtggttcgtggatatcacaatgagctctatacgattccagtttagcttgagagccaatgttggcgtttcgcaggagccagcgtttatctagaattttcttgagatgtactggtatgtatttatagatcacagattagtttatggt

SEQ ID NO: 10750 - protein, 188 aa, Triticum aestivum
  misc_feature (1)..(188): Ceres Seq. ID no. 13597066
PSKQSSQVGPNQTQRKQELSPAVHGHLPPPPPLRRRRRSRSGGVVRGGQANGVRDAGAVRLPAGHPAGGGGGVRARSGRRLPGVLPAGVRVPASEAVAGQVRHAHRRRRQRGQARGAAGHLRQGTLPVDPRRRGRPRRRPPQLLHRPRLHVLPAKRLRQQPALSRLPRPRRRRCGRLVNHMLFTCTPT

SEQ ID NO: 10751 - protein, 177 aa, Triticum aestivum
  misc_feature (1)..(177): Ceres Seq. ID no. 13597067
QVSKAARSDPIKPKESKNFPRPSMATYPLLLLFAAVAVAVAAASSAGDKPTAYEMLERYDFPRGILPEGVEGYELDPDGGFQVYFPRECEFLLAKQWLVKYDTRIAGAASAGKLAALQGIYVKVLFLWIPVAEVDRAGDRLSFYIGPVSTSFPLSDFASSPHCRGYHDRAAVAAAVS

SEQ ID NO: 10752 - protein, 154 aa, Triticum aestivum
  misc_feature (1)..(154): Ceres Seq. ID no. 13597068
MATYPLLLLFAAVAVAVAAASSAGDKPTAYEMLERYDFPRGILPEGVEGYELDPDGGFQVYFPRECEFLLAKQWLVKYDTRIAGAASAGKLAALQGIYVKVLFLWIPVAEVDRAGDRLSFYIGPVSTSFPLSDFASSPHCRGYHDRAAVAAAVS

SEQ ID NO: 10753 - DNA, 1330 bp, Triticum aestivum
  misc_feature (1)..(1330): Ceres Seq. ID no. 13597076
attacctagaacatcctaatcgaaaagttttccctgcaaaactctcgccgctgcgagttcccaaaaagcgaagcgaccaccacacctctcgccggagatgccgccggggacccctctgccgtcgacgggggcgtggacctgggagaacgccgtcgccggagcgaccgccggcttcgccaccgtcgccaccttccacccgctcgacgtcgtccgcacccgcttccaagtgagcggcgggagagggttgtccgacttgccgccgtacaggaacacgggacacgctgtatacaccatcgcacgatctgagggcctgaggggactttatgccggcttttatcctgcagttctggggtcaaccgtttcttgggggctatatttctttttttataacagagctaaacaaagatacttgcaggagaaggatgttcagctccgtccattcgaccatcttgcctcagctgcagaagcaggtgctttggtttgcctgtttacaaatcccatatggctggtgaaaacacggatgcaactacaaacacctgggcatacttcatcttattctggattttctgatgctttgagaactattcggaaagaggagggatggcgagcactttatagagggatcgggcctggacttttgctggtcacccatggcgcgatacaattcactgcctatgaggaacttcgcaaggctatgatatctgcgaaaagtaaacaaacaaggggagatgacaaaggcagcgaggatttattgaactccgttgattatgcggcacttggcgctggttcaaaattatctgctattctgcttacttatccttatcaggttatccgagcccgcttacagcaacgacctggtagtgatggtatcccaaagtactcagatagttggcatgtagtgaaggaagctgcaaggtacgaaggtgtccgtgggttttacaggggcatcacttccaacctattgaagaaccttccagcagcttccgtgacgtttgtggtgtatgaaaacgttatcaaactattcagagcagccaaggagaagacgtaattccaacttgcaactggagccaggagaaacataggaggaactaggaaagacactaatgttccgcgcaaatacagaatctgttcattcaccacactatccgagctcaacgtgatgttccatcacatttcccagttcagctcttattgacttaacagaaacggaatttagtttggcgaacttgttttttgtagagaaaattcattttctaagaaacagctcattggttcatgttgtccagttgaatgcttgttgaagatagagctctggttctatgtgtggttc

SEQ ID NO: 10754 - protein, 316 aa, Triticum aestivum
  misc_feature (1)..(316): Ceres Seq. ID no. 13597077
MPPGTPLPSTGAWTWENAVAGATAGFATVATFHPLDVVRTRFQVSGGRGLSDLPPYRNTGHAVYTIARSEGLRGLYAGFYPAVLGSTVSWGLYFFFYNRAKQRYLQEKDVQLRPFDHLASAAEAGALVCLFTNPIWLVKTRMQLQTPGHTSSYSGFSDALRTIRKEEGWRALYRGIGPGLLLVTHGAIQFTAYEELRKAMISAKSKQTRGDDKGSEDLLNSVDYAALGAGSKLSAILLTYPYQVIRARLQQRPGSDGIPKYSDSWHVVKEAARYEGVRGFYRGITSNLLKNLPAASVTFVVYENVIKLFRAAKEKT

SEQ ID NO: 10755 - protein, 175 aa, Triticum aestivum
  misc_feature (1)..(175): Ceres Seq. ID no. 13597078
MQLQTPGHTSSYSGFSDALRTIRKEEGWRALYRGIGPGLLLVTHGAIQFTAYEELRKAMISAKSKQTRGDDKGSEDLLNSVDYAALGAGSKLSAILLTYPYQVIRARLQQRPGSDGIPKYSDSWHVVKEAARYEGVRGFYRGITSNLLKNLPAASVTFVVYENVIKLFRAAKEKT

SEQ ID NO: 10756 - DNA, 1245 bp, Triticum aestivum
  misc_feature (1)..(1245): Ceres Seq. ID no. 13597094
acgacatcctccacactcgactcaaccaagcagcaacgagacgcagagcaagcagcaacaagtagcttcgaccttcagcttctagcgcatggcggagatgggggtgcgtgacaacttgccctgctcgacttcatggagagagctcacacacaccagctggagggatgacgattacaggaggatggtgatggcgagcctgatcgaggcggtgtacctgctggagctggagaggcaggagcggagggacgcggcggaggtggcgcagcagtggtggaagcccttcagctaccgcctcgcgcacgagctggtggacgaacgcgacggctccgtcttcggcgccatcttcgagtgggaggaccgccacctgctcgaccgccgcggcgccagcgccgaggaaaggccgaccggcgcgcccagcgcggtgatcgcgttccggggcacgctgctgcgcgcgcccaccatccggcgggacgtggaggacgagctgcgcctgctggcgtgcaacagcctccgcggctccgccaggctccacggcgcgctgcaggcgctcagggccaccatcgacaggttcggctccgagaacgtgtgcctctgcggccactccctcggcgccggcttcgcgcgccaggtcggcaggatgctcatggcgtcgcgccagcagcagcagccgcagccgcagcagcagcagcagcaacagaaccccgccgcggcgctcgagttccacctcttcaacgcgccctacctgtcgctgcccacgggcgtgcggagggtggtgaggacggccgactgcctgctcaagacggtccgcaccggcgtcgccgccgtcggcaggtggcacggcaaggcgctcaagaacgtggcctacgccaactgcgtgctcggctacacgcgcctcgacagcgacggcaggaagttgttcgagtgagaagagaacatgctacgccaactgcaactgatctgccacacccatgactgacgccatgactcgcctgaagagagggagggatccagcgctgaaaacgtgcgactgtactgaaaatcccaaacacgcggcacgtatctcgatcatggaggccatgatcccgaacgaacgatctatctattatcagcttgtactactagtaggattcaatttgaaggagacaataagcatcctgcccggcccagggatgcacggcttaggtagctagcttagtctgcatgcttgctctctagtctgtacatgttaatcgcgtttccattgtc

SEQ ID NO: 10757 - protein, 278 aa, Triticum aestivum
  misc_feature (1)..(278): Ceres Seq. ID no. 13597095
MAEMGVRDNLPCSTSWRELTHTSWRDDDYRRMVMASLIEAVYLLELERQERRDAAEVAQQWWKPFSYRLAHELVDERDGSVFGAIFEWEDRHLLDRRGASAEERPTGAPSAVIAFRGTLLRAPTIRRDVEDELRLLACNSLRGSARLHGALQALRATIDRFGSENVCLCGHSLGAGFARQVGRMLMASRQQQQPQPQQQQQQQNPAAALEFHLFNAPYLSLPTGVRRVVRTADCLLKTVRTGVAAVGRWHGKALKNVAYANCVLGYTRLDSDGRKLFE

SEQ ID NO: 10758 - protein, 275 aa, Triticum aestivum
  misc_feature (1)..(275): Ceres Seq. ID no. 13597096
MGVRDNLPCSTSWRELTHTSWRDDDYRRMVMASLIEAVYLLELERQERRDAAEVAQQWWKPFSYRLAHELVDERDGSVFGAIFEWEDRHLLDRRGASAEERPTGAPSAVIAFRGTLLRAPTIRRDVEDELRLLACNSLRGSARLHGALQALRATIDRFGSENVCLCGHSLGAGFARQVGRMLMASRQQQQPQPQQQQQQQNPAAALEFHLFNAPYLSLPTGVRRVVRTADCLLKTVRTGVAAVGRWHGKALKNVAYANCVLGYTRLDSDGRKLFE

SEQ ID NO: 10759 - protein, 247 aa, Triticum aestivum
  misc_feature (1)..(247): Ceres Seq. ID no. 13597097
MVMASLIEAVYLLELERQERRDAAEVAQQWWKPFSYRLAHELVDERDGSVFGAIFEWEDRHLLDRRGASAEERPTGAPSAVIAFRGTLLRAPTIRRDVEDELRLLACNSLRGSARLHGALQALRATIDRFGSENVCLCGHSLGAGFARQVGRMLMASRQQQQPQPQQQQQQQNPAAALEFHLFNAPYLSLPTGVRRVVRTADCLLKTVRTGVAAVGRWHGKALKNVAYANCVLGYTRLDSDGRKLFE

SEQ ID NO: 10760 - DNA, 912 bp, Triticum aestivum
  misc_feature (1)..(912): Ceres Seq. ID no. 13597110
agtaccactccgtccactgcaaacaaactctcgccttgacccctgcgcgctccctccctccctccgtccccagccaggatcccagcttttctcctcctccccgccgccgcctccggcgccatgaagcgcctcttcagacgcctctcccgcgtcgccgcggccgactcctcctccgcggccgccgcggccgactcctcctccgcggccgccgccacggcgtaccggcagctccgcgcgccgaagcaggcgtccacgaccggcggcgccaaggtgccgcagggacacgtgccggtgtgcgtcggcgaggagggcgggcccgtggagcggttcgccgtgcgcgcggacctgctgggccggccggccttcgcggcgctgctcctgcgcgccgcccaggagtacgggtacgaccaccccggcgcgctccgcatcccctgccccgtcgccgacttccgccgcctcctcgtccgcctctccgacgacccctacgccgacgagtgctaggcgccggcgcaccttctcggcctgccgctggagaactctgccccccattcgccccccttctgacagatttacccccgggcactgggcagacttgcaatgtacatacagtggcaggccgaagaagagtcgccggagcgagggttaggatagggattacctagcttcgtagtaacttttttttattactgctgagcatgagctgaatgggaagaactgtgggtgttcctttttcaccccctctagttctaggaatttcagtgtgtgtgtgtgcgtgcgtgtgtgagggagagagagagagggaggtggtagtatgcgtttgtgctagggattttgaggtttcagtgttaaccatatgaaatcctgaggctatcatgccatatttttactgagctagtaatatcttttagcact

SEQ ID NO: 10761 - protein, 219 aa, Triticum aestivum
  misc_feature (1)..(219): Ceres Seq. ID no. 13597111
YHSVHCKQTLALTPARSLPPSVPSQDPSFSPPPRRRLRRHEAPLQTPLPRRRGRLLLRGRRGRLLLRGRRHGVPAAPRAEAGVHDRRRQGAAGTRAGVRRRGGRARGAVRRARGPAGPAGLRGAAPARRPGVRVRPPRRAPHPLPRRRLPPPPRPPLRRPLRRRVLGAGAPSRPAAGELCPPFAPLLTDLPPGTGQTCNVHTVAGRRRVAGARVRIGIT

SEQ ID NO: 10762 - protein, 126 aa, Triticum aestivum
  misc_feature (1)..(126): Ceres Seq. ID no. 13597112
MKRLFRRLSRVAAADSSSAAAAADSSSAAAATAYRQLRAPKQASTTGGAKVPQGHVPVCVGEEGGPVERFAVRADLLGRPAFAALLLRAAQEYGYDHPGALRIPCPVADFRRLLVRLSDDPYADEC

SEQ ID NO: 10763 - DNA, 1239 bp, Triticum aestivum
  misc_feature (1)..(1239): Ceres Seq. ID no. 13597120
cattacctagaacatcctaatcgaaaaaaaatttacagttttcaccaagatgaaattgcacaaggcatctatatcccctcctcactctcctccgctggccgccaacgccgccgcataaccaagtcaatcttcccccacccaaccccccgcgcagcctcgccgtcggcatgggcgaggagaggacggaggcgtggtggggccggcgcgcgtgggcgctgctgtcggccgtccgcgcgcgggcgccgctggtgcagtgcatcaccaaccccgcctcccaattccggatggaggcctgcctcgagctcctcgcgctcccccccgccgtcgtcagggggaacgcgtccgagatcctcgccctcgccgcccgctcagacagctcccccaccttcaagggtgtggacagttcacatgactcaggggaggtcctgcaagccgcgaaagcattggcacggtccagcggcacagttgtcgcagtatctggagctgttgatttcatcacggatggcgagcaggtcatcagtgctagcaatggtgtggcaatgatgcagaagatcacagcgacagggtgtgctgtgactgctcttatagcggcatttgtcggggcggatccttccgatgctctggctgcagcagcatgtgcgctcgccatctttggactcgctggagagatagggatggagtcagcaaaaggacctgcctctctcaggatgcatctcattgatgctctctacggtctcgacgagcagaccgtcacatctggagtaaaaattgcgctgctgccgtaatgcatgtgtgccgtggctatcagtgctgtaggagatacagagtctggagtaatctgcaggatcattttgcctccttggtgcttggaaaaccgtgaagcagatcgtgtcagattggctgtcagatcactcatcaataatccggtgaccatcccggctgtagtaagtacgtacatagttgtgaattgtgatgtcacacagagaatgatgttcataaaataagccagtcgaaataaggtgtttgtgcttcaatggccttgagatgatcgaacggctattctgttcaaacactttgatccccctatgcctattatcacgggcggcgctaggggtattcttgggtcttcatgtgaatacccatgatttttacaaaacagtgttgattttggcaaaacagtgacaattttcaaaaaacaacaataattttggcaaaatgaatacacatgaatacccggtt

SEQ ID NO: 10764 - protein, 205 aa, Triticum aestivum
  misc_feature (1)..(205): Ceres Seq. ID no. 13597121
MGEERTEAWWGRRAWALLSAVRARAPLVQCITNPASQFRMEACLELLALPPAVVRGNASEILALAARSDSSPTFKGVDSSHDSGEVLQAAKALARSSGTVVAVSGAVDFITDGEQVISASNGVAMMQKITATGCAVTALIAAFVGADPSDALAAAACALAIFGLAGEIGMESAKGPASLRMHLIDALYGLDEQTVTSGVKIALLP

SEQ ID NO: 10765 - protein, 180 aa, Triticum aestivum
  misc_feature (1)..(180): Ceres Seq. ID no. 13597122
HYLEHPNRKKIYSFHQDEIAQGIYIPSSLSSAGRQRRRITKSIFPHPTPRAASPSAWARRGRRRGGAGARGRCCRPSARGRRWCSASPTPPPNSGWRPASSSSRSPPPSSGGTRPRSSPSPPAQTAPPPSRVWTVHMTQGRSCKPRKHWHGPAAQLSQYLELLISSRMASRSSVLAMVWQ

SEQ ID NO: 10766 - protein, 166 aa, Triticum aestivum
  misc_feature (1)..(166): Ceres Seq. ID no. 13597123
MEACLELLALPPAVVRGNASEILALAARSDSSPTFKGVDSSHDSGEVLQAAKALARSSGTVVAVSGAVDFITDGEQVISASNGVAMMQKITATGCAVTALIAAFVGADPSDALAAAACALAIFGLAGEIGMESAKGPASLRMHLIDALYGLDEQTVTSGVKIALLP

SEQ ID NO: 10767 - DNA, 1344 bp, Triticum aestivum
  misc_feature (1)..(1344): Ceres Seq. ID no. 13597124
aacccaacccaacccgacccggcgcggatctaaaatctctctctgccagccaccacgcgcctgccctacagccgccaccgacgccccgtccccgccccctcccacggtcgccgccgccgtcgccgtcgccgttcatctccgccccgtccgcggtctttccccccattggggttcgaggacctgaggtgcttctagctgggaaggatgagcaaaggcccggttccgttccctagctttgggaagaaagcaaaagatctcttgtacaaggactacaattttgaccaaaagttttcatggtcaacaactagcgaatctggtttgggtatcacagcctctggtgtgaagttcgatgaactcttcattggtgacatacgggtacaacataaaagtggtagaaatactgttgatgtcacaatcgattgcgattccaaagtgtcaaccgcggtcacttttgatgaagtagtccctggtttgaagacttctttcggcttcaaggttcctgatcaaaagtcagggaagctcgatttgcaataccttcatgatcgcttcacactgaattcaaccattggcttgacttcggcacctgtgatcgagctggcaacaactattggcacaaacgaacttgctgtcggtgccgaggttggatttgacagcacttcagcttctgttaccaagtacaactcaggggtcagctataccaaggatgatttttctgccgccttacaaatggctgacaaaggcgagacactgaaagcttcctacatccacctgttcagcccgaccagcgcagtggcggccgaggtaacgcacaggttgaaaacaaaggagaactacttcaccatcgggagctcccacgcgctcgacccgtccacgacgctcaagacgaggttcagcaacagcgggaaggccgggctcctctgccggcacgagtggaggcccaagtcgtacgtgacgctctcggccgagtacgaccccaaggtggtgagctcgccgtcaaggttcggcgtggccgtggccctcagcccctgatcacccgcctgcccgcccgcatctcctccctgtacaacagcgccagcgttaagcacgccgctccgctcgtatatgtccgagccatactcgccgatgattctttttggtctctctctctttttgggttacaacagtattggtattggcccacggaaaccttgtctaggagttgggctcatttttgcgggattcctccgattagcctgcctgccggccggcgaagtaaggggccgggaactggaaatatacagaggttttgtactattaggcatacgctttggccactccaggcgatgaaattgctgacttgctgtc

SEQ ID NO: 10768 - protein, 274 aa, Triticum aestivum
  misc_feature (1)..(274): Ceres Seq. ID no. 13597125
MSKGPVPFPSFGKKAKDLLYKDYNFDQKFSWSTTSESGLGITASGVKFDELFIGDIRVQHKSGRNTVDVTIDCDSKVSTAVTFDEVVPGLKTSFGFKVPDQKSGKLDLQYLHDRFTLNSTIGLTSAPVIELATTIGTNELAVGAEVGFDSTSASVTKYNSGVSYTKDDFSAALQMADKGETLKASYIHLFSPTSAVAAEVTHRLKTKENYFTIGSSHALDPSTTLKTRFSNSGKAGLLCRHEWRPKSYVTLSAEYDPKVVSSPSRFGVAVALSP

SEQ ID NO: 10769 - DNA, 1369 bp, Triticum aestivum
  misc_feature (1)..(1369): Ceres Seq. ID no. 13597129
ctagaacatcctaatcgagaagtctctgactctctctctctcactacccccaaagcagcagaagcagcagcaagcaccaagcgagcagcgaagccgattccccaaaccgcctcccacatgcaattcctcgcctgaagaaaccctaccgtactccgccgccgctgtcgccgccatgtcgttgccaccggtggacccgccggagtggctgcgcacactacccgtggcgccggagtaccgccccaccctcgccgagttcgctgaccccatcgcctatatcctcaagatcgagccagaggcctctcgctacggcatctgcaagatcgtccccccgctcccctcgccgccccgcgaggccaccgttcagctcctcaaggcctcgttcgcctccaatgcgtccgcttccggcgacgctggccccaccttcccgacgcggctccagcaggtgggcctctccacaaagaaccgtcgcggcgcgaaccgtcgcgtctgggagagcggcgagcgctacaccctggaggccttccgcaccaaggcccgcgacttcgaactcccgaggcacgcgatacccccgaagcacgcgacgcccctccagctcgaggcgctcttctggggtgcttgcgctgcgaggccattcaatgtcgagtacggcaacgacatgccggggtctggcttcgtcaaacgggaggtgctagacctggacactgacagtccggtaggggcgcccagggacgtcggcgagacggagtggaacatgagggtggctccgcgcgctcggggctcgctactgcgggcgatgagccgggacgtggctggcgtcacaacgccgatgctatatgtggcgatgctctacagttggttcgcgtggcacgtggaggaccatgagctgcatagcctcaactacctccacttcggcaagcccaagacttggtacggcgtgccccgagatgccatgcttgccttcgaggatgctgtccgtgtccatgggtacgcggacgacctcaatgccatcagtgcgacagacgagccagacggttgggactggcaccaggcgtagggggctctggtacatggaccaggaggtgcagccggacttggtgtgtgctgcgaccatggaggataaggagaagcaggcgatgatccatcattgtaggatggggcatgtatcttttgataagatgagtagaatatttccggatgttatgtgtggaataggcaaaggcaagctgacatgtgatgcttgtgaatatgcaaaacacacacgggccttatatgtgagtaaggggctcaggagcatatctccttttatgcttattcattcggatgtatggactagcccagtggtgtcaatgaatgggaagaagtattttgc

SEQ ID NO: 10770 - protein, 293 aa, Triticum aestivum
  misc_feature (1)..(293): Ceres Seq. ID no. 15222034
MSLPPVDPPEWLRTLPVAPEYRPTLAEFADPIAYILKIEPEASRYGICKIVPPLPSPPREATVQLLKASFASNASASGDAGPTFPTRLQQVGLSTKNRRGANRRVWESGERYTLEAFRTKARDFELPRHAIPPKHATPLQLEALFWGACAARPFNVEYGNDMPGSGFVKREVLDLDTDSPVGAPRDVGETEWNMRVAPRARGSLLRAMSRDVAGVTTPMLYVAMLYSWFAWHVEDHELHSLNYLHFGKPKTWYGVPRDAMLAFEDAVRVHGYADDLNAISATDEPDGWDWHQA

SEQ ID NO: 10771 - protein, 178 aa, Triticum aestivum
  misc_feature (1)..(178): Ceres Seq. ID no. 15222035
MWRCSTVGSRGTWRTMSCIASTTSTSASPRLGTACPEMPCLPSRMLSVSMGTRTTSMPSVRQTSQTVGTGTRRRGLWYMDQEVQPDLVCAATMEDKEKQAMIHHCRMGHVSFDKMSRIFPDVMCGIGKGKLTCDACEYAKHTRALYVSKGLRSISPFMLIHSDVWTSPVVSMNGKKYF

SEQ ID NO: 10772 - protein, 163 aa, Triticum aestivum
  misc_feature (1)..(163): Ceres Seq. ID no. 15222036
MSCIASTTSTSASPRLGTACPEMPCLPSRMLSVSMGTRTTSMPSVRQTSQTVGTGTRRRGLWYMDQEVQPDLVCAATMEDKEKQAMIHHCRMGHVSFDKMSRIFPDVMCGIGKGKLTCDACEYAKHTRALYVSKGLRSISPFMLIHSDVWTSPVVSMNGKKYF

SEQ ID NO: 10773 - DNA, 670 bp, Triticum aestivum
  misc_feature (1)..(670): Ceres Seq. ID no. 13597150
ccatcttttagattgttccccaccaaaaccctagaatccctaatccaatccccaccagttccccacgtctgccgatggggctcttctcgtggtggaggggctcccgccgcggctcgccggagcaggccccgagccagcagccggcgaagggagcgggaggcgcgcaggcccaggtggccgtccccggcacccatggggcggtggaggtgctgcggcagcggcagccggacgcgacggtcttcgagttcgggtcggcggcggagtccggcaccgccgtcacgctcgcagggtactgccccgtctccgacgagctcgagccgtgccgctgggagctggtgcccgccaccggcgagggcgcaccgcagttccgcatcgtgttctgagcacgaggagataaccacccctatgctgcctcgcggtatctatcttgggtgttgccaggtttcgtaggtgcaagggtgtgatcattgggtgtatactgctgcttgtgaatttcttgaaataaaacttgagatgtggatgagtccttgtggagggtaacatgtgctggttggaatgctgggctttctgtcagtttgtgatgaacaaattagccaatttcggcagctctttataagatttatcaaattagccaaaaaaaaaaaaaaaaaagcttatcgataccgtcgac

SEQ ID NO: 10774 - protein, 149 aa, Triticum aestivum
  misc_feature (1)..(149): Ceres Seq. ID no. 13597151
PSFRLFPTKTLESLIQSPPVPHVCRWGSSRGGGAPAAARRSRPRASSRRREREARRPRWPSPAPMGRWRCCGSGSRTRRSSSSGRRRSPAPPSRSQGTAPSPTSSSRAAGSWCPPPARAHRSSASCSEHEEITTPMLPRGIYLGCCQVS

SEQ ID NO: 10775 - protein, 102 aa, Triticum aestivum
  misc_feature (1)..(102): Ceres Seq. ID no. 13597152
MGLFSWWRGSRRGSPEQAPSQQPAKGAGGAQAQVAVPGTHGAVEVLRQRQPDATVFEFGSAAESGTAVTLAGYCPVSDELEPCRWELVPATGEGAPQFRIVF

SEQ ID NO: 10776 - protein, 85 aa, Triticum aestivum
  misc_feature (1)..(85): Ceres Seq. ID no. 13597153
MGRWRCCGSGSRTRRSSSSGRRRSPAPPSRSQGTAPSPTSSSRAAGSWCPPPARAHRSSASCSEHEEITTPMLPRGIYLGCCQVS

SEQ ID NO: 10777 - DNA, 1440 bp, Triticum aestivum
  misc_feature (1)..(1440): Ceres Seq. ID no. 13597162
gcaggaattcgccmcsmkmccrttmcmactwkawyrtgyytaatcgaaaaaagacaacatccggtagtagctagagcaacaaggacgaattaaacaacaacacaactactcttaggaatggccggcgaggaggagatgcaggtggtggagtcctgcttcgtgacgccggtggcggacgcaccgagcagggcgatccggctctcgccgttcgacctcatgctagccagcagaggctacaccccactcgtccacttctaccgcccaccagaaaccgtgggcgacgacttcttcgacgtgacaaggttgaagacggcgttgggcaaggcgcttgtgcccttctaccccctggccggccgcttgagggcgggcggcgacggcaggttggagatcgactgcaacggcaagggcatgctcttccttgtggctcagtctcgtctcaccatggatgacttcagcgacttcaagccatcatcaaagcagaggaggctgtttgttcctcatgtcagcgactcagatggcctcttatgggcaacccaggtgacattcttaaagtgtggtggggtggtcttagggtcggcaatccatcatgctggtatggacggatctgttgtattccacttcttaaggacatgatcagctttctccagagacggcgaccgggctatggtgaacctcccctgccatgatcgctcgcgcttgtctgcgcgtgatccacctgttgttcatccctatgctctttccatttttagccccaagataaacctacccccacagccagggctggtcgtcaacgaggttgtagccctcacccttgccaaggaccaactttccactctcaagcacatatctggtggcgatggcgtgagcaccttcagcgccttgagcgcccacctgtggcaatgcatgtgtttagcccggcagctacccccggatgctacgacgcagcttatgttctcggccaacatccgccgcatcatgaggccaccactcccagacggctacttcggcaacgcgataataaacctaagtgtcggcgacaaagcgcgtgcaatcgcctcgcgcgagctgagctacattgcgcggcgaataagagacacccacagacggttgaacgacgagctagtgcattcagcaatcgactacctcgagctagcaaagagggacgacgagcgcccgactacaggcaatttgccggtgactgacattagagttgtcagctggcttggcatgccgtcgtacgatgcggatttcagctggggaaggccattggctatgttccgtgctgaaccaaaccgcggaggttttgttcacctgattgacagcgcacagggtgatggcagtgtgcgcatcatcatgtctatagaggctgcaattctcagcgagttgaagcgtttgttgtatgccaaattcgacaccatgttgtattctaagttttaacct

SEQ ID NO: 10778 - protein, 257 aa, Triticum aestivum
  misc_feature (1)..(257): Ceres Seq. ID no. 15222043
MVNLPCHDRSRLSARDPPVVHPYALSIFSPKINLPPQPGLVVNEVVALTLAKDQLSTLKHISGGDGVSTFSALSAHLWQCMCLARQLPPDATTQLMFSANIRRIMRPPLPDGYFGNAIINLSVGDKARAIASRELSYIARRIRDTHRRLNDELVHSAIDYLELAKRDDERPTTGNLPVTDIRVVSWLGMPSYDADFSWGRPLAMFRAEPNRGGFVHLIDSAQGDGSVRIIMSIEAAILSELKRLLYAKFDTMLYSKF

SEQ ID NO: 10779 - protein, 177 aa, Triticum aestivum
  misc_feature (1)..(177): Ceres Seq. ID no. 15222044
MCLARQLPPDATTQLMFSANIRRIMRPPLPDGYFGNAIINLSVGDKARAIASRELSYIARRIRDTHRRLNDELVHSAIDYLELAKRDDERPTTGNLPVTDIRVVSWLGMPSYDADFSWGRPLAMFRAEPNRGGFVHLIDSAQGDGSVRIIMSIEAAILSELKRLLYAKFDTMLYSKF

SEQ ID NO: 10780 - protein, 171 aa, Triticum aestivum
  misc_feature (1)..(171): Ceres Seq. ID no. 15222045
MAGEEEMQVVESCFVTPVADAPSRAIRLSPFDLMLASRGYTPLVHFYRPPETVGDDFFDVTRLKTALGKALVPFYPLAGRLRAGGDGRLEIDCNGKGMLFLVAQSRLTMDDFSDFKPSSKQRRLFVPHVSDSDGLLWATQVTFLKCGGVVLGSAIHHAGMDGSVVFHFLRT

SEQ ID NO: 10781 - DNA, 1022 bp, Triticum aestivum
  misc_feature (1)..(1022): Ceres Seq. ID no. 13597163
aaccccagacaccacagccagcaatcagaccatggacggcggcggcggcgtgcggccatcgctccagcccgcggcggccggaggaggggcgtcgggcagcccggacgagccccgcgacgcgcgcgtggtgcgggagctcctccgctccatggggctcggcgagggcgagtacgagccgcgcgtcgtgcaccagttcctcgacctcgcctaccgctacgccggggacgtgctcggcgacgcccaggtctacgccgaccacgccggcaagccccagctcgacgccgacgacgtccgcctcgccatccaggccaaggtcaacttctccttctcccagccgccgccccgcgaggttctactcgagctggcacgcagcaggaacaaaatcccgctgcccaagtctattgctccacctggctcgattcctctgccacctgagcaggacaccttgctgagccagaactaccagctcctacccgcattgaagccgccaactcagaccgaggaagcagaagatgacgaggagggtgccaacgcggacgctgccaatcctaacccgaactccttgcaggatcagacgggcaacgagcagcagcagcagcctcagagccagagccagggccagagggtttctttccagctgaacgccgtggccgccgcagctgcaaagcgtctccgaatgacgattgatcagctgaacatgggctgactggatgttgtagatcgttggctggtccctggtactttgtgtcattggtgttgtagattgttggctggtccctgggatcgctatcgccctcctatttcaccatgtgattagtttaaaaaagtaataattcaccatgagaaacgctgatgcttcaggaaacggagcagccttgcaaataagtgtatgttgttgccgtgcaccccgggttgattagtttctgtccatcgttgtcaacttggtttgttttgtagatggtgttgacttgtcaaacttgaactgttccattgttgtttctgaataccaaatcagtgttccc

SEQ ID NO: 10782 - protein, 234 aa, Triticum aestivum
  misc_feature (1)..(234): Ceres Seq. ID no. 13597164
TPDTTASNQTMDGGGGVRPSLQPAAAGGGASGSPDEPRDARVVRELLRSMGLGEGEYEPRVVHQFLDLAYRYAGDVLGDAQVYADHAGKPQLDADDVRLAIQAKVNFSFSQPPPREVLLELARSRNKIPLPKSIAPPGSIPLPPEQDTLLSQNYQLLPALKPPTQTEEAEDDEEGANADAANPNPNSLQDQTGNEQQQQPQSQSQGQRVSFQLNAVAAAAAKRLRMTIDQLNMG

SEQ ID NO: 10783 - protein, 224 aa, Triticum aestivum
  misc_feature (1)..(224): Ceres Seq. ID no. 13597165
MDGGGGVRPSLQPAAAGGGASGSPDEPRDARVVRELLRSMGLGEGEYEPRVVHQFLDLAYRYAGDVLGDAQVYADHAGKPQLDADDVRLAIQAKVNFSFSQPPPREVLLELARSRNKIPLPKSIAPPGSIPLPPEQDTLLSQNYQLLPALKPPTQTEEAEDDEEGANADAANPNPNSLQDQTGNEQQQQPQSQSQGQRVSFQLNAVAAAAAKRLRMTIDQLNMG

SEQ ID NO: 10784 - protein, 185 aa, Triticum aestivum
  misc_feature (1)..(185): Ceres Seq. ID no. 13597166
MGLGEGEYEPRVVHQFLDLAYRYAGDVLGDAQVYADHAGKPQLDADDVRLAIQAKVNFSFSQPPPREVLLELARSRNKIPLPKSIAPPGSIPLPPEQDTLLSQNYQLLPALKPPTQTEEAEDDEEGANADAANPNPNSLQDQTGNEQQQQPQSQSQGQRVSFQLNAVAAAAAKRLRMTIDQLNMG

SEQ ID NO: 10785 - DNA, 1135 bp, Triticum aestivum
  misc_feature (1)..(1135): Ceres Seq. ID no. 13597171
atttacctcgtcaggtcctcccaacaccataacttagcaggtaggttcgcttagacttcagccgaggtttcttcatcagccaagcccaagcccaatcggattagggaagcgtacttcgactccggccggagtgagggataggaaggaggagggggcttcagccgagacccaagggagaaagatctcacatcagataggcaactgcagcagtagagttcaacaagccgaaggggaaatggcaattggacagactatgccgaaggggtctctcgccaccagcttgagcttcccaagcagcggcagcacaaggatcctggggaggaagagggtcgctgtttctccggctccaagcccctcaggcccgcactccccggtgcggactctgcgcaagcagcgcagcattaggttccacatggatgacaccatctgccttcttgaatcgctgcctcaagatgtcttggttaaagtcctgtgcaaggtgaaccacagcgacctgaggcagctcctcctggtgtcgaagccagtcagcgaagcaacagtggttgctaaggagctgcatttcgccttcgcgacgccgtcgaaggcctccacggacggcgaggaggaagatgatggccccggggcgcccaagcaacacagggttgcacggtcgcgctgccggggcatgaatttggcaagtgtcgccgtcaatctgtcggagtcgttcagcagcttgatgtcagaggtgtaggtgtacataccacggcacgaattttcccgcttgtacttgtccatcggagcgctcttttttcttcataggccacgtcgaacagaaacactttagttagtgatatatgtagtgatcatcatatgtgttagtagtaagttatatatggtcattcttcaatgctgcgattgaagaggacacgctgctttatttctgtgtatgtaatagtataagttatatgtaagcgtcatgagtgttggagctcattagaagagtatttagtgtaagttatatgtaagcgtcatagtgttggaactcagaagagacgtctcttctcactttgtgtatgctgtagtgtacgatctctgtatactcgtgtgcatgggaagtttctcttattaataaaagtaaaatcagtttgtcttgggc

SEQ ID NO: 10786 - protein, 164 aa, Triticum aestivum
  misc_feature (1)..(164): Ceres Seq. ID no. 13597172
MAIGQTMPKGSLATSLSFPSSGSTRILGRKRVAVSPAPSPSGPHSPVRTLRKQRSIRFHMDDTICLLESLPQDVLVKVLCKVNHSDLRQLLLVSKPVSEATVVAKELHFAFATPSKASTDGEEEDDGPGAPKQHRVARSRCRGMNLASVAVNLSESFSSLMSEV

SEQ ID NO: 10787 - protein, 158 aa, Triticum aestivum
  misc_feature (1)..(158): Ceres Seq. ID no. 13597173
MPKGSLATSLSFPSSGSTRILGRKRVAVSPAPSPSGPHSPVRTLRKQRSIRFHMDDTICLLESLPQDVLVKVLCKVNHSDLRQLLLVSKPVSEATVVAKELHFAFATPSKASTDGEEEDDGPGAPKQHRVARSRCRGMNLASVAVNLSESFSSLMSEV

SEQ ID NO: 10788 - protein, 105 aa, Triticum aestivum
  misc_feature (1)..(105): Ceres Seq. ID no. 13597174
MDDTICLLESLPQDVLVKVLCKVNHSDLRQLLLVSKPVSEATVVAKELHFAFATPSKASTDGEEEDDGPGAPKQHRVARSRCRGMNLASVAVNLSESFSSLMSEV

SEQ ID NO: 10789 - DNA, 1227 bp, Triticum aestivum
  misc_feature (1)..(1227): Ceres Seq. ID no. 13597182
agaacatcctaatcgaaaagcctacaccaaaacttcccttgtcatcgcagatcacgagctagctatctgagcgcaggaaatagctaaacacaccagctcgctcgtaagcacactcccacgccgaccggcaagatggtgaagcctgtgcaggacgaggagaaccagaggctgctcctcgacgaccacaaggagaagcacttcacctccggcgaggtggtccgggacatcatcatcggcgtctctgacggcctcaccgtgcccttcgccctagccgccggcctgtcgggcgccaacgcgtcctcctcgctcgtgctcaccgccgggctcgccgaggtcgccgccggcgccatctccatggggctcggagggtacctcgccgctaagagcgacgccgaccactactaccgggagctgcagcgcgagcaggacgagatcgacaccgtcccggacacagaggccgcggagatcgcggacatactctctgagtacgggctgggccccgaggagtacgggccggtcgtcacctccctccgcaacaacccaaaggcctggctcgagttcatgatgaagttcgagctggggctggagaagccggacccgcggcgcgcgctgacgagcgcggcgacgatcgcgctggcctacgtcgtcggcggcatggtgccgctctccccctacatgttcctggcgtcggtcgacagcgccatgatgacctccgtcgtggtcaccctcgccgcgctgctcttcttcggctacgtcaagggccgcttcaccgggaaccgcccgttcctcagcgccatccagactgccatcatcggcgcgcttgcctcctccgccgcctacggcatggccaaggccgtgcaggccatctgatcgagctcgagccacgccgcgcccgggggacggctaagtaccaagaaaaataagtacagcaagctacctacctgtgtatgtatgatcaagtgttgccatagtggagtggtagctgtacgtgcagactctagcgtccgatctggtaagtgtactggtggcccaagtgtgctgatgtgcaccgttcgttttgttttctgtttcgttttcgagctcgatgatgatgtacactatgttagtagtgtatatgtttgggtgtatttggtttttcttctgtcgcgttaggtaagtatactatttgtaagggaagttgcgttatttaggtgatgtggtaatctgatgggctttgagtcagctgcc

SEQ ID NO: 10790 - protein, 245 aa, Triticum aestivum
  misc_feature (1)..(245): Ceres Seq. ID no. 13597183
MVKPVQDEENQRLLLDDHKEKHFTSGEVVRDIIIGVSDGLTVPFALAAGLSGANASSSLVLTAGLAEVAAGAISMGLGGYLAAKSDADHYYRELQREQDEIDTVPDTEAAEIADILSEYGLGPEEYGPVVTSLRNNPKAWLEFMMKFELGLEKPDPRRALTSAATIALAYVVGGMVPLSPYMFLASVDSAMMTSVVVTLAALLFFGYVKGRFTGNRPFLSAIQTAIIGALASSAAYGMAKAVQAI

SEQ ID NO: 10791 - protein, 171 aa, Triticum aestivum
  misc_feature (1)..(171): Ceres Seq. ID no. 13597184
MGLGGYLAAKSDADHYYRELQREQDEIDTVPDTEAAEIADILSEYGLGPEEYGPVVTSLRNNPKAWLEFMMKFELGLEKPDPRRALTSAATIALAYVVGGMVPLSPYMFLASVDSAMMTSVVVTLAALLFFGYVKGRFTGNRPFLSAIQTAIIGALASSAAYGMAKAVQAI

SEQ ID NO: 10792 - DNA, 501 bp, Triticum aestivum
  misc_feature (1)..(501): Ceres Seq. ID no. 13597185
ccatccccttccccccctctcttcttctccatcaatccccgacgaaaccaaccaaccaacaatggaagttgctgcgcccaagcaactcctccccatggcgccgcgggaccccaactccccgtcctcctccacctcctcctcctcgccgtcttccgccgcgtcgccctccagccaccggcccagcccgctgccgccgtccccgaggcccgtgccccgcaccatcgacaccacccccttccccaccaccttcgtccaggccgacaccgcctccttcaagcaggtcgtccagatgctcaccggcgccgacatgcctccgccgtcctcgcagccgcaggcccagagccagaggccccccgcggccgccaacagcaaggccggcgcgccgtgccggcccaagaagccggcgttcaagctctacgagcgccggagcagcatgaagaacctcaagatgatcgcgccgctcgccatggcggccgccgcgggggcgtcgccgaggaaggc

SEQ ID NO: 10793 - protein, 167 aa, Triticum aestivum
  misc_feature (1)..(167): Ceres Seq. ID no. 13597186
PSPSPPLFFSINPRRNQPTNNGSCCAQATPPHGAAGPQLPVLLHLLLLAVFRRVALQPPAQPAAAVPEARAPHHRHHPLPHHLRPGRHRLLQAGRPDAHRRRHASAVLAAAGPEPEAPRGRQQQGRRAVPAQEAGVQALRAPEQHEEPQDDRAARHGGRRGGVAEEG

SEQ ID NO: 10794 - protein, 166 aa, Triticum aestivum
  misc_feature (1)..(166): Ceres Seq. ID no. 13597187
HPLPPLSSSPSIPDETNQPTMEVAAPKQLLPMAPRDPNSPSSSTSSSSPSSAASPSSHRPSPLPPSPRPVPRTIDTTPFPTTFVQADTASFKQVVQMLTGADMPPPSSQPQAQSQRPPAAANSKAGAPCRPKKPAFKLYERRSSMKNLKMIAPLAMAAAAGASPRK

SEQ ID NO: 10795 - protein, 146 aa, Triticum aestivum
  misc_feature (1)..(146): Ceres Seq. ID no. 13597188
MEVAAPKQLLPMAPRDPNSPSSSTSSSSPSSAASPSSHRPSPLPPSPRPVPRTIDTTPFPTTFVQADTASFKQVVQMLTGADMPPPSSQPQAQSQRPPAAANSKAGAPCRPKKPAFKLYERRSSMKNLKMIAPLAMAAAAGASPRK

SEQ ID NO: 10796 - DNA, 1424 bp, Triticum aestivum
  misc_feature (1)..(1424): Ceres Seq. ID no. 13597194
ttttggatcccatccaccccttctccgctcctctttaaagccgccgcccgtccccctctgcgttccaccgcactaccgccagcgcagcgacaccagagctcgttcgatagcttagagcggaggcgaggaggaggagatgaggatgtcgctgctgagatccgcgtcgcagcacctgcgccgccgccgcggctactcgtcgacgcccgcgcagccggagcggaaggtggccatcctcggcgcggcgggcggcatcggccagccgctggcgctgctcatgaagctcaacccgctcgtctcctccctctccctctacgacatcgccgccacgcccggcgtcgccgccgacgtatcccacatcaacacccgcgccctggtgaaggggttcgtcggggacgaccagctcggggaggcgctggagggcgccgacctcgtcatcatccccgccggggtgccccgcaagcccggcatgaccagggacgacctcttcaagatcaacgcagggatcgtcaagggcctctgcaccgccatcgccacgcactgccccaacgctctcgtcaatatgatcagcaaccctgtcaactcgactgtcccaattgcagctgaggtgttcaagaaggctggtacctatgatgagaagaagctgtttggtgtgaccactcttgatgttgttcgtgctaaaacattctatgctggaaaggcgaacgtgccagttactggggtgaatgttcctgttgttggtggccatgctggaatcactatcctgccactgttctcacaggctactcctgcaagtaatgcattgtcccatgaggaccttgtcgccctcacgaagaggacacaagatggtggcacggaagttgttgaagcgaaggctggaaagggctcagcaacattgtcgatggcatatgctggtgcagtttttggagatgcatgcttgaaggggctcaacggtgttcctgacatcgtagagtgctcttttgtccaatcaactgtaacagagctgccattctttgcctccaaggtgaggctgggcaagagcggcgtggaggaagtgatggggctgggcgagctgtcggcgttggagaaggaggggctggagagcctcaagggcgagctgctgtcttccatcgagaagggcgtcaagttcgcgcaggaaagctaggctgcaacctgctcagcctataacaatcggttcacacttgaactcatgcaaatttttgttcgaccgctttcgttgcccccaaacccgggtgtgccgctgggcatcgaggcgtcgccgtgctccacaataaaatgtactactggctttgatgtcccgccagactgaactgaacctgtcgtaccagaaacagcagacaccggtgcctatgtgttcatggcattcgtacccgagatcacgaagcgcgaaaccgaagattctgcgg

SEQ ID NO: 10797 - protein, 341 aa, Triticum aestivum
  misc_feature (1)..(341): Ceres Seq. ID no. 13597195
MRMSLLRSASQHLRRRRGYSSTPAQPERKVAILGAAGGIGQPLALLMKLNPLVSSLSLYDIAATPGVAADVSHINTRALVKGFVGDDQLGEALEGADLVIIPAGVPRKPGMTRDDLFKINAGIVKGLCTAIATHCPNALVNMISNPVNSTVPIAAEVFKKAGTYDEKKLFGVTTLDVVRAKTFYAGKANVPVTGVNVPVVGGHAGITILPLFSQATPASNALSHEDLVALTKRTQDGGTEVVEAKAGKGSATLSMAYAGAVFGDACLKGLNGVPDIVECSFVQSTVTELPFFASKVRLGKSGVEEVMGLGELSALEKEGLESLKGELLSSIEKGVKFAQES

SEQ ID NO: 10798 - protein, 339 aa, Triticum aestivum
  misc_feature (1)..(339): Ceres Seq. ID no. 13597196
MSLLRSASQHLRRRRGYSSTPAQPERKVAILGAAGGIGQPLALLMKLNPLVSSLSLYDIAATPGVAADVSHINTRALVKGFVGDDQLGEALEGADLVIIPAGVPRKPGMTRDDLFKINAGIVKGLCTAIATHCPNALVNMISNPVNSTVPIAAEVFKKAGTYDEKKLFGVTTLDVVRAKTFYAGKANVPVTGVNVPVVGGHAGITILPLFSQATPASNALSHEDLVALTKRTQDGGTEVVEAKAGKGSATLSMAYAGAVFGDACLKGLNGVPDIVECSFVQSTVTELPFFASKVRLGKSGVEEVMGLGELSALEKEGLESLKGELLSSIEKGVKFAQES

SEQ ID NO: 10799 - protein, 295 aa, Triticum aestivum
  misc_feature (1)..(295): Ceres Seq. ID no. 13597197
MKLNPLVSSLSLYDIAATPGVAADVSHINTRALVKGFVGDDQLGEALEGADLVIIPAGVPRKPGMTRDDLFKINAGIVKGLCTAIATHCPNALVNMISNPVNSTVPIAAEVFKKAGTYDEKKLFGVTTLDVVRAKTFYAGKANVPVTGVNVPVVGGHAGITILPLFSQATPASNALSHEDLVALTKRTQDGGTEVVEAKAGKGSATLSMAYAGAVFGDACLKGLNGVPDIVECSFVQSTVTELPFFASKVRLGKSGVEEVMGLGELSALEKEGLESLKGELLSSIEKGVKFAQES

SEQ ID NO: 10800 - DNA, 1646 bp, Triticum aestivum
  misc_feature (1)..(1646): Ceres Seq. ID no. 13597198
ccccatccccttccttccacttgacaggtctctccacacccgcggctgcagtccacacccaaaccctagccgtcgcgtcggcagcttccaccgccatggacgaccccgccgccgcagccaccgccgccgccacggaggttggtgtgcccgcatcaccgcccccgccggccgccgaggaggccgatgcctcggcggaggcggaggccgtcccggaggcgaagaggtggcccgggtggccgggggacaacgtgttccggatggttgtgcccgtgctgaaggtcgggagcatcatcgggcggaagggcgagctcatcaagcgtctcgtcgaggagaccaaggccagggtccgcgtcctcgagggtcctgtcggcgccaccgagcgcattgttttggtgtctgcaaaagaagatccgggcttggagctgcctccagctgtggacgctctgattagagtttttaaacgtgtcaatggaataacagatggagctgctgaaggtacccagacagctgctgcacctggtgtatgtgctgcccggttggtggttcctggagctcaagcaattaacctcattgggaagcaaggtgcttcaattaaggcaatccaggagggcacgggtgctacaataagggttatatcagtagatgagcgagatcggcctttctatgtaactgacgatgagaggatagttgagatacagggtgaaacagagaaagttctaaaagcactgcaagcagtttctaatcatctccggaagtttttggttgaccatagtgtacttccattgtttgagaagactaatgccccagtaagtcaagatcgcagtgctgaaacttggaatgatatgccacatcattcaattgtttctacacaagtaaatcaacaacctgaagtgcgtgatgaatatgttcttccaatgaaaagggaccatttgtatcttgaacgggaaccgctggtagaacataacattcatcgctcaggtgtgtcattatatgggcgagatcctgccttgtcagcattacgaccttctggaatgcatggtgctggccctctacttacacagataacacaaaccatgcaaatcccacttacctatgcagaagatatcataggagtcaaaggagcaaacattgcatacatacgggctaacagtggtgctgttgtcacaattcaagagagtttgggaagccctgatgatataactgttgaaataaaggggacgtcgtcccaggtacaatctgctcaacagcttatccaggactccctggctacgcacagagaacctgtgaggagcagttacgcaggagtattagatccgttatataggtccagctacccgtatggcagctcggcctacccgtcatcatcgctgccatcttattctaacatggacgggagtggatattcatcgtcaggtcttggtggttacggttccacttaccgctactaagatggtagctgtttgccatcaagcttgcggccaccctgtctccactcctgggtcatcgttgtgtatgtcagcaatagttgctctgctggcttcatgttcctcagggtggtactattatagtcgtatcgaatcggggtgcgtgatttagtgtctacttgatttgtagatgttcttatttcgaggaagtctgttctagcc

SEQ ID NO: 10801 - protein, 481 aa, Triticum aestivum
  misc_feature (1)..(481): Ceres Seq. ID no. 15222046
PSPSFHLTGLSTPAAAVHTQTLAVASAASTAMDDPAAAATAAATEVGVPASPPPPAAEEADASAEAEAVPEAKRWPGWPGDNVFRMVVPVLKVGSIIGRKGELIKRLVEETKARVRVLEGPVGATERIVLVSAKEDPGLELPPAVDALIRVFKRVNGITDGAAEGTQTAAAPGVCAARLVVPGAQAINLIGKQGASIKAIQEGTGATIRVISVDERDRPFYVTDDERIVEIQGETEKVLKALQAVSNHLRKFLVDHSVLPLFEKTNAPVSQDRSAETWNDMPHHSIVSTQVNQQPEVRDEYVLPMKRDHLYLEREPLVEHNIHRSGVSLYGRDPALSALRPSGMHGAGPLLTQITQTMQIPLTYAEDIIGVKGANIAYIRANSGAVVTIQESLGSPDDITVEIKGTSSQVQSAQQLIQDSLATHREPVRSSYAGVLDPLYRSSYPYGSSAYPSSSLPSYSNMDGSGYSSSGLGGYGSTYRY

SEQ ID NO: 10802 - protein, 450 aa, Triticum aestivum
  misc_feature (1)..(450): Ceres Seq. ID no. 15222047
MDDPAAAATAAATEVGVPASPPPPAAEEADASAEAEAVPEAKRWPGWPGDNVFRMVVPVLKVGSIIGRKGELIKRLVEETKARVRVLEGPVGATERIVLVSAKEDPGLELPPAVDALIRVFKRVNGITDGAAEGTQTAAAPGVCAARLVVPGAQAINLIGKQGASIKAIQEGTGATIRVISVDERDRPFYVTDDERIVEIQGETEKVLKALQAVSNHLRKFLVDHSVLPLFEKTNAPVSQDRSAETWNDMPHHSIVSTQVNQQPEVRDEYVLPMKRDHLYLEREPLVEHNIHRSGVSLYGRDPALSALRPSGMHGAGPLLTQITQTMQIPLTYAEDIIGVKGANIAYIRANSGAVVTIQESLGSPDDITVEIKGTSSQVQSAQQLIQDSLATHREPVRSSYAGVLDPLYRSSYPYGSSAYPSSSLPSYSNMDGSGYSSSGLGGYGSTYRY

SEQ ID NO: 10803 - protein, 396 aa, Triticum aestivum
  misc_feature (1)..(396): Ceres Seq. ID no. 15222048
MVVPVLKVGSIIGRKGELIKRLVEETKARVRVLEGPVGATERIVLVSAKEDPGLELPPAVDALIRVFKRVNGITDGAAEGTQTAAAPGVCAARLVVPGAQAINLIGKQGASIKAIQEGTGATIRVISVDERDRPFYVTDDERIVEIQGETEKVLKALQAVSNHLRKFLVDHSVLPLFEKTNAPVSQDRSAETWNDMPHHSIVSTQVNQQPEVRDEYVLPMKRDHLYLEREPLVEHNIHRSGVSLYGRDPALSALRPSGMHGAGPLLTQITQTMQIPLTYAEDIIGVKGANIAYIRANSGAVVTIQESLGSPDDITVEIKGTSSQVQSAQQLIQDSLATHREPVRSSYAGVLDPLYRSSYPYGSSAYPSSSLPSYSNMDGSGYSSSGLGGYGSTYRY

SEQ ID NO: 10804 - DNA, 1394 bp, Triticum aestivum
  misc_feature (1)..(1394): Ceres Seq. ID no. 13597225
cccacaccgtccccctcgtctctcctcatctcgcctgtgctctccacacgaccacaccaaaaatccagacctgcccgcccgcctcgcctcctcgtctgcctcctctcctgcgcttcagtttccaggctaggttgctgctgttgttcacatggattcctttttccaaagagctttcggcgacccaatgtgctcggaagacagtaatgttgtccaacaaggaattgagaaatgcccattcctgaggaacatcaacgagcctacgagtttttccttgacatccgttaattttcccgctccggcaaccggagccaagggtccaatttttgaagacgggcccaactttgacacggcatttcgagttttccacggcagagacggggttgttccactttcagaaggagcctttgcacatattgagaagcctctgccaaagcccactcctgaatttaaccccttggcagccaaagcagctaccatcagtctctcgggattcggaggctttttcagcttcggtgatttctcaaacaagcgcaataagcagaactccaacaagaagaatcccaacaacctcccccagaataaaggccagtctaataacaatcatgaagcgatgagcaatgactggctggaaaatggtcaatgccctcttgcaaagtcatatagagcaatcggtggagtcgtgcctcttgtcgcaaagctgctgacacccccagctggtatgaaactgacgtgccctcctgcgattgttgctgcccgtgcagcaatatcccgcacggcgtttgcgaaggggcttcgccctcagcccctaccgacaaaagtagtggtgatcgcactgctcggtatggcagcaaatgttcctcttggcatctggagggagcacactacgaagttttcagtgcaatggtttgcggcggtccatgctgcagtgcctttcatagggatgctgaggaagtccatcctgatgccgaagagcgccatggcccttaccatagctgcctctatattgggtcagacaattggttcaagagctgaacgtatcagattgaagagggcaaaattagcagcagagggccatggccatgaacatgctacccggattgaagctccggtgaccctgaaaactgggagctcaggtgctgtccagctctgggatccgcttggcctcagagtcaaaggcgccgtgtccccagccctggttccgactgttggtgccatgtactgatgagatgatcatgcttcactgcggcggctgcgagaattgtatcaagagttccagaaattgtttcttgtattcattgttattgtgtcttgtaaaggattactggctacattggattcttatccccacatgagtttgggtgcaatcaataaatttcaccatgtcctttggtttc

SEQ ID NO: 10805 - protein, 357 aa, Triticum aestivum
  misc_feature (1)..(357): Ceres Seq. ID no. 13597226
MDSFFQRAFGDPMCSEDSNVVQQGIEKCPFLRNINEPTSFSLTSVNFPAPATGAKGPIFEDGPNFDTAFRVFHGRDGVVPLSEGAFAHIEKPLPKPTPEFNPLAAKAATISLSGFGGFFSFGDFSNKRNKQNSNKKNPNNLPQNKGQSNNNHEAMSNDWLENGQCPLAKSYRAIGGVVPLVAKLLTPPAGMKLTCPPAIVAARAAISRTAFAKGLRPQPLPTKVVVIALLGMAANVPLGIWREHTTKFSVQWFAAVHAAVPFIGMLRKSILMPKSAMALTIAASILGQTIGSRAERIRLKRAKLAAEGHGHEHATRIEAPVTLKTGSSGAVQLWDPLGLRVKGAVSPALVPTVGAMY

SEQ ID NO: 10806 - protein, 345 aa, Triticum aestivum
  misc_feature (1)..(345): Ceres Seq. ID no. 13597227
MCSEDSNVVQQGIEKCPFLRNINEPTSFSLTSVNFPAPATGAKGPIFEDGPNFDTAFRVFHGRDGVVPLSEGAFAHIEKPLPKPTPEFNPLAAKAATISLSGFGGFFSFGDFSNKRNKQNSNKKNPNNLPQNKGQSNNNHEAMSNDWLENGQCPLAKSYRAIGGVVPLVAKLLTPPAGMKLTCPPAIVAARAAISRTAFAKGLRPQPLPTKVVVIALLGMAANVPLGIWREHTTKFSVQWFAAVHAAVPFIGMLRKSILMPKSAMALTIAASILGQTIGSRAERIRLKRAKLAAEGHGHEHATRIEAPVTLKTGSSGAVQLWDPLGLRVKGAVSPALVPTVGAMY

SEQ ID NO: 10807 - protein, 203 aa, Triticum aestivum
  misc_feature (1)..(203): Ceres Seq. ID no. 13597228
MSNDWLENGQCPLAKSYRAIGGVVPLVAKLLTPPAGMKLTCPPAIVAARAAISRTAFAKGLRPQPLPTKVVVIALLGMAANVPLGIWREHTTKFSVQWFAAVHAAVPFIGMLRKSILMPKSAMALTIAASILGQTIGSRAERIRLKRAKLAAEGHGHEHATRIEAPVTLKTGSSGAVQLWDPLGLRVKGAVSPALVPTVGAMY

SEQ ID NO: 10808 - DNA, 1227 bp, Triticum aestivum
  misc_feature (1)..(1227): Ceres Seq. ID no. 13597233
acacaagactccaatattcagggaaccagcagcatctcaattatcaagagcggcaagagatgggatctctccccgtcccgagtgtgcaggccctggtggctgccaccggcggagacgatgtgccgctgaggtatctccggccagaggcggcagcagaggcggtcaccggcgacgccgacggcgaggctcagatccccatcatcgaccaccaaaggctgctgctggagctggaccatggcggcgaggagtctgcacgcctccacagagcctgccaggactggggtttcttccagttagttaaccacagtgtcccagacgatgtggtggagagtatgaaggccaacatccagcaattcttccagctatccgcagagacgaagaagcggttcgctcaggagcaagggcagctagaaggctacggtcaactgttcgtcgtctctgaggatcagaagctcgactgggccgacatgctcttcctctacacacagccacctgagatgaggaacaccaagttctggcctgaccagcctgctgccttcagatcggcgctggatagatattctgatgcggtgaaggatgtatcagactcccttttggctacgatggccaagaacttgggtctgaaacgagaggcgattgctgacaaatgcatccgtggaatgcagaaagtcagaataaactactacccaccatgcgcccaaccagagaaagtcgttggcttgtccccgcactctgatgctaatctcctgacacttgtcctccaagtgaatcatgtccagggcctgcagatcaagaggaacggcagctggcttcctgtcaagcccgtcccgggcgctttcgtcgtcaacatcggagatatgtttgaggtcttgacaaacgggaggtacaggagcatcgagcaccgggctgttgtcgacccgaaggaagaacggttgtcgattgcggcgttccaattcccaaacatccacaccatgataggtcctatgaaggagttgaccgcacacgaagacgatgcctacaagacattggacctcgagagcttcatgaggaccttcttctcgaccaagctcgaggggaagaacttcttggagcagatgaagctaaactagctagctagcggctgaagctgggcttgcgcgtatcatcattgagatggactcgacagtgcttgcttcagctcttctttccaatgaatggacacttctcgcaacggagttctctctcggg

SEQ ID NO: 10809 - protein, 368 aa, Triticum aestivum
  misc_feature (1)..(368): Ceres Seq. ID no. 15222051
TRLQYSGNQQHLNYQERQEMGSLPVPSVQALVAATGGDDVPLRYLRPEAAAEAVTGDADGEAQIPIIDHQRLLLELDHGGEESARLHRACQDWGFFQLVNHSVPDDVVESMKANIQQFFQLSAETKKRFAQEQGQLEGYGQLFVVSEDQKLDWADMLFLYTQPPEMRNTKFWPDQPAAFRSALDRYSDAVKDVSDSLLATMAKNLGLKREAIADKCIRGMQKVRINYYPPCAQPEKVVGLSPHSDANLLTLVLQVNHVQGLQIKRNGSWLPVKPVPGAFVVNIGDMFEVLTNGRYRSIEHRAVVDPKEERLSIAAFQFPNIHTMIGPMKELTAHEDDAYKTLDLESFMRTFFSTKLEGKNFLEQMKLN

SEQ ID NO: 10810 - protein, 349 aa, Triticum aestivum
  misc_feature (1)..(349): Ceres Seq. ID no. 15222052
MGSLPVPSVQALVAATGGDDVPLRYLRPEAAAEAVTGDADGEAQIPIIDHQRLLLELDHGGEESARLHRACQDWGFFQLVNHSVPDDVVESMKANIQQFFQLSAETKKRFAQEQGQLEGYGQLFVVSEDQKLDWADMLFLYTQPPEMRNTKFWPDQPAAFRSALDRYSDAVKDVSDSLLATMAKNLGLKREAIADKCIRGMQKVRINYYPPCAQPEKVVGLSPHSDANLLTLVLQVNHVQGLQIKRNGSWLPVKPVPGAFVVNIGDMFEVLTNGRYRSIEHRAVVDPKEERLSIAAFQFPNIHTMIGPMKELTAHEDDAYKTLDLESFMRTFFSTKLEGKNFLEQMKLN

SEQ ID NO: 10811 - protein, 258 aa, Triticum aestivum
  misc_feature (1)..(258): Ceres Seq. ID no. 15222053
MKANIQQFFQLSAETKKRFAQEQGQLEGYGQLFVVSEDQKLDWADMLFLYTQPPEMRNTKFWPDQPAAFRSALDRYSDAVKDVSDSLLATMAKNLGLKREAIADKCIRGMQKVRINYYPPCAQPEKVVGLSPHSDANLLTLVLQVNHVQGLQIKRNGSWLPVKPVPGAFVVNIGDMFEVLTNGRYRSIEHRAVVDPKEERLSIAAFQFPNIHTMIGPMKELTAHEDDAYKTLDLESFMRTFFSTKLEGKNFLEQMKLN

SEQ ID NO: 10812 - DNA, 1208 bp, Triticum aestivum
  misc_feature (1)..(1208): Ceres Seq. ID no. 13597234
gccgaaaacacaccgtcaaaacgttttgtattcgatttcgtgcccctttcgcgtgcgtacgagcgagaccttctcccccttccccttccctgccggtggcagcgaccgaggcagccgtcggagcggacggggcgcgcgtcagcgagtttgcccggatcccccgaagcgcgcgtggttccggcgggccatgggcacgccggagttccctgacctggggcggcactgcagcgtcggcgactgccaccagatcgatttcctccccttcacctgcgaccgatgcgacttcgtcttttgccttcagcaccgaagttatacatcacataaatgtccaaaggctaataacaaggatgtcactgtcgtcatctgcccattatgtgctaaaggagttcgcctgaatccaaatgaagatgcaaacatcacctgggagtctcatgttaatactgattgcgatccatcaaattaccagagagcaacaaagaaaaagaaatgcccagttcctgggtgcagagaacagctgacattttcaaacacaatcatgtgcaaagattgtagcaaagagcactgcctcaagcacagatttggtcctgatcacaagtgcccgggcccaagaaaaccagagcctaccttcccctttgccaacatgctaagaagaagtcagaaagttgagccacgcgcaaacagcagtggcagtggttcttcctggtggagctccagccttttgaatgcagcatcaagtttcagatcatcggcagaagcaggaatgcagaaactgagcattgccaccagcgaagccgtccagaaggctaaggatggggtcaccccgagcagcagtggtggtggcctcgtggagcaatgtgttcagtgtccagcaaggttttccactgtgggggccctaatcgagcacgccgagaaatcccatgggaacaactcgcgaccgagccgtggcaaagtgacgattgatgcttgccccaaatgtagcaagggatttcaagatccggtgttactagtggagcatgttgagagggaacatggaggaacttcaaaagcataaacctgcccgtgagtcatttctcatgagtatgtctatgttatatgcctgattgctgtgtaatttattcctcatttactcgatttgattgtactctagtgagctctgggctcgaattgtgcacatgaaagaaagtcttatctcaagcctgtttaaacac

SEQ ID NO: 10813 - protein, 349 aa, Triticum aestivum
  misc_feature (1)..(349): Ceres Seq. ID no. 13597235
PKTHRQNVLYSISCPFRVRTSETFSPFPFPAGGSDRGSRRSGRGARQRVCPDPPKRAWFRRAMGTPEFPDLGRHCSVGDCHQIDFLPFTCDRCDFVFCLQHRSYTSHKCPKANNKDVTVVICPLCAKGVRLNPNEDANITWESHVNTDCDPSNYQRATKKKKCPVPGCREQLTFSNTIMCKDCSKEHCLKHRFGPDHKCPGPRKPEPTFPFANMLRRSQKVEPRANSSGSGSSWWSSSLLNAASSFRSSAEAGMQKLSIATSEAVQKAKDGVTPSSSGGGLVEQCVQCPARFSTVGALIEHAEKSHGNNSRPSRGKVTIDACPKCSKGFQDPVLLVEHVEREHGGTSKA

SEQ ID NO: 10814 - protein, 287 aa, Triticum aestivum
  misc_feature (1)..(287): Ceres Seq. ID no. 13597236
MGTPEFPDLGRHCSVGDCHQIDFLPFTCDRCDFVFCLQHRSYTSHKCPKANNKDVTVVICPLCAKGVRLNPNEDANITWESHVNTDCDPSNYQRATKKKKCPVPGCREQLTFSNTIMCKDCSKEHCLKHRFGPDHKCPGPRKPEPTFPFANMLRRSQKVEPRANSSGSGSSWWSSSLLNAASSFRSSAEAGMQKLSIATSEAVQKAKDGVTPSSSGGGLVEQCVQCPARFSTVGALIEHAEKSHGNNSRPSRGKVTIDACPKCSKGFQDPVLLVEHVEREHGGTSKA

SEQ ID NO: 10815 - DNA, 1286 bp, Triticum aestivum
  misc_feature (1)..(1286): Ceres Seq. ID no. 13597237
acacaaactcctctcctcatcgcctctcctcgccccctctgcccttcctcatcttcctcccgttcggttgtggctccgtcttccctcacgattggtgcccgggcgccgccgccatcgccatggacggcctgcacggcgccgacgcctgcttctcccccgggagggccatgtcgccgcaggtccggccccccgccggcccgccggacgtaggcagccactacttggcggagctgttgcaggagcaccagaagctcgtcccgttcacgcaggtgctaccaatctgcagcaagctgttgagcaacgagataatgcgggtgacctgcctgcttaagcaccagcatggcggggactttgagaggctgccgccgatggcgagtccaaaccagatgcatcatcatccgtcgcccccaatgcctaatttctgcggaaatggttttggcccgtggaaccacggggcgcatccagagagggtaggttttcctcaaggacctgtgggttggcaaggagcaccacaaagcccctcttcatacattgtcaagaagattttgcggttggagataccaacagatacttaccctaatttcaattttattggccgtcttcttgggccaagaggaaactcgttgaagaggattgaagcctctacgggttgtcgtgtttttatcagagggaagggctcaattaaagatcctgggaaggaggaactgctgaagggaagacctggttacgaacacttggatgatcccctgcatatcttgattgaagcagagttacctgccaatgtcattgatgcaagactctcaaaagcacaagagatcctagaagagttgttgaaaccagtggatgaatcacaagactactacaagaggcagcaactccgtgagcttgccatgctgaactcaccgctccgagaggagagccctcgtctaagcccgcatccaagtccgcacccaagcccgcatcaaggcggcgcttcacccttcagtaacggtgggatgaaacgaagcaaacaatgactgcagaggcctgctcctcccaactttgacccttccagaaacctgctctcaatcggtgccctcacaacctaatttttcatgagcaagctttcatgatggtgttggcatccgtgcgaaacctgtgttactagtagaattttgatgagtctcccttgtgacattagcctgtgatgactgactgagaatgatctatgatagcgaatcctccgcctttataattagaacatttgatttatttgttgttggtaatcatcagatatggcactgtgc

SEQ ID NO: 10816 - protein, 337 aa, Triticum aestivum
  misc_feature (1)..(337): Ceres Seq. ID no. 13597238
TNSSPHRLSSPPLPFLIFLPFGCGSVFPHDWCPGAAAIAMDGLHGADACFSPGRAMSPQVRPPAGPPDVGSHYLAELLQEHQKLVPFTQVLPICSKLLSNEIMRVTCLLKHQHGGDFERLPPMASPNQMHHHPSPPMPNFCGNGFGPWNHGAHPERVGFPQGPVGWQGAPQSPSSYIVKKILRLEIPTDTYPNFNFIGRLLGPRGNSLKRIEASTGCRVFIRGKGSIKDPGKEELLKGRPGYEHLDDPLHILIEAELPANVIDARLSKAQEILEELLKPVDESQDYYKRQQLRELAMLNSPLREESPRLSPHPSPHPSPHQGGASPFSNGGMKRSKQ

SEQ ID NO: 10817 - protein, 298 aa, Triticum aestivum
  misc_feature (1)..(298): Ceres Seq. ID no. 13597239
MDGLHGADACFSPGRAMSPQVRPPAGPPDVGSHYLAELLQEHQKLVPFTQVLPICSKLLSNEIMRVTCLLKHQHGGDFERLPPMASPNQMHHHPSPPMPNFCGNGFGPWNHGAHPERVGFPQGPVGWQGAPQSPSSYIVKKILRLEIPTDTYPNFNFIGRLLGPRGNSLKRIEASTGCRVFIRGKGSIKDPGKEELLKGRPGYEHLDDPLHILIEAELPANVIDARLSKAQEILEELLKPVDESQDYYKRQQLRELAMLNSPLREESPRLSPHPSPHPSPHQGGASPFSNGGMKRSKQ

SEQ ID NO: 10818 - protein, 282 aa, Triticum aestivum
  misc_feature (1)..(282): Ceres Seq. ID no. 13597240
MSPQVRPPAGPPDVGSHYLAELLQEHQKLVPFTQVLPICSKLLSNEIMRVTCLLKHQHGGDFERLPPMASPNQMHHHPSPPMPNFCGNGFGPWNHGAHPERVGFPQGPVGWQGAPQSPSSYIVKKILRLEIPTDTYPNFNFIGRLLGPRGNSLKRIEASTGCRVFIRGKGSIKDPGKEELLKGRPGYEHLDDPLHILIEAELPANVIDARLSKAQEILEELLKPVDESQDYYKRQQLRELAMLNSPLREESPRLSPHPSPHPSPHQGGASPFSNGGMKRSKQ

SEQ ID NO: 10819 - DNA, 1204 bp, Triticum aestivum
  misc_feature (1)..(1204): Ceres Seq. ID no. 13597250
aaagagcagcagcgaccgcgcccatcaccaccaccacccgcctgacggagcccttccctcccatcggcggcggagatggtggggtggctcaaggcgctggtgtactgcgcagggggcatggcggtggtgggcctggcggcgctggtggcgctgcaggagcgcctcgtctacgtgcccgtgctccctggcctcccgcgcgcttaccccatcaagccctcgcgcctccgcctcatctacgaggacgtctggctccgcgccgccgacggcgtgcgcctccactcctggttcctccgccactctcccacctgccgaggtccgaccattctgttctttcaggaaaatgccggcaatattgcacatcgtttggaatgcgttcgactaatgatgcagcggctacagtgcaatgtgtttatgctttcttatagagggtatggtgagagcgagggttatccttctcagagtggcatcacaaaagatgcacaggccgcacttgatcatctagttcagaggaaggacattgacacatccaggatagttatctttgggagatctttaggaggtgctgttggagcagttcttgcaaaaaacaatcctgacaaggtgtctgctctaatattggaaaatacttttacatctatattggatatggctggtatcatgctgcccttcttaagatggttcataggcggtagttctgccaaaggcccaaaacttcttaactgcgttgttcgctctccatggagtacacttgatgttgttgcagaggtcaaacaacccattctcttcctttctggattgcaagatgaactggttcccccgtcacacatgaggatgctgtatgacaaagctgttgaacataacaggaattgtaggtttgttgattttcccagtggtatgcatatggatacctggatttctggaggggaccgctactggaggacaatcgaattgtttctggaccaatataccccagaagtacagagttctgatgccagctgcacaagtgaaattgctgatgatggtaattactaattagtatttaccaattcattataacattttcctgcgaatattgttctatcatgttttttcttgtacgtgtagggatacattatgttgtcatatttgtgtatttaactacatagtgtagttttactaatgttaatggcaatactgaatagtgaatacaaccatttgtatcttc

SEQ ID NO: 10820 - protein, 318 aa, Triticum aestivum
  misc_feature (1)..(318): Ceres Seq. ID no. 13597251
MVGWLKALVYCAGGMAVVGLAALVALQERLVYVPVLPGLPRAYPIKPSRLRLIYEDVWLRAADGVRLHSWFLRHSPTCRGPTILFFQENAGNIAHRLECVRLMMQRLQCNVFMLSYRGYGESEGYPSQSGITKDAQAALDHLVQRKDIDTSRIVIFGRSLGGAVGAVLAKNNPDKVSALILENTFTSILDMAGIMLPFLRWFIGGSSAKGPKLLNCVVRSPWSTLDVVAEVKQPILFLSGLQDELVPPSHMRMLYDKAVEHNRNCRFVDFPSGMHMDTWISGGDRYWRTIELFLDQYTPEVQSSDASCTSEIADDGNY

SEQ ID NO: 10821 - protein, 304 aa, Triticum aestivum
  misc_feature (1)..(304): Ceres Seq. ID no. 13597252
MAVVGLAALVALQERLVYVPVLPGLPRAYPIKPSRLRLIYEDVWLRAADGVRLHSWFLRHSPTCRGPTILFFQENAGNIAHRLECVRLMMQRLQCNVFMLSYRGYGESEGYPSQSGITKDAQAALDHLVQRKDIDTSRIVIFGRSLGGAVGAVLAKNNPDKVSALILENTFTSILDMAGIMLPFLRWFIGGSSAKGPKLLNCVVRSPWSTLDVVAEVKQPILFLSGLQDELVPPSHMRMLYDKAVEHNRNCRFVDFPSGMHMDTWISGGDRYWRTIELFLDQYTPEVQSSDASCTSEIADDGNY

SEQ ID NO: 10822 - protein, 216 aa, Triticum aestivum
  misc_feature (1)..(216): Ceres Seq. ID no. 13597253
MMQRLQCNVFMLSYRGYGESEGYPSQSGITKDAQAALDHLVQRKDIDTSRIVIFGRSLGGAVGAVLAKNNPDKVSALILENTFTSILDMAGIMLPFLRWFIGGSSAKGPKLLNCVVRSPWSTLDVVAEVKQPILFLSGLQDELVPPSHMRMLYDKAVEHNRNCRFVDFPSGMHMDTWISGGDRYWRTIELFLDQYTPEVQSSDASCTSEIADDGNY

SEQ ID NO: 10823 - DNA, 1244 bp, Triticum aestivum
  misc_feature (1)..(1244): Ceres Seq. ID no. 13597255
gggaagagaggagcggacagaaaagcctggaaagccaaaaaagaaatcaccaacgcaaaggggaaaggagagagaggcgaggcgaggctagggtttcgtccaattccgccatggattccggcgacgcgtggggccgctcctcctccacctcctccgccgccgccgccgccgcgaggcgcctgcagtcccgctacgatctgtacatggggttcgacgacgcggacgccggcggggacgaggtggaggcgcgcggggcggaggcatacaactgccccttttgcggcgaggactttgacttcgtcgggctctgctgccacatcgacgacgagcacgccgtcgaggccaagagcggggtatgccccatctgtgctacaagggttggggcggacttgataggccacctgacaatgcagcatggaagttacttcaagatgcaacgcaggcgcagagtccgaaaagtatcttctgggtcccattctttgctgtctttgttgagaaaggatttaagagacggcagtttgcagtcctttcttggtggatcatcctatgtatctaatcctcctgctgccgcccctgatccatttttgcaatctttaatttgtagtttgcctgtggctgaaccatcgaaagattttcgttcagagtcatctgacaaaacatttttgctaaataaattcccagatgaaaagatcgtagagagagctgaaacatctctgtctgataaggatcagaaggagcgggctcaaaggagtgcatttgcccgtgggcttgtgctttccacaatatttgatgatgataccatgtaagggaaatcgactttgagagtggttgcatgacatagtcaagggcactcaacacaagagaatttatctagagcaatgcaaccttgtcatgcagccactgccgctcacaggcgttaacgaccaaccggaggtccatccagttatgaatgtatatgtatttatgtatgccttgccgagagcgcatcatgagaatagtggaggaaggccttgtgttgcagctttccacatggaataaggggatactatccttagtggcattgtgcatatacaaaagaggggcgagctactcgtcatgtattagattatattctgttcatcaatgtaataagtgtgttgtaaactcatctcatccttagtatgtgagattgctttgatgttttctgtatatattcgattgtggtacatttgacatttgaggaaagggaatggagtgaatttaac

SEQ ID NO: 10824 - protein, 267 aa, Triticum aestivum
  misc_feature (1)..(267): Ceres Seq. ID no. 13597256
EERSGQKSLESQKRNHQRKGERRERRGEARVSSNSAMDSGDAWGRSSSTSSAAAAAARRLQSRYDLYMGFDDADAGGDEVEARGAEAYNCPFCGEDFDFVGLCCHIDDEHAVEAKSGVCPICATRVGADLIGHLTMQHGSYFKMQRRRRVRKVSSGSHSLLSLLRKDLRDGSLQSFLGGSSYVSNPPAAAPDPFLQSLICSLPVAEPSKDFRSESSDKTFLLNKFPDEKIVERAETSLSDKDQKERAQRSAFARGLVLSTIFDDDTM

SEQ ID NO: 10825 - protein, 231 aa, Triticum aestivum
  misc_feature (1)..(231): Ceres Seq. ID no. 13597257
MDSGDAWGRSSSTSSAAAAAARRLQSRYDLYMGFDDADAGGDEVEARGAEAYNCPFCGEDFDFVGLCCHIDDEHAVEAKSGVCPICATRVGADLIGHLTMQHGSYFKMQRRRRVRKVSSGSHSLLSLLRKDLRDGSLQSFLGGSSYVSNPPAAAPDPFLQSLICSLPVAEPSKDFRSESSDKTFLLNKFPDEKIVERAETSLSDKDQKERAQRSAFARGLVLSTIFDDDTM

SEQ ID NO: 10826 - protein, 200 aa, Triticum aestivum
  misc_feature (1)..(200): Ceres Seq. ID no. 13597258
MGFDDADAGGDEVEARGAEAYNCPFCGEDFDFVGLCCHIDDEHAVEAKSGVCPICATRVGADLIGHLTMQHGSYFKMQRRRRVRKVSSGSHSLLSLLRKDLRDGSLQSFLGGSSYVSNPPAAAPDPFLQSLICSLPVAEPSKDFRSESSDKTFLLNKFPDEKIVERAETSLSDKDQKERAQRSAFARGLVLSTIFDDDTM

SEQ ID NO: 10827 - DNA, 769 bp, Triticum aestivum
  misc_feature (1)..(769): Ceres Seq. ID no. 13597259
gttccctttcgtatttgatgatttaagaagttcccggccggcggccatggcagctcgggtcaccaaccgcgtcgcttaatcggaagccgccgccagggaggaagagaacggagcgaggagccatggccgcccggaacttcttcgtccgatcccccaaggaggaggaatccagcgccgccatccgagaggctgtcctgttgggagggaagaacgccgccattgctggcaccgtggtcgcggttcccacgttcgttgcttgccgtgtccttccttgggctaagcacaacctgaactacaccgcgcaagcgctcatcatatcgacaggtaccatgctactgaatgattcagccatcctaattacttgatcagtatcggtgttctagcttcagacagtagaaggtgataccgtacgttagattgatgatgaaagccgtttcttcaaggatcatgcgtattgctttaccactgttggatttcctgtgtcgccggcttcttcatcaccgcggataaaaccattctgcgaaacgcaaggcaaaacaccatcgggaggatcgacgagtcgacttgatccaggactgtacagaatcgcaggccctctgttccatctatgatccatggatggtgctgcatgaggagacgtcgaatttcagtttcagtttttctgtacccttgcagtgtatggaagattaaagagagttgttgctttctagggcagtggatcccgtttgctcccagttgaaagtggaataaaagatggaattttttcctt

SEQ ID NO: 10828 - protein, 80 aa, Triticum aestivum
  misc_feature (1)..(80): Ceres Seq. ID no. 15222060
MAARNFFVRSPKEEESSAAIREAVLLGGKNAAIAGTVVAVPTFVACRVLPWAKHNLNYTAQALIISTGTMLLNDSAILIT

SEQ ID NO: 10829 - protein, 43 aa, Triticum aestivum
  misc_feature (1)..(43): Ceres Seq. ID no. 15222061
MIHGWCCMRRRRISVSVFLYPCSVWKIKESCCFLGQWIPFAPS

SEQ ID NO: 10830 - DNA, 1032 bp, Triticum aestivum
  misc_feature (1)..(1032): Ceres Seq. ID no. 13597264
atcgatcaaggatcagacgacacgagctagtagccacaaagccaacgatctcgaccgctcgggtcatcagcaacgaaccatggcgcgggtgctggctctcggcgccgccgcggctttcctcctcctggcagtggcatcgaccatggcggctgcgcagaactgcgggtgcgcggcgagtcagtgctgcagccgctgggggttctgcggcgccaccagcgagtactgcggcacgggctgccgctcgggtccctgcaccgtgcccgtcaccaacaacgtgtccgtgcccgccatcgtcacgccggccttcttcggcgcgctcgtcgcccaggccgccgacgactgcgccgccaagggcttctacacccgcgacgccttcctcacggcgctcggcgggtaccccgccttcggccgcaccggctccgacgacgactccaagcgcgagatcgccgccttcttcgcccacgtcaaccacgagaccataaagttctgctacatcgacgagatcaacgggccgagcaagaactactgcgacccgacgaacgcggagtggccgtgcgccgccgggaagggctactacggccgcgggccgctgcagatctcgtggaactacaactacggggcggcagggcagagcctcggcttcgacgggctcaacgacccggacgcggtggcgcggagccccgtcttggcgttccaagcggcgctctggtactggatgaacagcgtgcacgacgtcatcgtctccggccaggggttcggcgccaccatcagggccatcaatggcgcgctcgagtgcaacggcaagaaccccagcgccgtcaacgaccgcgtcgccttctacaagcagttctgccagcagttcggcgtcgacccggggaccagcctcacctgctaagctcactatctaggacatcgcgtggacttggttgtggcatatgtgcgtgcatctgattcggacagacatattcaggataaaattgctttctgatttgatactatacctgttaatttaatactaccttcgtctcgatg

SEQ ID NO: 10831 - protein, 297 aa, Triticum aestivum
  misc_feature (1)..(297): Ceres Seq. ID no. 13597265
SIKDQTTRASSHKANDLDRSGHQQRTMARVLALGAAAAFLLLAVASTMAAAQNCGCAASQCCSRWGFCGATSEYCGTGCRSGPCTVPVTNNVSVPAIVTPAFFGALVAQAADDCAAKGFYTRDAFLTALGGYPAFGRTGSDDDSKREIAAFFAHVNHETIKFCYIDEINGPSKNYCDPTNAEWPCAAGKGYYGRGPLQISWNYNYGAAGQSLGFDGLNDPDAVARSPVLAFQAALWYWMNSVHDVIVSGQGFGATIRAINGALECNGKNPSAVNDRVAFYKQFCQQFGVDPGTSLTC

SEQ ID NO: 10832 - protein, 271 aa, Triticum aestivum
  misc_feature (1)..(271): Ceres Seq. ID no. 13597266
MARVLALGAAAAFLLLAVASTMAAAQNCGCAASQCCSRWGFCGATSEYCGTGCRSGPCTVPVTNNVSVPAIVTPAFFGALVAQAADDCAAKGFYTRDAFLTALGGYPAFGRTGSDDDSKREIAAFFAHVNHETIKFCYIDEINGPSKNYCDPTNAEWPCAAGKGYYGRGPLQISWNYNYGAAGQSLGFDGLNDPDAVARSPVLAFQAALWYWMNSVHDVIVSGQGFGATIRAINGALECNGKNPSAVNDRVAFYKQFCQQFGVDPGTSLTC

SEQ ID NO: 10833 - protein, 250 aa, Triticum aestivum
  misc_feature (1)..(250): Ceres Seq. ID no. 13597267
MAAAQNCGCAASQCCSRWGFCGATSEYCGTGCRSGPCTVPVTNNVSVPAIVTPAFFGALVAQAADDCAAKGFYTRDAFLTALGGYPAFGRTGSDDDSKREIAAFFAHVNHETIKFCYIDEINGPSKNYCDPTNAEWPCAAGKGYYGRGPLQISWNYNYGAAGQSLGFDGLNDPDAVARSPVLAFQAALWYWMNSVHDVIVSGQGFGATIRAINGALECNGKNPSAVNDRVAFYKQFCQQFGVDPGTSLTC

SEQ ID NO: 10834 - DNA, 1314 bp, Triticum aestivum
  misc_feature (1)..(1314): Ceres Seq. ID no. 13597268
aatccattcatctcagatctcaactacatcccctcctggtgttctcttctcagcttggatcccgcaccaactgttcatcttcaaggtgctcattaaatcccacctctggttttctacccagcttggatctctaatcaggcttttctccaagttagagttgctcacctcaataacttcatacatcgtcagcaatggccaccggaggtataaccatagaaaccataccagaggaacttccacttgactttctgaagaaaattacgaataacttctccagcgacagtgatcatctgattggaacaggatcatttgggtcagtttatagggggtttctggataatggcgaggtgattgctgtgaagaaactcggggaagaatcacctgtgccacgtgacaaagtatttgcaaatgaggttaagaatattatggtgctcgaacatgaaaatattgtcaagttgatagcatactgctatgacacaaacaacagattggtgctgagcaatggaagacacattattgcagagattactgaaactttactctgctatgaatacttagctaagggcggcctcgacaagaatcttttcggtgaacccagtattgactgggatacacggttcaaaataataaaggggatttgtgaaggtgtacattttatacataccttacctagtcccattctccatttgggtctgaagactcaaaatatattgctggatgacaacttgacaccaaaactttcggattttggattcgccagaatatttggggaagaatacacccgaataaacacaagaagtgttgtgggacatgttggatacatggccccagagtatctatataatggtgaaatctcggcccgttcggacatatatagtttaggcctaattatattggagatctgcacgaaagagaagaatagttccagcactgaccagaagcatgcaaggaaatatattgacggggtaaaaaaacattggttccaaatagaacaaataatggccgagtattccgatttagaagaacattgttttgaccaaatagaaggctgcatacatattggactagaatgtgtggagcttgatcagaagaagagaccttccatagagcacattgtgaacaagctcaataatctcccaactgagaatagttaattccattagattgtaagacaatatactatgataggttagcaagtgcctacgtacaaagccacactcgtgtcattttttaagttttaagaatgattaaaattcattcctatgtggttattggaaggaagttaaacaagcgaaagggttgaccaaaaaccag

SEQ ID NO: 10835 - protein, 320 aa, Triticum aestivum
  misc_feature (1)..(320): Ceres Seq. ID no. 15222062
MATGGITIETIPEELPLDFLKKITNNFSSDSDHLIGTGSFGSVYRGFLDNGEVIAVKKLGEESPVPRDKVFANEVKNIMVLEHENIVKLIAYCYDTNNRLVLSNGRHIIAEITETLLCYEYLAKGGLDKNLFGEPSIDWDTRFKIIKGICEGVHFIHTLPSPILHLGLKTQNILLDDNLTPKLSDFGFARIFGEEYTRINTRSVVGHVGYMAPEYLYNGEISARSDIYSLGLIILEICTKEKNSSSTDQKHARKYIDGVKKHWFQIEQIMAEYSDLEEHCFDQIEGCIHIGLECVELDQKKRPSIEHIVNKLNNLPTENS

SEQ ID NO: 10836 - protein, 242 aa, Triticum aestivum
  misc_feature (1)..(242): Ceres Seq. ID no. 15222063
MVLEHENIVKLIAYCYDTNNRLVLSNGRHIIAEITETLLCYEYLAKGGLDKNLFGEPSIDWDTRFKIIKGICEGVHFIHTLPSPILHLGLKTQNILLDDNLTPKLSDFGFARIFGEEYTRINTRSVVGHVGYMAPEYLYNGEISARSDIYSLGLIILEICTKEKNSSSTDQKHARKYIDGVKKHWFQIEQIMAEYSDLEEHCFDQIEGCIHIGLECVELDQKKRPSIEHIVNKLNNLPTENS

SEQ ID NO: 10837 - DNA, 1006 bp, Triticum aestivum
  misc_feature (1)..(1006): Ceres Seq. ID no. 13597299
atactttcccctaccatcagcagagccacatcagggggcccgggtggaggtttgggtcgctcctactcagaaaccccagattcccaaattcctcctcgacctccatcccgtggaatccaaccaacgcggggaggcacccagcacgccggcggcgatgatccagctcctgttcgtggtgctcgtcgccgaggcggccgtggcgacggtgctgctattcaagacgccgctgcggaagctcgccatgctgggcctcgaccgcctcaagcgcggccgccgggcgcccgtcgccgtcaagaccgttgccggcgtcgtcatcacgctcctcgcctccacgctctacagcatggccgagatcagcggccgcgccggggaccccgaggccggaggcggcgccgccctctctcccaccgaccaggtcctcttctcgcgccacctcctcgaggcgtccctcatgggttacactttgtttcttgctctagttattgaccgactccaccaatatatcagagaactacgtgggctaaagaagaatgtcgaggctgtatcgaagcagaacaaaacgttagaggaaggaaaacatggaagatctcaggagatagcgaaataccaggaagaggttgccactctgaacgaggagatgaagaaactgaagctgcaagtacaagagaagaccgaggaggtccatgttgctgaggacaaggcacttgctattcaaaagcaatctgaaagcttgctgcttgaatatgaccggctcctggaggataaccaacatcttcgggagcagctgcagtcaattgatctcaggctctccaatccttcctgagagaagaatgtattgaagtagaacattatcctatcgtcaacctacttcgtgcttgaaattgtctgtttcacttttggtgcgaagtcgagtttactctttccgtaggatgttattacccagatgacatgctaatttagtaatgcctctcttatcggttttattgtcttacctaacaatatgttg

SEQ ID NO: 10838 - protein, 273 aa, Triticum aestivum
  misc_feature (1)..(273): Ceres Seq. ID no. 13597300
YFPLPSAEPHQGARVEVWVAPTQKPQIPKFLLDLHPVESNQRGEAPSTPAAMIQLLFVVLVAEAAVATVLLFKTPLRKLAMLGLDRLKRGRRAPVAVKTVAGVVITLLASTLYSMAEISGRAGDPEAGGGAALSPTDQVLFSRHLLEASLMGYTLFLALVIDRLHQYIRELRGLKKNVEAVSKQNKTLEEGKHGRSQEIAKYQEEVATLNEEMKKLKLQVQEKTEEVHVAEDKALAIQKQSESLLLEYDRLLEDNQHLREQLQSIDLRLSNPS

SEQ ID NO: 10839 - protein, 222 aa, Triticum aestivum
  misc_feature (1)..(222): Ceres Seq. ID no. 13597301
MIQLLFVVLVAEAAVATVLLFKTPLRKLAMLGLDRLKRGRRAPVAVKTVAGVVITLLASTLYSMAEISGRAGDPEAGGGAALSPTDQVLFSRHLLEASLMGYTLFLALVIDRLHQYIRELRGLKKNVEAVSKQNKTLEEGKHGRSQEIAKYQEEVATLNEEMKKLKLQVQEKTEEVHVAEDKALAIQKQSESLLLEYDRLLEDNQHLREQLQSIDLRLSNPS

SEQ ID NO: 10840 - protein, 193 aa, Triticum aestivum
  misc_feature (1)..(193): Ceres Seq. ID no. 13597302
MLGLDRLKRGRRAPVAVKTVAGVVITLLASTLYSMAEISGRAGDPEAGGGAALSPTDQVLFSRHLLEASLMGYTLFLALVIDRLHQYIRELRGLKKNVEAVSKQNKTLEEGKHGRSQEIAKYQEEVATLNEEMKKLKLQVQEKTEEVHVAEDKALAIQKQSESLLLEYDRLLEDNQHLREQLQSIDLRLSNPS

SEQ ID NO: 10841 - DNA, 547 bp, Triticum aestivum
  misc_feature (1)..(547): Ceres Seq. ID no. 13597312
tcgttcgtttcagatcagatccagcgagagagagagacagagaaatccccaatccaccaaaccctaacccacacccactaggagagatcggcgagagagatcaggcgatggccgttgagaagatgcagtttgccatgccgatggccaccggcttcgagggatttccctacatcccgttccaggcggagaaggagcaggcgcaggcgttcgtcagggccagggcggagccggaggaggaggcggcgctcgtcatggtcaggacgaagccagaggcggcgatccgcaatgccaagtccaaggcgtccctgaaggccaaggccaaggcagagaaggaggcggaggtcctcaaggccaaggcggagaaggaagcggcgatcctcaaggccaaggcggaggcagagaaggaggaagcgatcaaggccaaggccaaggcggcgaaggaggagacgatcatcaaggccaactgctgctgcggctcggacgaggacgatgtgccgtacgacaagctgtgccacgactccgactcggaggaagacccggatataat

SEQ ID NO: 10842 - protein, 181 aa, Triticum aestivum
  misc_feature (1)..(181): Ceres Seq. ID no. 13597313
VRFRSDPARERDREIPNPPNPNPHPLGEIGERDQAMAVEKMQFAMPMATGFEGFPYIPFQAEKEQAQAFVRARAEPEEEAALVMVRTKPEAAIRNAKSKASLKAKAKAEKEAEVLKAKAEKEAAILKAKAEAEKEEAIKAKAKAAKEETIIKANCCCGSDEDDVPYDKLCHDSDSEEDPDI

SEQ ID NO: 10843 - protein, 146 aa, Triticum aestivum
  misc_feature (1)..(146): Ceres Seq. ID no. 13597314
MAVEKMQFAMPMATGFEGFPYIPFQAEKEQAQAFVRARAEPEEEAALVMVRTKPEAAIRNAKSKASLKAKAKAEKEAEVLKAKAEKEAAILKAKAEAEKEEAIKAKAKAAKEETIIKANCCCGSDEDDVPYDKLCHDSDSEEDPDI

SEQ ID NO: 10844 - protein, 141 aa, Triticum aestivum
  misc_feature (1)..(141): Ceres Seq. ID no. 13597315
MQFAMPMATGFEGFPYIPFQAEKEQAQAFVRARAEPEEEAALVMVRTKPEAAIRNAKSKASLKAKAKAEKEAEVLKAKAEKEAAILKAKAEAEKEEAIKAKAKAAKEETIIKANCCCGSDEDDVPYDKLCHDSDSEEDPDI

SEQ ID NO: 10845 - DNA, 1311 bp, Triticum aestivum
  misc_feature (1)..(1311): Ceres Seq. ID no. 13597320
gatttcccccagaaattaataaaccaccaaagccatagcttgaggcggcgagaagcagagccggagaaggaggggagtcggagaagatggttgttctcgtggtagcgacggcgtccgacccggcgtccatcggccccgccgccgcgttcctggctatgcctggctggtcccccggcccgcccatccccgaggggatggagagctttacaaatgggaatgttaggttattgaagcatgaacgcagcattgttgcagaggatgatcttgaccgtcggtggcaggaagccactggagaggctgtttctgaggtcatattcctcagcaaacacactgcagtctccaaccgccctgcactcactgtccatccaatcggtgtgccacatctgagggaggatgagaccccccctcaaggagggaggcctggatgggcaggggtgccaaaccctcgaattggcccatggttccggttgatgcaaaaggttgctgccgaccaaggtcttgttccagagtttgagattacacttgaagctactcaccatggaccacttaccagtacacccacgatgtttgttgagataggaagtacacaagaatactggggtagacaagatgctgcacaggccattgctctagttctatggaaaggtcttggccttgaggaaggaaatgctgttggaacttggctggggagtggtgaaaaggttctactaggtatcggtggtggtcactatgcccctcgccatatggatattgtcatcaaagacggtgtctgggtgggtcatctcctgtctggttactctttgccgatggaggctccacctcaagtaaatggaaagagttctggtgaggttggtgggatgtggaagcattccatcaaagtttcgtatgaagccacaaaggcaggatttcccggtggtgaagttatagcacatcttgatcagaagagcttcaagggctggcaaaagaacgccatcacgagctatttgcaggagcaaaatatcaagataggaaaacccaatgatttcctctgcaaaaaaatttaaccgcgtccgcaaggcaagtcgtcgaagtgacttcaccctccctagggcctggcacatacaaatggagtaaatatagagcactgtattttcgtaacccgatttcaagatgtagagtactccctccccgttcgtcttagaaggcctgacttgtgccaaaaaaaaaaacaggaatatactacgagagagacatatcttaaggacacgactatgcgtgcttgtggttcccagagttggcaggcaaatgggggctatcattatccatattttt

SEQ ID NO: 10846 - protein, 318 aa, Triticum aestivum
  misc_feature (1)..(318): Ceres Seq. ID no. 13597321
MVVLVVATASDPASIGPAAAFLAMPGWSPGPPIPEGMESFTNGNVRLLKHERSIVAEDDLDRRWQEATGEAVSEVIFLSKHTAVSNRPALTVHPIGVPHLREDETPPQGGRPGWAGVPNPRIGPWFRLMQKVAADQGLVPEFEITLEATHHGPLTSTPTMFVEIGSTQEYWGRQDAAQAIALVLWKGLGLEEGNAVGTWLGSGEKVLLGIGGGHYAPRHMDIVIKDGVWVGHLLSGYSLPMEAPPQVNGKSSGEVGGMWKHSIKVSYEATKAGFPGGEVIAHLDQKSFKGWQKNAITSYLQEQNIKIGKPNDFLCKKI

SEQ ID NO: 10847 - protein, 295 aa, Triticum aestivum
  misc_feature (1)..(295): Ceres Seq. ID no. 13597322
MPGWSPGPPIPEGMESFTNGNVRLLKHERSIVAEDDLDRRWQEATGEAVSEVIFLSKHTAVSNRPALTVHPIGVPHLREDETPPQGGRPGWAGVPNPRIGPWFRLMQKVAADQGLVPEFEITLEATHHGPLTSTPTMFVEIGSTQEYWGRQDAAQAIALVLWKGLGLEEGNAVGTWLGSGEKVLLGIGGGHYAPRHMDIVIKDGVWVGHLLSGYSLPMEAPPQVNGKSSGEVGGMWKHSIKVSYEATKAGFPGGEVIAHLDQKSFKGWQKNAITSYLQEQNIKIGKPNDFLCKKI

SEQ ID NO: 10848 - protein, 282 aa, Triticum aestivum
  misc_feature (1)..(282): Ceres Seq. ID no. 13597323
MESFTNGNVRLLKHERSIVAEDDLDRRWQEATGEAVSEVIFLSKHTAVSNRPALTVHPIGVPHLREDETPPQGGRPGWAGVPNPRIGPWFRLMQKVAADQGLVPEFEITLEATHHGPLTSTPTMFVEIGSTQEYWGRQDAAQAIALVLWKGLGLEEGNAVGTWLGSGEKVLLGIGGGHYAPRHMDIVIKDGVWVGHLLSGYSLPMEAPPQVNGKSSGEVGGMWKHSIKVSYEATKAGFPGGEVIAHLDQKSFKGWQKNAITSYLQEQNIKIGKPNDFLCKKI

SEQ ID NO: 10849 - DNA, 2213 bp, Triticum aestivum
  misc_feature (1)..(2213): Ceres Seq. ID no. 13597334
tcatcatcaccatggctcggatccaaggagaggtacgtgagtgagtgatatgctcccactcccacatcttcttctagtccacaccttcctcccccatcccctgcctggccctgctccccatttacgcgcccggtgcgtacattcatgcatgacgcacacggccatgaagaggaggaggcggcggcatggccagcctcatcatcttcacctccttgtctccctcctcctcctcctactcctcgaccgcgcttgtgcagctctaccgtcgtcgcccaagatggcaaggatccagcagcatctcgaccgcgccaacaagccagcactgcgcaccatacagagcatggacggggacaccatcgactgcgtgccccggcacaagcagcacgcgctggaccacccgctcctcaggaaccacaggatccagagcgcgccgccgagcatgcccgcctccgccaccgccaccttcagtgctagcgcggcggcgtcgggcaactccaccagcagggccagagcggcgtggcagacgtggcaccacgcgggccactgcccgaaaggcacggtgcccgtgcggcggaccaccgccgaggacgtgctgcgcggcgggcagtcgctcttccgcttcggccgcaagcggcaccgccgcgaccgtgcggcccgcgccgccaacgcccccgacgtcgtcaccggcaacggccacgagcacgcgatcgcgtacacggcggtggggcagcaggaggtgtacggcgccaaggcgaccatcaacgtctgggatccggccatccacgagaacaacggcttcagcctctcgcagctctggctgctctccggctccttcaacggctccgacctcaacagcatcgaggccgggtggcaggtcactcccactcttccatcccatttccatcccatattcttagtgatgatccatctcacttggcttgttcattaaccgttgtaccagtaacttattgcatctgcattgcacggtaaaaaatcattgagatctgcagcgcgggcacatggcgccataaatgcgtgcacatctcgactcgatagatcgattccgtttgtgtacgacggctaccatagtttaacctcttctcttcatttgaggtcaacccatccatatggagaagtactccaacttgatatagtactaccatagaagaatccatgcatgtgagaaatatatatggaatccccgcagaaaaaggaggaatatatataatgggactgtacacttggctgtagtaggagacaaaattgctccaaaaagtgctaatgagttgtggtaatggacacgctcagctcagcgctaactttggatctactccagcaacatgcatgataagcactgcatgcatgcacatgtgctgcttaatcgatctgcatgcatgaaagcttacagtttacgtttctttctagtcaggtcagccctgagctgtacggtgacagcaggcctaggctcttcacatattggacaagcgacgcgtacgaggcgacgggctgctacaacgcgctgtgcccggacttcgtgcagaccagctcccgcgtggccatcggcgccgccatctccccggtctcctccctcgctggcgagcagtacgacatgacgctcctcatctggaaggaccccaagctcggcaactggtggcttagctacggcgacgccggagcctcgcagctcgtcggctactggcccgccgagctcttcacgcacctctccggccacgccagcatggtcgagtggggcggcgaggtcgttaacaccagcccggggggcgcgcacaccgccacgcagatgggctccggcaggttcgccgccgaggggttcggccgcgccagctacttccgcaacctcgagacggtggacgccgggaacagcctcgcccccgtgtcgctcgacgccttgcagacgctggccgaggacgccggctgctacgacatcaggaaggcctacgacgagcgggacggatggggcacgcacttctactacgggggaccgggacacaacccggcctgcccctagcatagccttggggaccaaacacgtcttgctggtgtacattttgtcttgtttttcggggacttgatcgctctcacctctcagccgatcgtgatcagcaacgtcttgactaaatctagtgttagagcatctacggccggactcgaaaaatccgacctttcaaacgcccgtgcacacggggtgtctg

SEQ ID NO: 10850 - protein, 299 aa, Triticum aestivum
  misc_feature (1)..(299): Ceres Seq. ID no. 13597335
MLPLPHLLLVHTFLPHPLPGPAPHLRARCVHSCMTHTAMKRRRRRHGQPHHLHLLVSLLLLLLLDRACAALPSSPKMARIQQHLDRANKPALRTIQSMDGDTIDCVPRHKQHALDHPLLRNHRIQSAPPSMPASATATFSASAAASGNSTSRARAAWQTWHHAGHCPKGTVPVRRTTAEDVLRGGQSLFRFGRKRHRRDRAARAANAPDVVTGNGHEHAIAYTAVGQQEVYGAKATINVWDPAIHENNGFSLSQLWLLSGSFNGSDLNSIEAGWQVTPTLPSHFHPIFLVMIHLTWLVH

SEQ ID NO: 10851 - protein, 266 aa, Triticum aestivum
  misc_feature (1)..(266): Ceres Seq. ID no. 13597336
MTHTAMKRRRRRHGQPHHLHLLVSLLLLLLLDRACAALPSSPKMARIQQHLDRANKPALRTIQSMDGDTIDCVPRHKQHALDHPLLRNHRIQSAPPSMPASATATFSASAAASGNSTSRARAAWQTWHHAGHCPKGTVPVRRTTAEDVLRGGQSLFRFGRKRHRRDRAARAANAPDVVTGNGHEHAIAYTAVGQQEVYGAKATINVWDPAIHENNGFSLSQLWLLSGSFNGSDLNSIEAGWQVTPTLPSHFHPIFLVMIHLTWLVH

SEQ ID NO: 10852 - protein, 261 aa, Triticum aestivum
  misc_feature (1)..(261): Ceres Seq. ID no. 13597337
MKRRRRRHGQPHHLHLLVSLLLLLLLDRACAALPSSPKMARIQQHLDRANKPALRTIQSMDGDTIDCVPRHKQHALDHPLLRNHRIQSAPPSMPASATATFSASAAASGNSTSRARAAWQTWHHAGHCPKGTVPVRRTTAEDVLRGGQSLFRFGRKRHRRDRAARAANAPDVVTGNGHEHAIAYTAVGQQEVYGAKATINVWDPAIHENNGFSLSQLWLLSGSFNGSDLNSIEAGWQVTPTLPSHFHPIFLVMIHLTWLVH

SEQ ID NO: 10853 - DNA, 1188 bp, Triticum aestivum
  misc_feature (1)..(1188): Ceres Seq. ID no. 13597338
aaaaacagatcagtccggggtcgtggcctccactcggcatcttcttcctcccccacatcgcacttcctcccctgctagattcgtccctccaccgaccggcaaggcctctctcctgcacttccctcgcccaaggttgcaccagagaaggcggaaaacatcacagtttgcgaaatcgtggagcggtagagagagatggccgagacggtgttcgctccgtgtttggaagggatgaagcatgtcaggtcggacagcggggtcatgctcgccaagcccttccttgatgtctgcaagcaaatcttgcctgtcctggataaatttggtgctgctatggcaattgtgaagagtgatattggaggtaatatcacgaggttggagaacaagtattcttcagacccgtcaaaatatgagcacttgtacaccatggtccaagaagaagttgaaaagaagaccgcaaagggttcatcaagctgcacaaatggacttctatggctcacgagggctatggacttccttgttgaactgttccgtaatctacttgaccatccagactggactatgagtcaagcatgtactgattcatacacaaaaactctgaagaaatggcatgggtggctcgccagttccagttttacggtggctatgaagcttgctcctaacaaagataaatttatggaggtaattagcggaacgggtgatatcaaagcagacattgagaaattctgcaccaccttttatccctttctcaaggagaatcatgacttcctggccagtgttgggctcgatgatatgaaggcttcttaatgcaatacacaccgacaatcatcacaaatatgaagtgctgctattttctcgaattttattgtggccaaggatacactgttttgcatactgatcttcaggaaattatagacgaataataagtcaaaatgtttgggtgttcatgacccatagctacttacatacaagatgaattgaatgtatgcatgggatcaaaattaacttttgaaagtcaccttgtcagccaagccggccattttaccaattgatgtaactgaagagaacgcagaggatgcagatatgtggtgatcttgtcgttcagtttataaactgctgtgtaagtgattctgtttataaactgctgtataagtgatgaggcgaagatgcaaattaagagtctgttattgatgc

SEQ ID NO: 10854 - protein, 202 aa, Triticum aestivum
  misc_feature (1)..(202): Ceres Seq. ID no. 13597339
MAETVFAPCLEGMKHVRSDSGVMLAKPFLDVCKQILPVLDKFGAAMAIVKSDIGGNITRLENKYSSDPSKYEHLYTMVQEEVEKKTAKGSSSCTNGLLWLTRAMDFLVELFRNLLDHPDWTMSQACTDSYTKTLKKWHGWLASSSFTVAMKLAPNKDKFMEVISGTGDIKADIEKFCTTFYPFLKENHDFLASVGLDDMKAS

SEQ ID NO: 10855 - protein, 190 aa, Triticum aestivum
  misc_feature (1)..(190): Ceres Seq. ID no. 13597340
MKHVRSDSGVMLAKPFLDVCKQILPVLDKFGAAMAIVKSDIGGNITRLENKYSSDPSKYEHLYTMVQEEVEKKTAKGSSSCTNGLLWLTRAMDFLVELFRNLLDHPDWTMSQACTDSYTKTLKKWHGWLASSSFTVAMKLAPNKDKFMEVISGTGDIKADIEKFCTTFYPFLKENHDFLASVGLDDMKAS

SEQ ID NO: 10856 - protein, 180 aa, Triticum aestivum
  misc_feature (1)..(180): Ceres Seq. ID no. 13597341
MLAKPFLDVCKQILPVLDKFGAAMAIVKSDIGGNITRLENKYSSDPSKYEHLYTMVQEEVEKKTAKGSSSCTNGLLWLTRAMDFLVELFRNLLDHPDWTMSQACTDSYTKTLKKWHGWLASSSFTVAMKLAPNKDKFMEVISGTGDIKADIEKFCTTFYPFLKENHDFLASVGLDDMKAS

SEQ ID NO: 10857 - DNA, 1378 bp, Triticum aestivum
  misc_feature (1)..(1378): Ceres Seq. ID no. 13597361
aacacaataccatcatcgtccttcctctcatcccctctctctcccacagagacacatcactctctctctctcccatctccatctctgtcagaaggggaggccagagggggacggagaggggcaatggagctggacgagcaggccttcttggaggagctcttctcgctgaggagggacgccacggccgcgtgggagtgcaatgccatgggggacttcttctccccggcctgtgctggcgccgccgccatggactgcttccaggagcggcaccagcccaccgtcagcgtgctgcccaccttcaccgcctccttcgaccacccacagcagcaggcgggggtgaccgcggctggggggttcgactgcctcagcgaggtctacggcggcggccccttccccaatgccgtcggcggcgggtacggcgagatggggtttctcgccgcgatggaccccaaggcggcggcggcggcggctctggtggaggggggcggcctcggcgcctgcaaggtggagcccgggctggcggcggtggacggcggcgcgttcgggtcgggtcagatggcggccgtcccggcgccggcgtcgaggaagaagcgggtggagggcatgccgtccaagaacctgatggcggagcggcgccgccgcaagcgcctcaacgaccgcctctccatgctccgctccgtcgtgcccaagatcagcaagatggacaggacgtcgatcctgggggacaccatcgactacatgaaggagctgctggagaggatccggcggctgcaggaggagatggaggagccgcatgccggtccggcggcggcgccgctgctgagcgtgttccgggagctcaaccccaacgagatgctcgccaggaacacccccaagttcgaggtggagcgcaaggaggaggacacccgggtggagatctactgcgcggccaagccggggctgctgctgtcgacggtgagcacgctcgacacgctgggcctcgacatccagcagtgcgtcgtcagctgcttcaacgacttcgccatgcacgcctcctgctccgagatgcagagggagatgatcagcgcggacgccatcaagcaggagctgttcaagaacgccggctacggagggggctgcttgtgagcaagaagcaccaccaccagcaccaccatgagtccatgaccaccaccaccagcaggaggaggaaggataataaagtagaagtagctgtagcaggcagtagaattagcagttagcactagcaccagcagccagcagtagcgagaaggggccggaagatctgggcggaggccctttatcgcaaatcataaccatgtcgccgtgatcaaaattctctcctgttagcaacaaagatcggcgggcgcctttccgatgc

SEQ ID NO: 10858 - protein, 411 aa, Triticum aestivum
  misc_feature (1)..(411): Ceres Seq. ID no. 13597362
HNTIIVLPLIPSLSHRDTSLSLSPISISVRRGGQRGTERGNGAGRAGLLGGALLAEEGRHGRVGVQCHGGLLLPGLCWRRRHGLLPGAAPAHRQRAAHLHRLLRPPTAAGGGDRGWGVRLPQRGLRRRPLPQCRRRRVRRDGVSRRDGPQGGGGGGSGGGGRPRRLQGGARAGGGGRRRVRVGSDGGRPGAGVEEEAGGGHAVQEPDGGAAPPQAPQRPPLHAPLRRAQDQQDGQDVDPGGHHRLHEGAAGEDPAAAGGDGGAACRSGGGAAAERVPGAQPQRDARQEHPQVRGGAQGGGHPGGDLLRGQAGAAAVDGEHARHAGPRHPAVRRQLLQRLRHARLLLRDAEGDDQRGRHQAGAVQERRLRRGLLVSKKHHHQHHHESMTTTTSRRRKDNKVEVAVAGSRISS

SEQ ID NO: 10859 - protein, 374 aa, Triticum aestivum
  misc_feature (1)..(374): Ceres Seq. ID no. 13597363
NTIPSSSFLSSPLSPTETHHSLSLPSPSLSEGEARGGRRGAMELDEQAFLEELFSLRRDATAAWECNAMGDFFSPACAGAAAMDCFQERHQPTVSVLPTFTASFDHPQQQAGVTAAGGFDCLSEVYGGGPFPNAVGGGYGEMGFLAAMDPKAAAAAALVEGGGLGACKVEPGLAAVDGGAFGSGQMAAVPAPASRKKRVEGMPSKNLMAERRRRKRLNDRLSMLRSVVPKISKMDRTSILGDTIDYMKELLERIRRLQEEMEEPHAGPAAAPLLSVFRELNPNEMLARNTPKFEVERKEEDTRVEIYCAAKPGLLLSTVSTLDTLGLDIQQCVVSCFNDFAMHASCSEMQREMISADAIKQELFKNAGYGGGCL

SEQ ID NO: 10860 - protein, 333 aa, Triticum aestivum
  misc_feature (1)..(333): Ceres Seq. ID no. 13597364
MELDEQAFLEELFSLRRDATAAWECNAMGDFFSPACAGAAAMDCFQERHQPTVSVLPTFTASFDHPQQQAGVTAAGGFDCLSEVYGGGPFPNAVGGGYGEMGFLAAMDPKAAAAAALVEGGGLGACKVEPGLAAVDGGAFGSGQMAAVPAPASRKKRVEGMPSKNLMAERRRRKRLNDRLSMLRSVVPKISKMDRTSILGDTIDYMKELLERIRRLQEEMEEPHAGPAAAPLLSVFRELNPNEMLARNTPKFEVERKEEDTRVEIYCAAKPGLLLSTVSTLDTLGLDIQQCVVSCFNDFAMHASCSEMQREMISADAIKQELFKNAGYGGGCL

SEQ ID NO: 10861 - DNA, 1390 bp, Triticum aestivum
  misc_feature (1)..(1390): Ceres Seq. ID no. 13597365
tcatcccctgcttctcgagctgcacacctcatctcatctcatctcagtcttcccccacattgccattccctccttgcgagtagcagcagcaatggccagcctcgccgacctcgtcaacctcgacctcagcgactgcaccgacaagatcatcgtcgagtacctctgggttggaggatccggtatcgacatcaggagcaaagcaaggacggtgaacggccccatcaccgacgcgagccagctgcccaagtggaactacgacggctccagcaccggccaggctcccggagaggacagcgaagtcatcctctacccccaggccattttcaaggacccgttcaggaggggtgacaacctccttgttatgtgcgactgctacacaccccaaggtgtgccaatccccacgaacaagaggcacaacgctgccaagatcttcaacaccccgaaggttgcagctgaggagacatggtatggaattgagcaggagtacactctcctccagaaggacgtgaactggcctcttggctggcccattggtggctaccctggtccgcagggaccatactactgcgccgccggcgcggacaaggcgttcgggcgtgacatcgtggacgcccactacaaggcctgcctctacgccgggatcaacatcagcggcatcaacggggaggtcatgcccggccagtgggagttccaagttgggccgtccgtcgggatcgcggcgtccgaccagctgtgggtggcgcgctacatcctcgagaggatcactgaggttgccggggtggtgctgtccctggacccgaagccgatcccgggcgactggaacggcgcgggcgcgcacaccaactacagcaccaagtcgatgcgggaggccggcgggtacgaggtgatcaagacggccatcgagaagctgggcaagcggcacgcgcagcacatcgccgcctacggcgagggcaacgagcgccgcctcacgggccaccacgagaccgccgacatcaacaccttcaagtggggcgtggcggaccgcggcgcgtccgtccgcgtgggccgcgacaccgagaaggacggcaagggctacttcgaggaccgcaggccggcctccaacatggacccctacgtcgtcacctccatgatcgccgagaccacgctcctcctctgagccacccacccacggccatgcctaccgccgccagatcatgacacccaggctctcgactctctcgatcgagggtggcgattgattaatttctgcaaaacgtttcgtgtttccatttcttttgcaaggtctagtctgtttttggggcgtgcctttggtgtctttcactttactcgttcagataagagtaagagtcttcagtctactctgaaaataatgttgttttcgcattccgat

SEQ ID NO: 10862 - protein, 384 aa, Triticum aestivum
  misc_feature (1)..(384): Ceres Seq. ID no. 13597366
HPLLLELHTSSHLISVFPHIAIPSLRVAAAMASLADLVNLDLSDCTDKIIVEYLWVGGSGIDIRSKARTVNGPITDASQLPKWNYDGSSTGQAPGEDSEVILYPQAIFKDPFRRGDNLLVMCDCYTPQGVPIPTNKRHNAAKIFNTPKVAAEETWYGIEQEYTLLQKDVNWPLGWPIGGYPGPQGPYYCAAGADKAFGRDIVDAHYKACLYAGINISGINGEVMPGQWEFQVGPSVGIAASDQLWVARYILERITEVAGVVLSLDPKPIPGDWNGAGAHTNYSTKSMREAGGYEVIKTAIEKLGKRHAQHIAAYGEGNERRLTGHHETADINTFKWGVADRGASVRVGRDTEKDGKGYFEDRRPASNMDPYVVTSMIAETTLLL

SEQ ID NO: 10863 - protein, 354 aa, Triticum aestivum
  misc_feature (1)..(354): Ceres Seq. ID no. 13597367
MASLADLVNLDLSDCTDKIIVEYLWVGGSGIDIRSKARTVNGPITDASQLPKWNYDGSSTGQAPGEDSEVILYPQAIFKDPFRRGDNLLVMCDCYTPQGVPIPTNKRHNAAKIFNTPKVAAEETWYGIEQEYTLLQKDVNWPLGWPIGGYPGPQGPYYCAAGADKAFGRDIVDAHYKACLYAGINISGINGEVMPGQWEFQVGPSVGIAASDQLWVARYILERITEVAGVVLSLDPKPIPGDWNGAGAHTNYSTKSMREAGGYEVIKTAIEKLGKRHAQHIAAYGEGNERRLTGHHETADINTFKWGVADRGASVRVGRDTEKDGKGYFEDRRPASNMDPYVVTSMIAETTLLL

SEQ ID NO: 10864 - protein, 264 aa, Triticum aestivum
  misc_feature (1)..(264): Ceres Seq. ID no. 13597368
MCDCYTPQGVPIPTNKRHNAAKIFNTPKVAAEETWYGIEQEYTLLQKDVNWPLGWPIGGYPGPQGPYYCAAGADKAFGRDIVDAHYKACLYAGINISGINGEVMPGQWEFQVGPSVGIAASDQLWVARYILERITEVAGVVLSLDPKPIPGDWNGAGAHTNYSTKSMREAGGYEVIKTAIEKLGKRHAQHIAAYGEGNERRLTGHHETADINTFKWGVADRGASVRVGRDTEKDGKGYFEDRRPASNMDPYVVTSMIAETTLLL

SEQ ID NO: 10865 - DNA, 1988 bp, Triticum aestivum
  misc_feature (1)..(1988): Ceres Seq. ID no. 13597375
aaaaaaccctaatcccctcgcagccgccacagcccccggagcccgcccgcccgaacccaccgccatggccgacgacgcggcatcggccccgccgacggcgcagctggccgccgcctccatctcctcgccgccctcctcggacctcgagccaccgacctcccgcacccgcatccgcgccatcctggacgccggcgacgccatggccggggagcgcgtggtcgtcggcggctgggtcaagaccggccgccagcagggcaagggcgagttcgccttcctcgaggtcaacgacgggtcctgccaggggaacctccaggtcatggtcgaaaaggacgtgcatccgctcgcaagcctcacccacacgggcacctccgtgctcgtcgagggcgtgctcaagaagccccccgcggaagccaagcagcgtatcgagttgaaggtggagcgggtcatcgagctcggggaggtggacgccgccgcctacccgctgcccaagaccaagatcacgctcgagacactcagggactttgtccacctccgcgcacgcaccaacacgataggcgcagttgctcggataaggcaccagcttgcctatgcaacccacagttttttcgatgaaaatggatttttgtatattcacacccccataataaccaccagcgactgtgagggtgcaggtgagatgttccaagtcactgccttattcagccaggctgaaaaggtggagaaggagcttaaggagaaccctgcaccatcagaagctgacgttgaggctgctaagcttgttgttaaagagaaaggagatgcagttgctcaactgaaagcagcaaaagctagcaagcaagagataactgctgctgtttccgtgcttacaaaagctaaagagaatgtgttaagggtggaagagaggtctaagttgaaacctggacttccactcaagggtgatgggaaaattgcgtttgagaatgacttcttcaagcgtcaagcttttctgaccgtttcaggccaacttcaggtcgaaacttatgcttgtgctctcagtaatgtgtatacctttggaccgacattccgggcagagaactcacatacatcaagacatttggcagagttttggatggttgaaccagaaattgcatttgcaaacttgcaggatgatatgaactgtgctgaaaggtatgtacagtacctgtgcaaatggttactcaagcattgccgagaagacatggaattcatggttaaacatgtggacaagaccgcaattgagcgtctggagcttgtttcctctactccgtttgaacgcatttcatatacaaaggctgtggagatcttagaaggtgtagataagaagtttgagaacaaggttgaatggggaattgatttagcgtctgagcatgagaggtatttgactgaggtgatatttaagaggccagttattgtgtataactacccaaaaggaataaaggcattttacatgaggctcaatgatgaccagaagacagtagctgcaatggatgttcttgttcccaaggttggtgaattaatcggtggaagccaaagggaggagcgtcttgatattcttaagcaaaggatactggacgcagatcttcctctggagccgtatgagtggtacctggacctccgacgctttggctcagtgaagcacagcgggttcggcctggggttcgagaggatgatccttttcgccaccggcctggagaacatcagagatgtcatcccgttcccacgataccccgggagggccgatctttgaagggttgcagatttctgccttgaaatataagaacgtcaattacactttcgttagcgtttttggaatagtgttggccgcccggttagattgatatatatacgcatgctgatatcatttgatatgcctcgtgtcttggcttgttgtgattctaaaaagaagtatcaggcttgttttatgattagaatattgaagtattattggtccttagcatcttcttttttgt

SEQ ID NO: 10866 - protein, 587 aa, Triticum aestivum
  misc_feature (1)..(587): Ceres Seq. ID no. 15222085
KNPNPLAAATAPGARPPEPTAMADDAASAPPTAQLAAASISSPPSSDLEPPTSRTRIRAILDAGDAMAGERVVVGGWVKTGRQQGKGEFAFLEVNDGSCQGNLQVMVEKDVHPLASLTHTGTSVLVEGVLKKPPAEAKQRIELKVERVIELGEVDAAAYPLPKTKITLETLRDFVHLRARTNTIGAVARIRHQLAYATHSFFDENGFLYIHTPIITTSDCEGAGEMFQVTALFSQAEKVEKELKENPAPSEADVEAAKLVVKEKGDAVAQLKAAKASKQEITAAVSVLTKAKENVLRVEERSKLKPGLPLKGDGKIAFENDFFKRQAFLTVSGQLQVETYACALSNVYTFGPTFRAENSHTSRHLAEFWMVEPEIAFANLQDDMNCAERYVQYLCKWLLKHCREDMEFMVKHVDKTAIERLELVSSTPFERISYTKAVEILEGVDKKFENKVEWGIDLASEHERYLTEVIFKRPVIVYNYPKGIKAFYMRLNDDQKTVAAMDVLVPKVGELIGGSQREERLDILKQRILDADLPLEPYEWYLDLRRFGSVKHSGFGLGFERMILFATGLENIRDVIPFPRYPGRADL

SEQ ID NO: 10867 - protein, 566 aa, Triticum aestivum
  misc_feature (1)..(566): Ceres Seq. ID no. 15222086
MADDAASAPPTAQLAAASISSPPSSDLEPPTSRTRIRAILDAGDAMAGERVVVGGWVKTGRQQGKGEFAFLEVNDGSCQGNLQVMVEKDVHPLASLTHTGTSVLVEGVLKKPPAEAKQRIELKVERVIELGEVDAAAYPLPKTKITLETLRDFVHLRARTNTIGAVARIRHQLAYATHSFFDENGFLYIHTPIITTSDCEGAGEMFQVTALFSQAEKVEKELKENPAPSEADVEAAKLVVKEKGDAVAQLKAAKASKQEITAAVSVLTKAKENVLRVEERSKLKPGLPLKGDGKIAFENDFFKRQAFLTVSGQLQVETYACALSNVYTFGPTFRAENSHTSRHLAEFWMVEPEIAFANLQDDMNCAERYVQYLCKWLLKHCREDMEFMVKHVDKTAIERLELVSSTPFERISYTKAVEILEGVDKKFENKVEWGIDLASEHERYLTEVIFKRPVIVYNYPKGIKAFYMRLNDDQKTVAAMDVLVPKVGELIGGSQREERLDILKQRILDADLPLEPYEWYLDLRRFGSVKHSGFGLGFERMILFATGLENIRDVIPFPRYPGRADL

SEQ ID NO: 10868 - protein, 521 aa, Triticum aestivum
  misc_feature (1)..(521): Ceres Seq. ID no. 15222087
MAGERVVVGGWVKTGRQQGKGEFAFLEVNDGSCQGNLQVMVEKDVHPLASLTHTGTSVLVEGVLKKPPAEAKQRIELKVERVIELGEVDAAAYPLPKTKITLETLRDFVHLRARTNTIGAVARIRHQLAYATHSFFDENGFLYIHTPIITTSDCEGAGEMFQVTALFSQAEKVEKELKENPAPSEADVEAAKLVVKEKGDAVAQLKAAKASKQEITAAVSVLTKAKENVLRVEERSKLKPGLPLKGDGKIAFENDFFKRQAFLTVSGQLQVETYACALSNVYTFGPTFRAENSHTSRHLAEFWMVEPEIAFANLQDDMNCAERYVQYLCKWLLKHCREDMEFMVKHVDKTAIERLELVSSTPFERISYTKAVEILEGVDKKFENKVEWGIDLASEHERYLTEVIFKRPVIVYNYPKGIKAFYMRLNDDQKTVAAMDVLVPKVGELIGGSQREERLDILKQRILDADLPLEPYEWYLDLRRFGSVKHSGFGLGFERMILFATGLENIRDVIPFPRYPGRADL

SEQ ID NO: 10869 - DNA, 1548 bp, Triticum aestivum
  misc_feature (1)..(1548): Ceres Seq. ID no. 13597376
aaaacaagaagaagagacgcacaagtccccctctctctccctctctcacaaacaaacaaacaaaccgctcttgtctcccattccaatctcgccccgtcggtcgaattacaagttagaagaagaagaagaggaatcagaggaagaagaagatggtgtctgcggtgcttcggacgatcctggtgacgggcggcgcggggtacatcggcagccacacggtgctgcagctgctgctccagggcttccgcgtcctcgtcgtcgacagcctcgacaacgcctccgaggaggccatccgccgcgtccggcaactcgccaacgccccgcaaaacagcctcgacttccgcaaggtggaccttcgtgacaaggaggcgctggacgaaatcttctcgacccaaaggttcgaggctgtgatccactttgccgggctgaaagccgtgggggagagcgtgcagaagcccctgctttactacgacaacaacctcatcggcaccatcaccctcctccaagtcatggcagcacatggatgcaacaagcttgtgttctcatcatcagccactgtgtacgggtggcccaaggaggtgccctgcaccgaggagttcccgctctccgcgaccaacccttacggccgaactaagcttgtcattgaagacatctgccgcgacctccagcgctcggaccccgactggaagatcatcctgctgaggtacttcaacccggtcggcgcgcacccgagtggctacatcggggaagaccccctcggagtccccaacaacctgatgccctatgtccagcaagtcgctgtcgggaggcggcccgcgctgacggtttatgggaccgactacaacaccaaggatggaacaggggtacgtgactacatccatgttgttgacctggctgacggccacatcgccgccctgaggaagctctacgaagattctgacagaatagggtgcgaggtgtacaatctgggcactggaaaggggacgtccgtgctggaaatggttgctgcattcgagaaggcttgcggaaagaaaatccctctggtttatgctggaagaagagctggagatgccgagactgtgtacgctgccaccgccaaagctgagaaggagctcaagtggaaggccaagtatggggtggaggagatgtgcagagacctgtggaactgggccagcaagaacccctacggctacggatccagcgacaacggccactgattaatagtcaccagagcaagtagtaatagcagcatatatacgccaccatccatctatatatttatccaccaccaccaccacagagagcagagagaagaagaggaagactactactgatgtgtatagggaaggagtgagtgagtcggatccatcagtagcttataattaattatattgttcgcgttagaaagctaatcatatccatctcccttatggagtaagtagaagaaataaggttggttcccttgccttgtagaaatatatatatagatatcttgtcggtcatggaataacttactttacctactgatataaatatatatatgcttggttc

SEQ ID NO: 10870 - protein, 354 aa, Triticum aestivum
  misc_feature (1)..(354): Ceres Seq. ID no. 13597377
MVSAVLRTILVTGGAGYIGSHTVLQLLLQGFRVLVVDSLDNASEEAIRRVRQLANAPQNSLDFRKVDLRDKEALDEIFSTQRFEAVIHFAGLKAVGESVQKPLLYYDNNLIGTITLLQVMAAHGCNKLVFSSSATVYGWPKEVPCTEEFPLSATNPYGRTKLVIEDICRDLQRSDPDWKIILLRYFNPVGAHPSGYIGEDPLGVPNNLMPYVQQVAVGRRPALTVYGTDYNTKDGTGVRDYIHVVDLADGHIAALRKLYEDSDRIGCEVYNLGTGKGTSVLEMVAAFEKACGKKIPLVYAGRRAGDAETVYAATAKAEKELKWKAKYGVEEMCRDLWNWASKNPYGYGSSDNGH

SEQ ID NO: 10871 - protein, 235 aa, Triticum aestivum
  misc_feature (1)..(235): Ceres Seq. ID no. 13597378
MAAHGCNKLVFSSSATVYGWPKEVPCTEEFPLSATNPYGRTKLVIEDICRDLQRSDPDWKIILLRYFNPVGAHPSGYIGEDPLGVPNNLMPYVQQVAVGRRPALTVYGTDYNTKDGTGVRDYIHVVDLADGHIAALRKLYEDSDRIGCEVYNLGTGKGTSVLEMVAAFEKACGKKIPLVYAGRRAGDAETVYAATAKAEKELKWKAKYGVEEMCRDLWNWASKNPYGYGSSDNGH

SEQ ID NO: 10872 - DNA, 1430 bp, Triticum aestivum
  misc_feature (1)..(1430): Ceres Seq. ID no. 13597380
agatcgtgcgcttctcctcacaagataatcacagactcgatcaagagcttgtcttggttctgcaatgggggtgaggtgcctgctgctcctggctgtgctcctcttggctggggatcatggcggggaggcgcagccgctcgtgcccggggtcttcacgttcggcgactcgtcggtggatataggtaacaacgactacctccacaccctcatcaaggcggacttccctccctacggcagggacttccccaaccgcgtggccaccgggaggttttgcaacggcaagctggccaccgacatcactgctgatacactggggttcacgagctacccgcccgcgtatctcagcccgcaggcgtcagggaagaaccttctgatcggcgtcaacttcgcatctgctggatcaggctactacgatcacaccgcgcttatgtatcatgccgtccctttctcccaacaactggagtacttcagggagtaccaatccaagctgacggcgttcgctgggagcagccaggccaagtccatcatcagtggctcattgtacatcgtcagcttcggtgcaagtgactttgtgcagaactactacatcaaccctctgctcttcaagacccagaccgtcgaccagttctcggaccggctcgtcagcatcttcgtcaacagcgcgacgcaactttacggcatgggagcgcggcgcatcgcggtgaccacgctgccgcccctgggctgcctccccgcggcgatcacgctgttcgggcacgggagtaccggttgcgtgtcgaggctcaacagcgactcccagcggttcaacgggaagatgagcgcggccgtcagctcgctgtcgaagcggtaccacgacctcaagatcgccgtctttgacatctacacgccgctcttcagcctcgtcacctctcctggagatcaagggttcacggaggcgaagcggggatgctgcgggacgggaaaggtggagttcacggtgttcctctgcaaccccaagtcggtggggacgtgctcgaacgcgtcaacctacgtgttctgggacgccgtccacccgtcggaggcggccaaccaagtgatcgccgacgccctcctcgtcactggcatcgacctcgtcacataatgaaccacgcactggtcggctaacgtcgtcggtcggaggacgacgatggcacacgcttttcaggcgtcctgaagggaaaataatgtgtgcccagagctcccgtgccaagcgtgtcgttgtggcgggaggggttactttctcgggctgtgccactcaccatatcgccagcgtttgtagctagggactgggacacatggaaacatggtttatacgtacgaaaagctcgaagttatgggtgcaagcactggatcttttcttcttttttctttcattcatgtccttcaaatttgatgataactgtgtttttttc

SEQ ID NO: 10873 - protein, 351 aa, Triticum aestivum
  misc_feature (1)..(351): Ceres Seq. ID no. 13597381
MGVRCLLLLAVLLLAGDHGGEAQPLVPGVFTFGDSSVDIGNNDYLHTLIKADFPPYGRDFPNRVATGRFCNGKLATDITADTLGFTSYPPAYLSPQASGKNLLIGVNFASAGSGYYDHTALMYHAVPFSQQLEYFREYQSKLTAFAGSSQAKSIISGSLYIVSFGASDFVQNYYINPLLFKTQTVDQFSDRLVSIFVNSATQLYGMGARRIAVTTLPPLGCLPAAITLFGHGSTGCVSRLNSDSQRFNGKMSAAVSSLSKRYHDLKIAVFDIYTPLFSLVTSPGDQGFTEAKRGCCGTGKVEFTVFLCNPKSVGTCSNASTYVFWDAVHPSEAANQVIADALLVTGIDLVT

SEQ ID NO: 10874 - protein, 230 aa, Triticum aestivum
  misc_feature (1)..(230): Ceres Seq. ID no. 13597382
MYHAVPFSQQLEYFREYQSKLTAFAGSSQAKSIISGSLYIVSFGASDFVQNYYINPLLFKTQTVDQFSDRLVSIFVNSATQLYGMGARRIAVTTLPPLGCLPAAITLFGHGSTGCVSRLNSDSQRFNGKMSAAVSSLSKRYHDLKIAVFDIYTPLFSLVTSPGDQGFTEAKRGCCGTGKVEFTVFLCNPKSVGTCSNASTYVFWDAVHPSEAANQVIADALLVTGIDLVT

SEQ ID NO: 10875 - DNA, 1542 bp, Triticum aestivum
  misc_feature (1)..(1542): Ceres Seq. ID no. 13597389
acattttgccacttgatcattaatggtctcccccttcgtcacccctaaacagaaatcaaatctgcctccctaaaccgcaaagcttcaagcaccagcgacctccctccatctccgtcccttctactcttctcacccatctcccctccctcccatggctggagtaaacacgaaccacaaggatagtacaaagtagtgcagcggagtggcgtggggagctggtcaagcgcagcagcctagctcagctccatcctcacagcatccaacctccaaccaccgccgcgaccatgcgtgccgccgtggcgctcctcctcgccgccgtcctctgcctcggcggcggcggtgcggcgtccgcgtcgccggactttgactacccggcggcgttcaacttcggcgactccaactccgacacgggcggccgcatcgccgcgggcttcgagcccatgcccccgccctacggctccaccttcttcggcgccccctccggccgcttctccgacggccgcctcatcctcgacttcctcatggatgcgatggatatgccattcctcaatgcatacttggattctcttggtgcgcctaacttccgggcaggtgttaattttgctcaagctggctgttcgattactccagcaagtgcaacatctgtcagcccgttttcatttggtcttcagattaagcaattctttgccttcaaggaaaaagtcactagcctgctctccaaaggagataggtaccgtcggtatattcctcagttggattacttttcgaagggactctacatgtttgatataggtcaaaatgaccttgctggtcaattctactccagaacagaggaccaagtcattgcatccattccgactattttgttggaatttgaaactgggctcaagactctatacgatcagggtgccaggaagttctggattcacaacacaggtcctcttggctgcttacctcaaaacatagatctttttggcaaagacccaacacaactggatgaacttcattgtgtagcaaagcacaatcgtgctgcaaagattttcaacttacagctgcatgcactttgcacaaagttgagaggccagtttgctggagctaatatcacttacatcgacatctactccatcaaatatgccctgattggcaattactctcgatatggatttgaaagtcccaccgaagcatgctgtggatacggaggaccacccctgaattatgatggccgagtgccgtgtggacagacgaaatctgttaacggtaatctcgtaaccgcgaaaggatgcagtgacagcactgagtatgtcaactgggatggaatacattacacggaagctgcaaatttccacgttacatcgcagattctgaccgggaagtactcagatcctccgttcgtcgacaagatgccattccttataaaaccgaggttctaatgagcgggtatttattcccacaactgaattagtaaaccaatgtaatgttgtattgaccacaacagatgtattatttatcacatgtcaataatcacatatagcttcttttttc

SEQ ID NO: 10876 - protein, 381 aa, Triticum aestivum
  misc_feature (1)..(381): Ceres Seq. ID no. 13597390
MRAAVALLLAAVLCLGGGGAASASPDFDYPAAFNFGDSNSDTGGRIAAGFEPMPPPYGSTFFGAPSGRFSDGRLILDFLMDAMDMPFLNAYLDSLGAPNFRAGVNFAQAGCSITPASATSVSPFSFGLQIKQFFAFKEKVTSLLSKGDRYRRYIPQLDYFSKGLYMFDIGQNDLAGQFYSRTEDQVIASIPTILLEFETGLKTLYDQGARKFWIHNTGPLGCLPQNIDLFGKDPTQLDELHCVAKHNRAAKIFNLQLHALCTKLRGQFAGANITYIDIYSIKYALIGNYSRYGFESPTEACCGYGGPPLNYDGRVPCGQTKSVNGNLVTAKGCSDSTEYVNWDGIHYTEAANFHVTSQILTGKYSDPPFVDKMPFLIKPRF

SEQ ID NO: 10877 - protein, 329 aa, Triticum aestivum
  misc_feature (1)..(329): Ceres Seq. ID no. 13597391
MPPPYGSTFFGAPSGRFSDGRLILDFLMDAMDMPFLNAYLDSLGAPNFRAGVNFAQAGCSITPASATSVSPFSFGLQIKQFFAFKEKVTSLLSKGDRYRRYIPQLDYFSKGLYMFDIGQNDLAGQFYSRTEDQVIASIPTILLEFETGLKTLYDQGARKFWIHNTGPLGCLPQNIDLFGKDPTQLDELHCVAKHNRAAKIFNLQLHALCTKLRGQFAGANITYIDIYSIKYALIGNYSRYGFESPTEACCGYGGPPLNYDGRVPCGQTKSVNGNLVTAKGCSDSTEYVNWDGIHYTEAANFHVTSQILTGKYSDPPFVDKMPFLIKPRF

SEQ ID NO: 10878 - protein, 302 aa, Triticum aestivum
  misc_feature (1)..(302): Ceres Seq. ID no. 13597392
MDAMDMPFLNAYLDSLGAPNFRAGVNFAQAGCSITPASATSVSPFSFGLQIKQFFAFKEKVTSLLSKGDRYRRYIPQLDYFSKGLYMFDIGQNDLAGQFYSRTEDQVIASIPTILLEFETGLKTLYDQGARKFWIHNTGPLGCLPQNIDLFGKDPTQLDELHCVAKHNRAAKIFNLQLHALCTKLRGQFAGANITYIDIYSIKYALIGNYSRYGFESPTEACCGYGGPPLNYDGRVPCGQTKSVNGNLVTAKGCSDSTEYVNWDGIHYTEAANFHVTSQILTGKYSDPPFVDKMPFLIKPRF

SEQ ID NO: 10879 - DNA, 942 bp, Triticum aestivum
  misc_feature (1)..(942): Ceres Seq. ID no. 13597394
ccacccagttcccctcttcactccacgccgtgctccctctctttcccctctccccgatctccgtctccgtctccgtcctcccgccgctgccgccatggacggcgtcatcggccagatcttggagaagcaggtcctgtcggccgcgaaggcggtcgaggacaagctagatgagcagatcgccgcgctcgagcggctcgacccggacgacatcgaggcgctccgcgagcgccggatgctgcagatgcgccgcgcggccgagcgccgggccaagtggcgcgccctggggcacggcgagtatacggaggtccccgagaaagagttcttctccaccgccaaggccagcgagcgcatggtgtgccacttctaccgcgacaactggccgtgcaaggttatggacaaacacatgtcgattctcgctaaacagcatgtagaaacacggtttatcaaagtccatgctgaaaaggctccctttctgaccgaaaaactaagggttgttgtgctcccaactcttgccctagtgaagaatgccaaggttgaggattatgtggttggatttgatgagctgggtggtaaagatgacttcagcactgaggatctggaggaacgcattgccaaagctcaagtgatcttcctcgacggagaggggcctgcaaatccttccaagcaagctgctgccagcaagcgaagcgttcgacaatcagatactggcaactcagactcagactagttctgttcctgtattgaaggcgtgtgcgccaaggatttttatatataggatttatgccaagctgttatgctatccttactagtaataggaaagaagtttgtgtttcgatggcgatttgaaccgcaattgtcactgttgtagagtgctcttgtttttaccatgcgtccatacctggtttggtttgtttatttgagtggaaatgtttttncgttgct

SEQ ID NO: 10880 - protein, 241 aa, Triticum aestivum
  misc_feature (1)..(241): Ceres Seq. ID no. 15222091
HPVPLFTPRRAPSLSPLPDLRLRLRPPAAAAMDGVIGQILEKQVLSAAKAVEDKLDEQIAALERLDPDDIEALRERRMLQMRRAAERRAKWRALGHGEYTEVPEKEFFSTAKASERMVCHFYRDNWPCKVMDKHMSILAKQHVETRFIKVHAEKAPFLTEKLRVVVLPTLALVKNAKVEDYVVGFDELGGKDDFSTEDLEERIAKAQVIFLDGEGPANPSKQAAASKRSVRQSDTGNSDSD

SEQ ID NO: 10881 - protein, 210 aa, Triticum aestivum
  misc_feature (1)..(210): Ceres Seq. ID no. 15222092
MDGVIGQILEKQVLSAAKAVEDKLDEQIAALERLDPDDIEALRERRMLQMRRAAERRAKWRALGHGEYTEVPEKEFFSTAKASERMVCHFYRDNWPCKVMDKHMSILAKQHVETRFIKVHAEKAPFLTEKLRVVVLPTLALVKNAKVEDYVVGFDELGGKDDFSTEDLEERIAKAQVIFLDGEGPANPSKQAAASKRSVRQSDTGNSDSD

SEQ ID NO: 10882 - protein, 164 aa, Triticum aestivum
  misc_feature (1)..(164): Ceres Seq. ID no. 15222093
MLQMRRAAERRAKWRALGHGEYTEVPEKEFFSTAKASERMVCHFYRDNWPCKVMDKHMSILAKQHVETRFIKVHAEKAPFLTEKLRVVVLPTLALVKNAKVEDYVVGFDELGGKDDFSTEDLEERIAKAQVIFLDGEGPANPSKQAAASKRSVRQSDTGNSDSD

SEQ ID NO: 10883 - DNA, 860 bp, Triticum aestivum
  misc_feature (1)..(860): Ceres Seq. ID no. 13597399
atcgcattgccgcgccttcccttcattcccacccgcctacttcacgcgcaccaaccaccccctccgctgcttcagttcgtccgctccatccatcccgtttctattccgagtggacgccaggcgcataggtatatttggctgtagagagcctgatttagaagataggaggagcacatctttgagagggaggagcatgccgacgggaaccatgaggaggatgttcgtcgagtcgtcctcgtcctcctccgggagcggcagggaggcggagccggcggtggtgctgtgcgcgccccggccccgcagggtccacgcccagccctgcagcgccgacctcatcctcggccccccgcccttcctgctcaacgcctcctccggcagcataaagcagagacaagggaagagcaaaacgcgggaggaggagggggaggggggctgggcgctgttcggcggctcgccgccggcgcgcgcggacaacccgctcgtccacgacccccacttcctgctcaaccagcgccaccacgccgccgcggaattcaacctcgcggcggtttttgaccaccacctccaccaccacagccgcaaccaccaccacgccccaaccacatatagcaatagcggcaatagccacagttttgccccgtcgtacacgcacgccgcgccggcggtgaggatccaggggttcgacgtcgccgcctgccggggctcccacgccagcaacggcggaggccgcgtgctctccgcccgcgcatgagcctgagccctgcggaattgcatcatgttggttatgcagctgtaccatgtaatggaattgcatcaagttgattcaataatttctcctgagtttcgaaaaaaaaaaaaaa

SEQ ID NO: 10884 - protein, 249 aa, Triticum aestivum
  misc_feature (1)..(249): Ceres Seq. ID no. 13597400
SHCRAFPSFPPAYFTRTNHPLRCFSSSAPSIPFLFRVDARRIGIFGCREPDLEDRRSTSLRGRSMPTGTMRRMFVESSSSSSGSGREAEPAVVLCAPRPRRVHAQPCSADLILGPPPFLLNASSGSIKQRQGKSKTREEEGEGGWALFGGSPPARADNPLVHDPHFLLNQRHHAAAEFNLAAVFDHHLHHHSRNHHHAPTTYSNSGNSHSFAPSYTHAAPAVRIQGFDVAACRGSHASNGGGRVLSARA

SEQ ID NO: 10885 - protein, 185 aa, Triticum aestivum
  misc_feature (1)..(185): Ceres Seq. ID no. 13597401
MPTGTMRRMFVESSSSSSGSGREAEPAVVLCAPRPRRVHAQPCSADLILGPPPFLLNASSGSIKQRQGKSKTREEEGEGGWALFGGSPPARADNPLVHDPHFLLNQRHHAAAEFNLAAVFDHHLHHHSRNHHHAPTTYSNSGNSHSFAPSYTHAAPAVRIQGFDVAACRGSHASNGGGRVLSARA

SEQ ID NO: 10886 - protein, 180 aa, Triticum aestivum
  misc_feature (1)..(180): Ceres Seq. ID no. 13597402
MRRMFVESSSSSSGSGREAEPAVVLCAPRPRRVHAQPCSADLILGPPPFLLNASSGSIKQRQGKSKTREEEGEGGWALFGGSPPARADNPLVHDPHFLLNQRHHAAAEFNLAAVFDHHLHHHSRNHHHAPTTYSNSGNSHSFAPSYTHAAPAVRIQGFDVAACRGSHASNGGGRVLSARA

SEQ ID NO: 10887 - DNA, 1459 bp, Triticum aestivum
  misc_feature (1)..(1459): Ceres Seq. ID no. 13597403
cgaaaaaaattccattcaaaatccatttgagcttcacaacagctagtgtgtccgtgagcttctctcttcaatgtgcgtgtgtgtgtaagcagcactagtgagtgtgtgtgctttgctagtgtgctgagcgcaggcagtagtagcacttggctcttccgccggtcgtgtatcagtgtactcgagtgctagcaagtagttctgggctaacagaaggcagccgatcaccggctcccacgtcctctagatccacggctacaagcagatcaagaagatggtccccaacggcaaggcagtcgagtcagccccgttcgacgtcgccggccgcgcctgccgaatcaggtgctatccgaacggcagcggcaagaaacactacggctacacgtccctcttcctcaccagccactgcgacgacggcacggtaaggctagagctcagcgtgctcgatcgggacgggaatccgtctcgcactcgagccacggaaaagcggcgcttctggatcggcgacagctggggctggggctttaaggatttcgtgaagaacgacgatctggtcgagggagagcacctcgtggacgactgcctcatcgtcctctgcgacgtcaccgtccacgacccttccttgcacgccgaggaggttgccgcgccggttgtggcgcctccgttcgacctaagtggggagctcggggaggccatgtggaacgagacggacgtgacgatccacgtcggcgacgagacgttcccggcgcaccggtcggtgctggaggctgcgtccgccgtcttcaaggcggacctcgagaacaacggcaccggcgaggtacgcgtcgacgacatggacgcccaggtgttcaagaccctgctgcagttcatgtacacgagcgtgctgcctgacaagaaccagctcgaggcagacgccgcgacggcggagcggctgctcgtggcggcggacaggtacgggctggagaagataaaggtcgtctgcgaggaggcgctgtgcccgcgcgtcaacatgggctccgtgggcaccatgctggcgttggcggagcggcacggaggtgccgtcctgaagaaggcgtgcatggagttcctctcgatccccggtaacctattatcattcatggcgaccgagggttttgaggagctcaagagaacccagcttgggtgctggagcttcacgtgaacctgatggatacgtgcagcttgcttcctagctagttaaattagctattctcgctaagtcagataagttaattaggtactcttgcatatttttatatcaatcttgttaagtctcagtcgactgatcagactttaaatctcagtcgatgctatatccgtaagatcttacattggtatacatgtattttttttcagttttctcttttacatgtaatgtcatttgaccaaaaaaaaaaaaaaaaaagcttatcgataccgycracctcgaggcgrgkgcccgrta

SEQ ID NO: 10888 - protein, 301 aa, Triticum aestivum
  misc_feature (1)..(301): Ceres Seq. ID no. 15222094
MVPNGKAVESAPFDVAGRACRIRCYPNGSGKKHYGYTSLFLTSHCDDGTVRLELSVLDRDGNPSRTRATEKRRFWIGDSWGWGFKDFVKNDDLVEGEHLVDDCLIVLCDVTVHDPSLHAEEVAAPVVAPPFDLSGELGEAMWNETDVTIHVGDETFPAHRSVLEAASAVFKADLENNGTGEVRVDDMDAQVFKTLLQFMYTSVLPDKNQLEADAATAERLLVAADRYGLEKIKVVCEEALCPRVNMGSVGTMLALAERHGGAVLKKACMEFLSIPGNLLSFMATEGFEELKRTQLGCWSFT

SEQ ID NO: 10889 - protein, 161 aa, Triticum aestivum
  misc_feature (1)..(161): Ceres Seq. ID no. 15222095
MWNETDVTIHVGDETFPAHRSVLEAASAVFKADLENNGTGEVRVDDMDAQVFKTLLQFMYTSVLPDKNQLEADAATAERLLVAADRYGLEKIKVVCEEALCPRVNMGSVGTMLALAERHGGAVLKKACMEFLSIPGNLLSFMATEGFEELKRTQLGCWSFT

SEQ ID NO: 10890 - DNA, 1696 bp, Triticum aestivum
  misc_feature (1)..(1696): Ceres Seq. ID no. 13597411
aaaagacaattcttttcttcctcttctgttccggcaggggcggcggggatggcgatggcgtcgcgcgcgcggacgcggtggtcggcgctggcggcgagcacgctgatccagtgcttcgcgggcggcagctactgcttcggcgtctactcgccggcgctcaaggcgtcgcagggctacgaccagtccgcgctcgacgccgtcgccttcttcaaggacgtcggcgctaacgtcggggtcctctccggcctcctcgccgcgtgggctccctctgggggccggaggcgaccctggctcgtcctcctcaccggcgccgcgctctgcgccgccgggtacctccccatgtggctcgccgtcgccggggtcgtccccgccccgctcccgctcgtctgcctctacatgctgctcgccgcgcaggcgcagaccttcatgaacacggccgatgtcgtcaccgccgtagagaacttccccgaccgccgcggcaccgtcatcggcatcatgaaggggtttctaggcttgagtggggcgatactggtccaagtacagcggactctccgtattgatcccggcagtttcatacttatgctggcaatactacccacagccatcgcgttgctgctcatgtactttgtcgacgtccacagcgctcatgagcggtacaacaagaagttcctcgatgctttctctctcatggccgttactgttgctgggttcctgatggttgtcataatctgcgaccaagtattcgtgataagttcagccgggcagagcgtttgctttgggatactccttctattgatcctgtctcccgcagctattgttgtaagggttcagaggacggaaccgaagcagcaagaagaaccaacgccggaagaacaaactggtttacttcttcatgaggagactgcgcagcaggattcggagaacgccagctctagcatggcgctcgtgggatctaacagtcaggacatgtcgtcggacaaagcagagaacctgaacgtggtgcaggccatgtgcaaacttgacttctggctgctcttcgttgcgatggcctgcgggatggggtcggggctggccaccgtgaacaacatcagccagatcgggggctcccttggctacacgagcagggagaccagcactctggtgtcgctatggagcatctggaacttctcagggaggttcggcgcaggctacgtctctgatcacttcctccggtcgcgaggagtcggcaggcctttcttcatagccgcgacgcttctggtcatgggcgtaggccatgccatcatctcctccggtttccacgcgtcgctctacgtcggctccgtccttgtaggactgtgctacgggtctcagtgggctttgatgccgagcataacttcagagatcttcgggctaaaccatttcggcaccatattcaacacggtggccgtcgcgagccctgttggctcttacatcctctcggtgtgcgtggtcgggttcatctatgacaaggagtcaccgcaaggtgagcttgcctgcgccggtaagcactgctttgcgctctccttcatgatcatggcatgtgtctgcgtcttcgggtctgctgttgcttttgtattgtttgtcagaacaaggaagttttataggcgggttatatacgcccgactgctctcttttgtagataaatgaagaaatgcatatatgcaaacgattctcagtc

SEQ ID NO: 10891 - protein, 554 aa, Triticum aestivum
  misc_feature (1)..(554): Ceres Seq. ID no. 13597412
KRQFFSSSSVPAGAAGMAMASRARTRWSALAASTLIQCFAGGSYCFGVYSPALKASQGYDQSALDAVAFFKDVGANVGVLSGLLAAWAPSGGRRRPWLVLLTGAALCAAGYLPMWLAVAGVVPAPLPLVCLYMLLAAQAQTFMNTADVVTAVENFPDRRGTVIGIMKGFLGLSGAILVQVQRTLRIDPGSFILMLAILPTAIALLLMYFVDVHSAHERYNKKFLDAFSLMAVTVAGFLMVVIICDQVFVISSAGQSVCFGILLLLILSPAAIVVRVQRTEPKQQEEPTPEEQTGLLLHEETAQQDSENASSSMALVGSNSQDMSSDKAENLNVVQAMCKLDFWLLFVAMACGMGSGLATVNNISQIGGSLGYTSRETSTLVSLWSIWNFSGRFGAGYVSDHFLRSRGVGRPFFIAATLLVMGVGHAIISSGFHASLYVGSVLVGLCYGSQWALMPSITSEIFGLNHFGTIFNTVAVASPVGSYILSVCVVGFIYDKESPQGELACAGKHCFALSFMIMACVCVFGSAVAFVLFVRTRKFYRRVIYARLLSFVDK

SEQ ID NO: 10892 - protein, 538 aa, Triticum aestivum
  misc_feature (1)..(538): Ceres Seq. ID no. 13597413
MAMASRARTRWSALAASTLIQCFAGGSYCFGVYSPALKASQGYDQSALDAVAFFKDVGANVGVLSGLLAAWAPSGGRRRPWLVLLTGAALCAAGYLPMWLAVAGVVPAPLPLVCLYMLLAAQAQTFMNTADVVTAVENFPDRRGTVIGIMKGFLGLSGAILVQVQRTLRIDPGSFILMLAILPTAIALLLMYFVDVHSAHERYNKKFLDAFSLMAVTVAGFLMVVIICDQVFVISSAGQSVCFGILLLLILSPAAIVVRVQRTEPKQQEEPTPEEQTGLLLHEETAQQDSENASSSMALVGSNSQDMSSDKAENLNVVQAMCKLDFWLLFVAMACGMGSGLATVNNISQIGGSLGYTSRETSTLVSLWSIWNFSGRFGAGYVSDHFLRSRGVGRPFFIAATLLVMGVGHAIISSGFHASLYVGSVLVGLCYGSQWALMPSITSEIFGLNHFGTIFNTVAVASPVGSYILSVCVVGFIYDKESPQGELACAGKHCFALSFMIMACVCVFGSAVAFVLFVRTRKFYRRVIYARLLSFVDK

SEQ ID NO: 10893 - protein, 536 aa, Triticum aestivum
  misc_feature (1)..(536): Ceres Seq. ID no. 13597414
MASRARTRWSALAASTLIQCFAGGSYCFGVYSPALKASQGYDQSALDAVAFFKDVGANVGVLSGLLAAWAPSGGRRRPWLVLLTGAALCAAGYLPMWLAVAGVVPAPLPLVCLYMLLAAQAQTFMNTADVVTAVENFPDRRGTVIGIMKGFLGLSGAILVQVQRTLRIDPGSFILMLAILPTAIALLLMYFVDVHSAHERYNKKFLDAFSLMAVTVAGFLMVVIICDQVFVISSAGQSVCFGILLLLILSPAAIVVRVQRTEPKQQEEPTPEEQTGLLLHEETAQQDSENASSSMALVGSNSQDMSSDKAENLNVVQAMCKLDFWLLFVAMACGMGSGLATVNNISQIGGSLGYTSRETSTLVSLWSIWNFSGRFGAGYVSDHFLRSRGVGRPFFIAATLLVMGVGHAIISSGFHASLYVGSVLVGLCYGSQWALMPSITSEIFGLNHFGTIFNTVAVASPVGSYILSVCVVGFIYDKESPQGELACAGKHCFALSFMIMACVCVFGSAVAFVLFVRTRKFYRRVIYARLLSFVDK

SEQ ID NO: 10894 - DNA, 1352 bp, Triticum aestivum
  misc_feature (1)..(1352): Ceres Seq. ID no. 13597431
ccatttacgtcagagccacaccaaaactactactatccggaaacacccagaccagcggggagcactaccttgacgatcatggcgaccgctcctgctacggtggtgccgcgcctgaagctgggctcccagggtatggaggtctcggcgcagggcctcggctgcatgggtatgtccgccttctacggcccgcccaagcccgagccagacatggtcgcgctcatccaccacgccgtcgacgccggcgtcaccctgctcgactcctccgacatctacgggccgcacaccagcgagatcctgctcagcaaggcgctgctggggggcgtgagggagagggtagagctggccaccaagttcggcatctcgttcgccgacggcaagcgggaggttcgcggggatccggcctacgtgcgggcggcgtgcgagggcagcctcaagcggctcggcgtcagctgcattgacctttactaccagcaccgcgtcgacaccagggtgcctatcgaggtcacggttggagaactcaagaagcttgttgaagaaggaaaaataaaatacatcggattatctgaagcatctgcatcaacaatcaggagggctcatgctattcatcctatcactgcagttcagatggagtggtcactgtggtcaagagatgtcgaagaagacataattccaacttgcagagaacttggaattggaattgttgcttacagcccacttggtagaggattcttctcaaaaggagcaaaattggttgactcactatcagaccaggacttccgcaagaatttacctagatttcaaccagagagtctcgagaagaatgcccagatatttgagcgtgttgatgcgatggccacaaggaaaggatgcacaccatcacaacttgccttggcttgggttcaccatcagggaagcgatgtttgccccatacctgggacaacaaaaattgaaaatttcaaccaaaatatgggagcattagctgtgaggctcacaccagaggaaatggctgaactcgagtcttacgcggctgcaggtgatgtccagggtgacaggtaccctccaatggctagtacttggagggagtctgagacccctccattgtcatcttggaaagctgagtagacagtttcatctcttcaacaactacagtgtttacttttggtgagaaggtaaaagcagggtacagttgaacccaggatttcgttttccatttctgcagatgcatgtatatgagctgagctgtgacgtgtgtatgttatgcttggttaccgatttactcctgcttaaaacaatgtcattgctaccaaggcttctgtattgtattgaccaacaaaatacaagtgatgtgtgat

SEQ ID NO: 10895 - protein, 373 aa, Triticum aestivum
  misc_feature (1)..(373): Ceres Seq. ID no. 13597432
PFTSEPHQNYYYPETPRPAGSTTLTIMATAPATVVPRLKLGSQGMEVSAQGLGCMGMSAFYGPPKPEPDMVALIHHAVDAGVTLLDSSDIYGPHTSEILLSKALLGGVRERVELATKFGISFADGKREVRGDPAYVRAACEGSLKRLGVSCIDLYYQHRVDTRVPIEVTVGELKKLVEEGKIKYIGLSEASASTIRRAHAIHPITAVQMEWSLWSRDVEEDIIPTCRELGIGIVAYSPLGRGFFSKGAKLVDSLSDQDFRKNLPRFQPESLEKNAQIFERVDAMATRKGCTPSQLALAWVHHQGSDVCPIPGTTKIENFNQNMGALAVRLTPEEMAELESYAAAGDVQGDRYPPMASTWRESETPPLSSWKAE

SEQ ID NO: 10896 - protein, 347 aa, Triticum aestivum
  misc_feature (1)..(347): Ceres Seq. ID no. 13597433
MATAPATVVPRLKLGSQGMEVSAQGLGCMGMSAFYGPPKPEPDMVALIHHAVDAGVTLLDSSDIYGPHTSEILLSKALLGGVRERVELATKFGISFADGKREVRGDPAYVRAACEGSLKRLGVSCIDLYYQHRVDTRVPIEVTVGELKKLVEEGKIKYIGLSEASASTIRRAHAIHPITAVQMEWSLWSRDVEEDIIPTCRELGIGIVAYSPLGRGFFSKGAKLVDSLSDQDFRKNLPRFQPESLEKNAQIFERVDAMATRKGCTPSQLALAWVHHQGSDVCPIPGTTKIENFNQNMGALAVRLTPEEMAELESYAAAGDVQGDRYPPMASTWRESETPPLSSWKAE

SEQ ID NO: 10897 - protein, 329 aa, Triticum aestivum
  misc_feature (1)..(329): Ceres Seq. ID no. 13597434
MEVSAQGLGCMGMSAFYGPPKPEPDMVALIHHAVDAGVTLLDSSDIYGPHTSEILLSKALLGGVRERVELATKFGISFADGKREVRGDPAYVRAACEGSLKRLGVSCIDLYYQHRVDTRVPIEVTVGELKKLVEEGKIKYIGLSEASASTIRRAHAIHPITAVQMEWSLWSRDVEEDIIPTCRELGIGIVAYSPLGRGFFSKGAKLVDSLSDQDFRKNLPRFQPESLEKNAQIFERVDAMATRKGCTPSQLALAWVHHQGSDVCPIPGTTKIENFNQNMGALAVRLTPEEMAELESYAAAGDVQGDRYPPMASTWRESETPPLSSWKAE

SEQ ID NO: 10898 - DNA, 1284 bp, Triticum aestivum
  misc_feature (1)..(1284): Ceres Seq. ID no. 13597439
gaggccagccgagttatcgtcgtcacatcgaacgaacgctactcaaagaccagtccaaccacggaaggtcgtgcaagcgcaaactatggagagcacaggggtagcgagacggacgtcgacggtgcaggagctcgccagcgccctcggcaaaccagacgtgccggcccagtacgtctcacgcggacaccacgaaaacgaccagcagcccgccgcggtgccggtccctgtcatcgacatcggccgccttttcaaccaggacggcgccgccgcagctgacgacgaggcggcgaagctccggcaggcgctcgagtcgtggggcctcttcctggtgactaaccacggcgtggacacctcggtgatggacggcatgatggtcgcgtcgagggagttcttccggcagccacccgaagagaagcagagatacaccaacctcatcggcggcgagcggttccagctcgaggggtatgggaccgaccgggtgaactcatcggaacagatcctggactggtcagaccgcctctacctcaaggtggagcccgaagacgagcgcagcctcgccctctggccagcccatccccaaaccttcaggaatcttctgcacgagttcaccacgaaatgtagggtggtgaaggacggactggtccgggcaatggcgaggctgctcgagctcgacaacgactatatcattgaacagtttggggagaaggctgacacttacgctagattcagctactacccggagtgcccaaggccagagctcgtgttcggcctcaagccccactccgatgggagcgttcttaccgtgctcatggtcgatgacaccgttggtgggctgcagattttgagagacggtgtttggttcgatgtaccgatagttcctcacaccctgctgatcaacataggagaccaaactgagataatgagcaatgggatcttcaaaagccccgtgcatagagttgtgacaaatgctgagaaagaaaggctatcgctggctctattctactcgcttgatcccgagagagaaattgagccagcgactcagctggtagatgggaagagaccggcgttgtacagaaaggtcaaggtgaaggactacattgctggactctttgaacatgtgtcgcaaggaacgatggttattgatacagtgaagatataaacaagtgtggtatcatgctggtaatgcaaaacgtgtaatcgttctaggaacaatttatctccatgtattgttgcatgctaactttattaagtactccctttgttcagcatcacatatcgttttgg

SEQ ID NO: 10899 - protein, 385 aa, Triticum aestivum
  misc_feature (1)..(385): Ceres Seq. ID no. 13597440
RPAELSSSHRTNATQRPVQPRKVVQAQTMESTGVARRTSTVQELASALGKPDVPAQYVSRGHHENDQQPAAVPVPVIDIGRLFNQDGAAAADDEAAKLRQALESWGLFLVTNHGVDTSVMDGMMVASREFFRQPPEEKQRYTNLIGGERFQLEGYGTDRVNSSEQILDWSDRLYLKVEPEDERSLALWPAHPQTFRNLLHEFTTKCRVVKDGLVRAMARLLELDNDYIIEQFGEKADTYARFSYYPECPRPELVFGLKPHSDGSVLTVLMVDDTVGGLQILRDGVWFDVPIVPHTLLINIGDQTEIMSNGIFKSPVHRVVTNAEKERLSLALFYSLDPEREIEPATQLVDGKRPALYRKVKVKDYIAGLFEHVSQGTMVIDTVKI

SEQ ID NO: 10900 - protein, 357 aa, Triticum aestivum
  misc_feature (1)..(357): Ceres Seq. ID no. 13597441
MESTGVARRTSTVQELASALGKPDVPAQYVSRGHHENDQQPAAVPVPVIDIGRLFNQDGAAAADDEAAKLRQALESWGLFLVTNHGVDTSVMDGMMVASREFFRQPPEEKQRYTNLIGGERFQLEGYGTDRVNSSEQILDWSDRLYLKVEPEDERSLALWPAHPQTFRNLLHEFTTKCRVVKDGLVRAMARLLELDNDYIIEQFGEKADTYARFSYYPECPRPELVFGLKPHSDGSVLTVLMVDDTVGGLQILRDGVWFDVPIVPHTLLINIGDQTEIMSNGIFKSPVHRVVTNAEKERLSLALFYSLDPEREIEPATQLVDGKRPALYRKVKVKDYIAGLFEHVSQGTMVIDTVKI

SEQ ID NO: 10901 - protein, 266 aa, Triticum aestivum
  misc_feature (1)..(266): Ceres Seq. ID no. 13597442
MDGMMVASREFFRQPPEEKQRYTNLIGGERFQLEGYGTDRVNSSEQILDWSDRLYLKVEPEDERSLALWPAHPQTFRNLLHEFTTKCRVVKDGLVRAMARLLELDNDYIIEQFGEKADTYARFSYYPECPRPELVFGLKPHSDGSVLTVLMVDDTVGGLQILRDGVWFDVPIVPHTLLINIGDQTEIMSNGIFKSPVHRVVTNAEKERLSLALFYSLDPEREIEPATQLVDGKRPALYRKVKVKDYIAGLFEHVSQGTMVIDTVKI

SEQ ID NO: 10902 - DNA, 1662 bp, Triticum aestivum
  misc_feature (1)..(1662): Ceres Seq. ID no. 13597446
aaacgaaaaaggtggcgagagggagagggagaggaaggtgccggccctagcaatggcggggtggtacgaggaggcggcgggtctgctgctgcgccggtcggcgttggcggagatggcggtagatgtgctgctgtgcgccgtgccgatctgggcggcggtcatgatctgcctcttcatagggtgggcatggcggccgcgctggaccgggctgatcttcctcggtttccgcagccgtctccggctcctctacgtgcctcccgggctcggcgcgcgccgcctatggctcgcctgcaccgcgctctccgccttctccgtcgcgccgcagctgctctcctccgccttccgccgccatgggaagtaccagcgcaaggattcctcgaacgacgacacggacgcctgcggggattctggcgcttgcgctaacggcaggtcaatttttgaggtcaagcatggtattgtcactgagaaggacctagatcacctcgtgcagcttttagataataaggagagtgggcatacaacatggcagcatttgatggagcgtaccacttccaacatgacgtacaaggcctggaggcatgagcccgaggtgggacctataatgcattgtagccagaccattttcgaggatgctactcctgaactggttagagatttcttctgggatgatgattttcgtctaaagtgggaccccatgcttgtgtgcttcaaaattttggatgagttccctctgaatggaaccacaattattcactggattaaaaagttccctttcttctgcagtgaccgtgaatacatttttgggcggcgtatctgggagtcggggaaggcttactattgtgttacgaagggaattccttatccatctttgcccaagaaggaaaaaccgaggcgtgtggaattgtacttctcgagttggcgtattagacctgttcaatcgcccaaaaaagatggccagcaacacatggcatgtgaagtaacactgtttcactacgaggatatgggcatacccaaggatgttgctaaagttggtgtccgccacggcatgtggggtgctgttaaaaagctgcagtccggctttagagcatatcagctaatgagaaaatcagaaaacatcctgtcacgcagtgccatcatggctcgggtgaccaccaagacatgcattgctggttctgatggctccttggatcaagggcccttcagcacagaacaagccagtacagaggacgacaactccagggcagtccaacatggtttcgactggaagtgggtggtggtcggtggcgcggtggctgccgtttgcgtgcttaacaccggaattgtagggaaggccctcttacttggagctgcaagaaggcaggcaaagaagtgatgagcatctaccagcatccacaaagtgagcttcacgaccatcagggcctgtctctgtctagaaagtcgcaatcgagaccgaggataaaggaatgaaatccataccatactacaggatgcagataattcgggtgcctaattttggattgtgccttttaagcagtatatcgcaaatgtgtcttgctataaccgattatgtggtatcaggaatcgttagatgacgatgtatctcaagatgtgagttctgttaacaacatttgctaacttccaagttccaagagtgcacttttc

SEQ ID NO: 10903 - protein, 456 aa, Triticum aestivum
  misc_feature (1)..(456): Ceres Seq. ID no. 13597447
NEKGGERERERKVPALAMAGWYEEAAGLLLRRSALAEMAVDVLLCAVPIWAAVMICLFIGWAWRPRWTGLIFLGFRSRLRLLYVPPGLGARRLWLACTALSAFSVAPQLLSSAFRRHGKYQRKDSSNDDTDACGDSGACANGRSIFEVKHGIVTEKDLDHLVQLLDNKESGHTTWQHLMERTTSNMTYKAWRHEPEVGPIMHCSQTIFEDATPELVRDFFWDDDFRLKWDPMLVCFKILDEFPLNGTTIIHWIKKFPFFCSDREYIFGRRIWESGKAYYCVTKGIPYPSLPKKEKPRRVELYFSSWRIRPVQSPKKDGQQHMACEVTLFHYEDMGIPKDVAKVGVRHGMWGAVKKLQSGFRAYQLMRKSENILSRSAIMARVTTKTCIAGSDGSLDQGPFSTEQASTEDDNSRAVQHGFDWKWVVVGGAVAAVCVLNTGIVGKALLLGAARRQAKK

SEQ ID NO: 10904 - protein, 439 aa, Triticum aestivum
  misc_feature (1)..(439): Ceres Seq. ID no. 13597448
MAGWYEEAAGLLLRRSALAEMAVDVLLCAVPIWAAVMICLFIGWAWRPRWTGLIFLGFRSRLRLLYVPPGLGARRLWLACTALSAFSVAPQLLSSAFRRHGKYQRKDSSNDDTDACGDSGACANGRSIFEVKHGIVTEKDLDHLVQLLDNKESGHTTWQHLMERTTSNMTYKAWRHEPEVGPIMHCSQTIFEDATPELVRDFFWDDDFRLKWDPMLVCFKILDEFPLNGTTIIHWIKKFPFFCSDREYIFGRRIWESGKAYYCVTKGIPYPSLPKKEKPRRVELYFSSWRIRPVQSPKKDGQQHMACEVTLFHYEDMGIPKDVAKVGVRHGMWGAVKKLQSGFRAYQLMRKSENILSRSAIMARVTTKTCIAGSDGSLDQGPFSTEQASTEDDNSRAVQHGFDWKWVVVGGAVAAVCVLNTGIVGKALLLGAARRQAKK

SEQ ID NO: 10905 - protein, 419 aa, Triticum aestivum
  misc_feature (1)..(419): Ceres Seq. ID no. 13597449
MAVDVLLCAVPIWAAVMICLFIGWAWRPRWTGLIFLGFRSRLRLLYVPPGLGARRLWLACTALSAFSVAPQLLSSAFRRHGKYQRKDSSNDDTDACGDSGACANGRSIFEVKHGIVTEKDLDHLVQLLDNKESGHTTWQHLMERTTSNMTYKAWRHEPEVGPIMHCSQTIFEDATPELVRDFFWDDDFRLKWDPMLVCFKILDEFPLNGTTIIHWIKKFPFFCSDREYIFGRRIWESGKAYYCVTKGIPYPSLPKKEKPRRVELYFSSWRIRPVQSPKKDGQQHMACEVTLFHYEDMGIPKDVAKVGVRHGMWGAVKKLQSGFRAYQLMRKSENILSRSAIMARVTTKTCIAGSDGSLDQGPFSTEQASTEDDNSRAVQHGFDWKWVVVGGAVAAVCVLNTGIVGKALLLGAARRQAKK

SEQ ID NO: 10906 - DNA, 1577 bp, Triticum aestivum
  misc_feature (1)..(1577): Ceres Seq. ID no. 13597454
acaaaaagcaagctctatatccagctgactagccacaagtacgacacacatactgcagtgttagcgctacacacacgggcaccagagttatggggaggcaggtcgccgccctgtgcgggcttctcgtcgtgctgctccggctcacgtccggcgtcaatgcacagacggagatcttgttccaggggttcaactgggactcgtggagcaagcaggggggctggtacaacatgctcaaggcccaggttggcgacatcgccggcgccggggtcactcacgtctggctgcccccacctacacactccgtttcatctcaaggatacatgccgggccggctctacgacctggacgcgtccaagtacggcacggcggtggagctcaggtcgctcatcgcggccttcggtgccaagggcatcaagtgcgtcgccgacatcgtcatcaaccaccgctgcgccgaggacaaggacgggcgcggcatctactgcatcttcaagggcggaggacccgagggcctcctggactggggtccgggcatgatctgcagcgacgacaccaagttctccgacggcacgggctaccgtgataccggcgcggacttcgccgccgcgcccgacatcgaccacctcaacccgcgcgtccagaaggagctctccgactggctcaactggctcaagtccgacctcggcttcgacggctggcgcctcgacttcgccaagggctactcggccgacgtcgccaggacgtacgtgcagaacacgagccccggcttcgtcgtcgcggaaatatggaactccctgagctacgacggcgacgggaagcccgccgtcaaccaggacggggagcggcaggagctggtgaactgggcgaaggcggtcggcggccctgccatggcgttcgacttcacgaccaagggcatcctgcagtcggcggtgcagggcgagctgtggaggatgcgggacaaggagggcaacgctcccgggatgatcggcctgttgccggagaaggcggtcacgttcgtggacaaccacgacacgggctcgtcgcagaagaaatggccgttcccggccgacaaggtcatgatgggctacgcctacatcctcacccaccctggagtcccatgcatcttctacgatcacgtgttcgactggaacctgaagcaagagatcaacgcgctggcggcggtgaggaaccgcaacgggatcaacgccgggagcaagctgcgcatcctggcggcggagagcgacatgtacgtggcgacggttgacgagaaagttatcgtcaagctcggaccgaggttcgacgctggcagcgtcatcccgtcggacttccacgtcgtggctcacggcaataactactgcgtctgggagaagagcggccttagggtgccggccgggcggcgctagctacctagtagacgttagcaacttcgcaccggcggccagaccgttgtactcctacaagaaatgtttgttccagttcgtcgtagactaggcaataaagtttgtaccaccaccgctctccttccaaccttgcggaaggagcgtgagctatcaaatatattattaattttacgcgtttgt

SEQ ID NO: 10907 - protein, 436 aa, Triticum aestivum
  misc_feature (1)..(436): Ceres Seq. ID no. 13597455
MGRQVAALCGLLVVLLRLTSGVNAQTEILFQGFNWDSWSKQGGWYNMLKAQVGDIAGAGVTHVWLPPPTHSVSSQGYMPGRLYDLDASKYGTAVELRSLIAAFGAKGIKCVADIVINHRCAEDKDGRGIYCIFKGGGPEGLLDWGPGMICSDDTKFSDGTGYRDTGADFAAAPDIDHLNPRVQKELSDWLNWLKSDLGFDGWRLDFAKGYSADVARTYVQNTSPGFVVAEIWNSLSYDGDGKPAVNQDGERQELVNWAKAVGGPAMAFDFTTKGILQSAVQGELWRMRDKEGNAPGMIGLLPEKAVTFVDNHDTGSSQKKWPFPADKVMMGYAYILTHPGVPCIFYDHVFDWNLKQEINALAAVRNRNGINAGSKLRILAAESDMYVATVDEKVIVKLGPRFDAGSVIPSDFHVVAHGNNYCVWEKSGLRVPAGRR

SEQ ID NO: 10908 - protein, 390 aa, Triticum aestivum
  misc_feature (1)..(390): Ceres Seq. ID no. 13597456
MLKAQVGDIAGAGVTHVWLPPPTHSVSSQGYMPGRLYDLDASKYGTAVELRSLIAAFGAKGIKCVADIVINHRCAEDKDGRGIYCIFKGGGPEGLLDWGPGMICSDDTKFSDGTGYRDTGADFAAAPDIDHLNPRVQKELSDWLNWLKSDLGFDGWRLDFAKGYSADVARTYVQNTSPGFVVAEIWNSLSYDGDGKPAVNQDGERQELVNWAKAVGGPAMAFDFTTKGILQSAVQGELWRMRDKEGNAPGMIGLLPEKAVTFVDNHDTGSSQKKWPFPADKVMMGYAYILTHPGVPCIFYDHVFDWNLKQEINALAAVRNRNGINAGSKLRILAAESDMYVATVDEKVIVKLGPRFDAGSVIPSDFHVVAHGNNYCVWEKSGLRVPAGRR

SEQ ID NO: 10909 - protein, 359 aa, Triticum aestivum
  misc_feature (1)..(359): Ceres Seq. ID no. 13597457
MPGRLYDLDASKYGTAVELRSLIAAFGAKGIKCVADIVINHRCAEDKDGRGIYCIFKGGGPEGLLDWGPGMICSDDTKFSDGTGYRDTGADFAAAPDIDHLNPRVQKELSDWLNWLKSDLGFDGWRLDFAKGYSADVARTYVQNTSPGFVVAEIWNSLSYDGDGKPAVNQDGERQELVNWAKAVGGPAMAFDFTTKGILQSAVQGELWRMRDKEGNAPGMIGLLPEKAVTFVDNHDTGSSQKKWPFPADKVMMGYAYILTHPGVPCIFYDHVFDWNLKQEINALAAVRNRNGINAGSKLRILAAESDMYVATVDEKVIVKLGPRFDAGSVIPSDFHVVAHGNNYCVWEKSGLRVPAGRR

SEQ ID NO: 10910 - DNA, 1321 bp, Triticum aestivum
  misc_feature (1)..(1321): Ceres Seq. ID no. 13597462
aattggttgggcaaactctgtttcgacacagcctcgccatttcgtcgaacacgtggtagtgcgtcgcaccggcccttccgcaatggcctccttcctcgtcgcccgccgcctcctctgccctgcctccgcccggcgcctcctcccatgcacttccccgccaccttctgcccccgctgctctctgctggctgtccaccgacgcctcgccctcaccgcctcttcccgtcccccctctggagcccacagtcgaccctcccaagaaggatggagcctccttctccgccggttccggcgctggaggggcctaccggactggacagggagctgcatcggggggtcgccgatctggtggcgcggggtacgaggaggagcagcagaaggtcctccgcgcgtcgcttctccacgtgccgaggatgggatggagcgagtcggccatgatcgcgggtgcgagggacgtggccatgtcgccggccatcgttggtgccttcccaaggaaggaggctgcgctagttgagtttttcatggatgactgccttcaacaactcatggatcgcattgatgctggtgagggagagcttttgaaaaacttgatgctcactgagagactatctaggcttgttcggatgaggcttgagatgcagacaccttacatatcaaagtggcctcaagcgctgagcattcagtcccaaccagcaaatgtctcaacaagcttaaagcagagagcagtccttgttgatgagatttggcatgctgctggagatgctggatcagatattgattggtatgtgaaacgtactgtgcttggtggcatctactcagcctcagaggtgtacatgttaacagataattctccagagtttcacgacacatggacatttgtgaatcgccgcatcaaagatgctcttgatttgcagaaatcttataaggaggtcgcttatctaaccgaaaccctgggagcagggatcggtggctccatacagggcgtcctgaacaaggttttccagaaatgaaaaaacttgcctttgcaggctgccttctcggcatttccgccaccactttcttatgtcacgttaagattctatgacattgtatatagtactctcttttacaaacaaacgctgttagggtagccaagaagctatttagtcggtggtcagaggtcagaggtcagttgagttgttgattagtcgtcattgcgcaattctgctacaggttggcgaaaaatgtgtgaactctacagactctagtccatgtgtcatgtgcgagttgctgcaaacagaacaagacactcgtggctttgcatggacacgacttggcattcg

SEQ ID NO: 10911 - protein, 335 aa, Triticum aestivum
  misc_feature (1)..(335): Ceres Seq. ID no. 13597463
IGWANSVSTQPRHFVEHVVVRRTGPSAMASFLVARRLLCPASARRLLPCTSPPPSAPAALCWLSTDASPSPPLPVPPLEPTVDPPKKDGASFSAGSGAGGAYRTGQGAASGGRRSGGAGYEEEQQKVLRASLLHVPRMGWSESAMIAGARDVAMSPAIVGAFPRKEAALVEFFMDDCLQQLMDRIDAGEGELLKNLMLTERLSRLVRMRLEMQTPYISKWPQALSIQSQPANVSTSLKQRAVLVDEIWHAAGDAGSDIDWYVKRTVLGGIYSASEVYMLTDNSPEFHDTWTFVNRRIKDALDLQKSYKEVAYLTETLGAGIGGSIQGVLNKVFQK

SEQ ID NO: 10912 - protein, 308 aa, Triticum aestivum
  misc_feature (1)..(308): Ceres Seq. ID no. 13597464
MASFLVARRLLCPASARRLLPCTSPPPSAPAALCWLSTDASPSPPLPVPPLEPTVDPPKKDGASFSAGSGAGGAYRTGQGAASGGRRSGGAGYEEEQQKVLRASLLHVPRMGWSESAMIAGARDVAMSPAIVGAFPRKEAALVEFFMDDCLQQLMDRIDAGEGELLKNLMLTERLSRLVRMRLEMQTPYISKWPQALSIQSQPANVSTSLKQRAVLVDEIWHAAGDAGSDIDWYVKRTVLGGIYSASEVYMLTDNSPEFHDTWTFVNRRIKDALDLQKSYKEVAYLTETLGAGIGGSIQGVLNKVFQK

SEQ ID NO: 10913 - protein, 198 aa, Triticum aestivum
  misc_feature (1)..(198): Ceres Seq. ID no. 13597465
MGWSESAMIAGARDVAMSPAIVGAFPRKEAALVEFFMDDCLQQLMDRIDAGEGELLKNLMLTERLSRLVRMRLEMQTPYISKWPQALSIQSQPANVSTSLKQRAVLVDEIWHAAGDAGSDIDWYVKRTVLGGIYSASEVYMLTDNSPEFHDTWTFVNRRIKDALDLQKSYKEVAYLTETLGAGIGGSIQGVLNKVFQK

SEQ ID NO: 10914 - DNA, 1066 bp, Triticum aestivum
  misc_feature (1)..(1066): Ceres Seq. ID no. 13597466
agtctttttacagcttactcctaccttgtaaagaaaaggttgtcttcttcttcgccgcttccatccatccatcctcaggagtcaggggcctgagctaacctcttggagcttttactccccgagctgccctcccccgttccaagagcaaatcagacgccgaggggagcggccgcagagcgagtcaaccgggcatggcgatggcgagctcgacgaggaggcttgcgtttgtgctactcgtgctggccttttcggccgcgctcgcagagagcagagatgcatatatgaggagcgcaaatcgatatgcctgcatactgacccaggaaagcttccctcttgcaagcagaggggcaggattaacttcggcaaacggaaagctgtgtgtactatgtgagcagtactcaaccgaagctctggtctacctgcgacaaaacgaaacccagaccgagattctcagtgccctccaccacacgtgtgcaagtcttggtcctctaagacagcagtgcatcacgctggttgactactacattcccgctttcttcttggaggtttctgtggttaaacctgaagagctctgtgagtcagcgcacctctgcccaaagggggcggcgactcggtcgtccacgcgaggggaggcctgtggtctatgccatcatgttcttgttgaagttcttaccatgcttaaggatcccaacaccaagctggagatagtcgggcttcttttcaaaacatgcagcaaggcaaagaactatgaaccgcagtgcaagaggcttgtccttgactacatcccactgattctggtgaagacccagaacttccttgagacgacggatgtctgctttgcgacacatgcctgtaaaacaggcatgcaagcaaccattcctctatccgccgctttgtgaagaacaaatgtgtaggaatcatacgcggcaaagaagcctgtaaatgttcttcctatgtttagctcaagcactaccaagctatgaaacttcgggtcgtgtgatgctttgtctgtacaatttgagctctgccctctgaagtttatgcagcaagcctgcagctgtactac

SEQ ID NO: 10915 - protein, 235 aa, Triticum aestivum
  misc_feature (1)..(235): Ceres Seq. ID no. 15222102
MAMASSTRRLAFVLLVLAFSAALAESRDAYMRSANRYACILTQESFPLASRGAGLTSANGKLCVLCEQYSTEALVYLRQNETQTEILSALHHTCASLGPLRQQCITLVDYYIPAFFLEVSVVKPEELCESAHLCPKGAATRSSTRGEACGLCHHVLVEVLTMLKDPNTKLEIVGLLFKTCSKAKNYEPQCKRLVLDYIPLILVKTQNFLETTDVCFATHACKTGMQATIPLSAAL

SEQ ID NO: 10916 - protein, 233 aa, Triticum aestivum
  misc_feature (1)..(233): Ceres Seq. ID no. 15222103
MASSTRRLAFVLLVLAFSAALAESRDAYMRSANRYACILTQESFPLASRGAGLTSANGKLCVLCEQYSTEALVYLRQNETQTEILSALHHTCASLGPLRQQCITLVDYYIPAFFLEVSVVKPEELCESAHLCPKGAATRSSTRGEACGLCHHVLVEVLTMLKDPNTKLEIVGLLFKTCSKAKNYEPQCKRLVLDYIPLILVKTQNFLETTDVCFATHACKTGMQATIPLSAAL

SEQ ID NO: 10917 - protein, 205 aa, Triticum aestivum
  misc_feature (1)..(205): Ceres Seq. ID no. 15222104
MRSANRYACILTQESFPLASRGAGLTSANGKLCVLCEQYSTEALVYLRQNETQTEILSALHHTCASLGPLRQQCITLVDYYIPAFFLEVSVVKPEELCESAHLCPKGAATRSSTRGEACGLCHHVLVEVLTMLKDPNTKLEIVGLLFKTCSKAKNYEPQCKRLVLDYIPLILVKTQNFLETTDVCFATHACKTGMQATIPLSAAL

SEQ ID NO: 10918 - DNA, 1293 bp, Triticum aestivum
  misc_feature (1)..(1293): Ceres Seq. ID no. 13597471
aaaaccggagacagcacaggcagctccccccataattgcctgtgccactggtggttggactggaagccgcctccctctcccccctgtcctccccttgcccgtcctcgacctcgccgccggccagcgatggagcggcgatccaccacccgcttctcgccttccgagattgcaaggatggagaagttggtttcatcagacagaaaagagcaagtcttggttgatagtttctgccagaagcttgtagaagaatttaatcgttctccagctcgagtcggaagcagagctctacaggctacacaggttcgaggatggttccttgataagctccctgcatcaactcctaaacctgcttccttgcctactacttctgaagaaaagcctttagcctcagaaccagatgcgttaatttctgagataaagacttcagcttctgatgaagaaaaagttttagctcttgatacaagtatttcaaacaatgaggatgcactttctgcggatttacccaaagagactacagataaggttcctgaatttgaagacttgcagtttgaggctaagtcatcaaaggattctgcatggtacgacgtcgccctcttcttggcacacaggaagacaagtttgggagaagttgaagtccgggtgaggtttatcggatatggggctgaagaagatgagtgggtgaatgtcaggaaggctgtccgccagcaatccattccgctggagtcctcagaatgccgaagcattgtcaaaggagatcttgtcctgtgtttcaaggagagcaatgatgaagcactgcatttcgatgcgcacgttgtggatgtccagcggaaacagcatgatataaggggatgcagatgcctcttccatgttgaatatgatcatgatcaaagccaggagatggtgaacctcaagagaatctccaggcggccaagatacctttgatggcttctgctaacatggatctgcttcctgctgctatccgagcttgtgtcgtactaacgggagccctcgaatcttggttgagaccgctgcactctgattgtttgttcttattgatgtactgtgtctagtagtaaaacacccgggagagtagttaagccccctctttggcacatagctgctgtaacggctatgagtaggctccgtgatagccaatttttgcacacacacgagaaagttggtgccaaagcgggcggagagccggattttaactggtgtgttggcagcagattaccatgtcactatgtcagtgtttgccgttctgaacctcttggggcgatttgcctctgcttc

SEQ ID NO: 10919 - protein, 313 aa, Triticum aestivum
  misc_feature (1)..(313): Ceres Seq. ID no. 13597472
KTGDSTGSSPHNCLCHWWLDWKPPPSPPCPPLARPRPRRRPAMERRSTTRFSPSEIARMEKLVSSDRKEQVLVDSFCQKLVEEFNRSPARVGSRALQATQVRGWFLDKLPASTPKPASLPTTSEEKPLASEPDALISEIKTSASDEEKVLALDTSISNNEDALSADLPKETTDKVPEFEDLQFEAKSSKDSAWYDVALFLAHRKTSLGEVEVRVRFIGYGAEEDEWVNVRKAVRQQSIPLESSECRSIVKGDLVLCFKESNDEALHFDAHVVDVQRKQHDIRGCRCLFHVEYDHDQSQEMVNLKRISRRPRYL

SEQ ID NO: 10920 - protein, 271 aa, Triticum aestivum
  misc_feature (1)..(271): Ceres Seq. ID no. 13597473
MERRSTTRFSPSEIARMEKLVSSDRKEQVLVDSFCQKLVEEFNRSPARVGSRALQATQVRGWFLDKLPASTPKPASLPTTSEEKPLASEPDALISEIKTSASDEEKVLALDTSISNNEDALSADLPKETTDKVPEFEDLQFEAKSSKDSAWYDVALFLAHRKTSLGEVEVRVRFIGYGAEEDEWVNVRKAVRQQSIPLESSECRSIVKGDLVLCFKESNDEALHFDAHVVDVQRKQHDIRGCRCLFHVEYDHDQSQEMVNLKRISRRPRYL

SEQ ID NO: 10921 - protein, 255 aa, Triticum aestivum
  misc_feature (1)..(255): Ceres Seq. ID no. 13597474
MEKLVSSDRKEQVLVDSFCQKLVEEFNRSPARVGSRALQATQVRGWFLDKLPASTPKPASLPTTSEEKPLASEPDALISEIKTSASDEEKVLALDTSISNNEDALSADLPKETTDKVPEFEDLQFEAKSSKDSAWYDVALFLAHRKTSLGEVEVRVRFIGYGAEEDEWVNVRKAVRQQSIPLESSECRSIVKGDLVLCFKESNDEALHFDAHVVDVQRKQHDIRGCRCLFHVEYDHDQSQEMVNLKRISRRPRYL

SEQ ID NO: 10922 - DNA, 1228 bp, Triticum aestivum
  misc_feature (1)..(1228): Ceres Seq. ID no. 13597475
actcgtcattgctgattacggagggagtagttgactacctccccacgattatcagcagccggcgccgccgttgctgttatcctgccgccgccgccgccgccgccgcctggttcggagaaatgggcaaaagagccatccgatacgccgtggtggatgccttcgcggctgagcccttcaagggcaaccccgccgcagtatgcctcctcgaagaggagggcgcctccgcggccatggacgaccggtggatgcagtccgtcgccgccgagttcaacctctcggagaccgccttcctcgcccgggactcctccgggggagccggcgcagccccgcggttccacctccgatggttcactcccgtcacggaggttgacctctgcgggcacgcgacgttggcctctgcgcacttcctcttcacgactgttcttccggagcatggcaagctggagttcatgaccaggtccgggatcctaactgccaagaaagtccctgcaccagggagcactggcgtcccaggtgaggagcaggggaagctgtttattgagctggatttccccatgattggttttctggactgcaaccaaatgccgtcgattccagagaccctaaacggtgcgcccattgtcagcgttcacaaatcggctaccgacggcgacctcattgtggaactttcttcaggaaaagaagttgttaatatccttcctagcatcgatgaaattaaaaacttggcctgcaggggtcttattgttacaggaccggcgccggctggatctggttatgacttctttacacgtttcttctgcccaaaatttgggatagatgaggaccctgttacgggcagtatacattgtgttttggcaccctattggggcagaaagctggggaagcaaaaattgacggcatttcaagcgtctccaaggggtggaacactatacctgcaactggatgacgcaaatcagagagtgcaaatccagggagaagctcttactgtgatggatgggacgctcctagcctagccagccattggcaatttggcatccatctactcgtatatgctttgaagggactaccattcatccatctactcgtatatttacggagttataatatgactttggatgtttgtgattatatttgctgttatatgcttgttgaacagttaactgtttatggatataaaaaatgccccctccattccctaaaaaaaaaaaaaaaaaagcttatcgatacc

SEQ ID NO: 10923 - protein, 336 aa, Triticum aestivum
  misc_feature (1)..(336): Ceres Seq. ID no. 15222105
SSLLITEGVVDYLPTIISSRRRRCCYPAAAAAAAAWFGEMGKRAIRYAVVDAFAAEPFKGNPAAVCLLEEEGASAAMDDRWMQSVAAEFNLSETAFLARDSSGGAGAAPRFHLRWFTPVTEVDLCGHATLASAHFLFTTVLPEHGKLEFMTRSGILTAKKVPAPGSTGVPGEEQGKLFIELDFPMIGFLDCNQMPSIPETLNGAPIVSVHKSATDGDLIVELSSGKEVVNILPSIDEIKNLACRGLIVTGPAPAGSGYDFFTRFFCPKFGIDEDPVTGSIHCVLAPYWGRKLGKQKLTAFQASPRGGTLYLQLDDANQRVQIQGEALTVMDGTLLA

SEQ ID NO: 10924 - protein, 297 aa, Triticum aestivum
  misc_feature (1)..(297): Ceres Seq. ID no. 15222106
MGKRAIRYAVVDAFAAEPFKGNPAAVCLLEEEGASAAMDDRWMQSVAAEFNLSETAFLARDSSGGAGAAPRFHLRWFTPVTEVDLCGHATLASAHFLFTTVLPEHGKLEFMTRSGILTAKKVPAPGSTGVPGEEQGKLFIELDFPMIGFLDCNQMPSIPETLNGAPIVSVHKSATDGDLIVELSSGKEVVNILPSIDEIKNLACRGLIVTGPAPAGSGYDFFTRFFCPKFGIDEDPVTGSIHCVLAPYWGRKLGKQKLTAFQASPRGGTLYLQLDDANQRVQIQGEALTVMDGTLLA

SEQ ID NO: 10925 - protein, 260 aa, Triticum aestivum
  misc_feature (1)..(260): Ceres Seq. ID no. 15222107
MDDRWMQSVAAEFNLSETAFLARDSSGGAGAAPRFHLRWFTPVTEVDLCGHATLASAHFLFTTVLPEHGKLEFMTRSGILTAKKVPAPGSTGVPGEEQGKLFIELDFPMIGFLDCNQMPSIPETLNGAPIVSVHKSATDGDLIVELSSGKEVVNILPSIDEIKNLACRGLIVTGPAPAGSGYDFFTRFFCPKFGIDEDPVTGSIHCVLAPYWGRKLGKQKLTAFQASPRGGTLYLQLDDANQRVQIQGEALTVMDGTLLA

SEQ ID NO: 10926 - DNA, 1187 bp, Triticum aestivum
  misc_feature (1)..(1187): Ceres Seq. ID no. 13597477
atagaggaaaactttcgaggactatgacgatggggcgcaacttggcggcggtgctcgtcgtgcttgcctgcctcgtttccctcgcgtcggcgcagcaggtcaagacgacggacacgcggtggagctaccgtctgccgctgcccgacggcgtcagcggcgccgagagcctcgcgttcgccggcaaggacggggtctacaccggcgtctccgacgggcgcgttctcaggtggggcgggagcgccgccggctggaccaccttcgcttacaatgccaactacaggaaaattcctctgtgctcggattctggggtgccgtcggaacaaaaggagagcatatgcgggcggccgctgggtgtccggttcaacaggaagaccggcgagctctacatcgccgacgcctacttggggctcatgaaggtcggcccggaaggcggcgaagcccaggtgctagcgacggaggcgaacggcatccccttccacttcctcaacggnctcgacgttgatcaggcgaccggcgatgtctacttcaccgacagcagcgccaactacccccggaggttcaacacggagatcatcatgaacgccgacgcgaccggccgcctgctcaagtacgacgcacgcacgaagctcgtcacggtgctcaaggcggagctgccgtacccgaacggcgtcgcgctcagccgcgacaggacgcacctggtggtggcgcacacggtgccgtgccaggcgttccggtactggctcaaggggcccaaggccgggcagtacgagctcttcgccgacctgccggggtacccggacaacgtgaggcgcgacgggcagggcggtttctgggtggcgctcaaccaggagaaggcgcggctcaacgcgacggcggctccggtgaagcacttggtcggcgtccgtctcggcgccgacggcgtggaggtcgaggagctgacggccgccaggggcgtgacgctcagcgaggtggcggagcagaacggcaacaagctgtggctgggctccgtcgagcttgattatataggcctcttcgtttgatcgattatgtgccagcgcctttatggatttgtacgggttcgttagtggttgtctcattgagttagtagacagagttaaaggtcatggcttcgtacggtttcaggactacatgcaacgtttttctacagatgtaattatgcgagtatt

SEQ ID NO: 10927 - protein, 345 aa, Triticum aestivum
  misc_feature (1)..(345): Ceres Seq. ID no. 13597478
  misc_feature (163)..(163): Xaa is any aa, unknown or other
RGKLSRTMTMGRNLAAVLVVLACLVSLASAQQVKTTDTRWSYRLPLPDGVSGAESLAFAGKDGVYTGVSDGRVLRWGGSAAGWTTFAYNANYRKIPLCSDSGVPSEQKESICGRPLGVRFNRKTGELYIADAYLGLMKVGPEGGEAQVLATEANGIPFHFLNXLDVDQATGDVYFTDSSANYPRRFNTEIIMNADATGRLLKYDARTKLVTVLKAELPYPNGVALSRDRTHLVVAHTVPCQAFRYWLKGPKAGQYELFADLPGYPDNVRRDGQGGFWVALNQEKARLNATAAPVKHLVGVRLGADGVEVEELTAARGVTLSEVAEQNGNKLWLGSVELDYIGLFV

SEQ ID NO: 10928 - protein, 338 aa, Triticum aestivum
  misc_feature (1)..(338): Ceres Seq. ID no. 13597479
  misc_feature (156)..(156): Xaa is any aa, unknown or other
MTMGRNLAAVLVVLACLVSLASAQQVKTTDTRWSYRLPLPDGVSGAESLAFAGKDGVYTGVSDGRVLRWGGSAAGWTTFAYNANYRKIPLCSDSGVPSEQKESICGRPLGVRFNRKTGELYIADAYLGLMKVGPEGGEAQVLATEANGIPFHFLNXLDVDQATGDVYFTDSSANYPRRFNTEIIMNADATGRLLKYDARTKLVTVLKAELPYPNGVALSRDRTHLVVAHTVPCQAFRYWLKGPKAGQYELFADLPGYPDNVRRDGQGGFWVALNQEKARLNATAAPVKHLVGVRLGADGVEVEELTAARGVTLSEVAEQNGNKLWLGSVELDYIGLFV

SEQ ID NO: 10929 - protein, 336 aa, Triticum aestivum
  misc_feature (1)..(336): Ceres Seq. ID no. 13597480
  misc_feature (154)..(154): Xaa is any aa, unknown or other
MGRNLAAVLVVLACLVSLASAQQVKTTDTRWSYRLPLPDGVSGAESLAFAGKDGVYTGVSDGRVLRWGGSAAGWTTFAYNANYRKIPLCSDSGVPSEQKESICGRPLGVRFNRKTGELYIADAYLGLMKVGPEGGEAQVLATEANGIPFHFLNXLDVDQATGDVYFTDSSANYPRRFNTEIIMNADATGRLLKYDARTKLVTVLKAELPYPNGVALSRDRTHLVVAHTVPCQAFRYWLKGPKAGQYELFADLPGYPDNVRRDGQGGFWVALNQEKARLNATAAPVKHLVGVRLGADGVEVEELTAARGVTLSEVAEQNGNKLWLGSVELDYIGLFV

SEQ ID NO: 10930 - DNA, 1180 bp, Triticum aestivum
  misc_feature (1)..(1180): Ceres Seq. ID no. 13597481
aaattgtacacagccgctggtgacacacaactggtaacgtgcggcagccaggggaactatgacggggcagccgccgaggctcgtgttccggttcacccaggcggaggtcgccaagatggaggaggtcctccgtgagctcgacgccatgcccaagcgtcctgtcatccagggcctaatcgatcacttcaacgcctccccggaccgctcaggcgacggcaaggtccccgtccagtacaatcaggtgaggaattggttccataaccggaggtccgcgcaatcccagcggtccaggaagatgatgctaccccctgttaacgaggaacaccacccagtggccggatcctactcagggaatatttcttcggatggtggtcatgtccagtttgaagcaaagtcggctagaaatggagcatggtacaatgttgctgcctttctgtcccacaggttcattgacacgagggacccggaagtactagttcgattttgttggcttggacctgaggaggatgaatggattgatgtttgtaaaggtgtgagactgcgttctcttcaatgtgttgctgtgcttcctggggatctcattctttgttttaaggaaggcaaagagcaggcctgctattttgatgcacatgttcttcaagttcaaagacgcaggcatgacataagggggtgccgctgcaggtttcttgtttgttatgatcatgatcactctgaggagtttgttccactgagcaaggtatgtcgtcgaccaatgcaccagacaaccgaaaagccacacaaaatgatgagtgtcaacactgacaaggtgaccgggggagcggttcccattccaccagatcaaggagggccatctgacaaggcggttgctcccttactagacacacctactagcacctgcagctattcagtggcagatgttgagatgggggatgcggaggctgccccaaacagtgaagctgcaaatgaagcacatgtcgacaagatgaatctgggagtgtagttctttcgcttcccagtgcatttcgttgtgaactttctagcgaataatgtttgcctcagaacttccaaaagaggaaggatggttacccagtaactgtaatgtgcccatgttgactggattgcttgtgtggtgcaaaaattgttggattggttatctatatctatatagctatgtcgtcgg

SEQ ID NO: 10931 - protein, 313 aa, Triticum aestivum
  misc_feature (1)..(313): Ceres Seq. ID no. 15222110
MTGQPPRLVFRFTQAEVAKMEEVLRELDAMPKRPVIQGLIDHFNASPDRSGDGKVPVQYNQVRNWFHNRRSAQSQRSRKMMLPPVNEEHHPVAGSYSGNISSDGGHVQFEAKSARNGAWYNVAAFLSHRFIDTRDPEVLVRFCWLGPEEDEWIDVCKGVRLRSLQCVAVLPGDLILCFKEGKEQACYFDAHVLQVQRRRHDIRGCRCRFLVCYDHDHSEEFVPLSKVCRRPMHQTTEKPHKMMSVNTDKVTGGAVPIPPDQGGPSDKAVAPLLDTPTSTCSYSVADVEMGDAEAAPNSEAANEAHVDKMNLGV

SEQ ID NO: 10932 - protein, 294 aa, Triticum aestivum
  misc_feature (1)..(294): Ceres Seq. ID no. 15222111
MEEVLRELDAMPKRPVIQGLIDHFNASPDRSGDGKVPVQYNQVRNWFHNRRSAQSQRSRKMMLPPVNEEHHPVAGSYSGNISSDGGHVQFEAKSARNGAWYNVAAFLSHRFIDTRDPEVLVRFCWLGPEEDEWIDVCKGVRLRSLQCVAVLPGDLILCFKEGKEQACYFDAHVLQVQRRRHDIRGCRCRFLVCYDHDHSEEFVPLSKVCRRPMHQTTEKPHKMMSVNTDKVTGGAVPIPPDQGGPSDKAVAPLLDTPTSTCSYSVADVEMGDAEAAPNSEAANEAHVDKMNLGV

SEQ ID NO: 10933 - protein, 284 aa, Triticum aestivum
  misc_feature (1)..(284): Ceres Seq. ID no. 15222112
MPKRPVIQGLIDHFNASPDRSGDGKVPVQYNQVRNWFHNRRSAQSQRSRKMMLPPVNEEHHPVAGSYSGNISSDGGHVQFEAKSARNGAWYNVAAFLSHRFIDTRDPEVLVRFCWLGPEEDEWIDVCKGVRLRSLQCVAVLPGDLILCFKEGKEQACYFDAHVLQVQRRRHDIRGCRCRFLVCYDHDHSEEFVPLSKVCRRPMHQTTEKPHKMMSVNTDKVTGGAVPIPPDQGGPSDKAVAPLLDTPTSTCSYSVADVEMGDAEAAPNSEAANEAHVDKMNLGV

SEQ ID NO: 10934 - DNA, 1499 bp, Triticum aestivum
  misc_feature (1)..(1499): Ceres Seq. ID no. 13597498
ctctcacacggctttccctctctctcctcccgttcgaactaggaatccgaggtgagcacgggcaaagcgatggccgcggccaggccgcaccacagggcgccgccggggcgcgtgcccacgaggtgcgtcgccgcgctctgcgccgcctgcttcctcctcggcgtctgcgtcgtcaaccgctactgggcggttcccgagccacccgattgcccaagcaaggcgaactctgggcgttcgagggccgtgctgagccaagcacaaacccgcgaagtcatcatcgcgttggacagaacgatatcggacatcgagatgcgcctggccgccgccagagccgcgcagatgaggaaccaaggcgtgtcgccgagtgattcagccgctgaccagggaaacatgcgacctagattgcttttcgtcatgggtatcatgaccacattcgataatcggaggcgcagagactctatcaggaagacgtggatgccacaaggtgagcgtttgcgaatgctggagaaggacaagggcattgtcacgcgttttgttattggacgaagtgcaaatcctggtcctgacagtgaagtggagcgtgccatggatgcagaagagaaagaatacaatgatattcttagacttaatcacgttgaaggccaggatgggcttcctttgaagattcagatgtttctttcaagtgctctgtccacgtgggatgctgatttctatgtcaaagttgacgatgatgttcatgtcaacattggtattaccagatcgattttggcacgacataggtcaaaacctcgggtgtacatcggctgcatgaaatccggacctgtgatcgctaacaatgaatctaaatattacgaaccagatcattggaagtttgggactgcgggtaacaactactttaggcacgcaacacggcagctgtatgctataacaagggacttggcgacctacatatcagcaaacaagcatatcttgcacaaatatacaaatgaagatgtatcatttggttcttggttgattgggttggatgttgagcatgttgatgagagaagcctttgttgtggtattcctccagactgcgaatggaaggcgcaggctgggaacccatgtggggcatccttcgactggaactgctccggcgtctgcaatccagcagagagaatggaggaggtgcaccggcgatgctgggaacatcgcgaggctgctctgccacaagcgcaggagtcttgacaatcaaggggtggtggcatccttgtgctgctccatgtaaactcatgtaaattattcggtagacgaagacgcagcagctgtcgtgccgttgtctgggttcttggagctacacatttttgccttccgacgccgtgcatttgcatgaattggaggggaaatttgaacagagctacggcatagtgaaggttttgcatcgtgtatgtaagatatccgatatgtgaaaatgaatgcaggaaagctctgcaaattgtgtcgtcatgattaaatggtcg

SEQ ID NO: 10935 - protein, 385 aa, Triticum aestivum
  misc_feature (1)..(385): Ceres Seq. ID no. 13597499
MAAARPHHRAPPGRVPTRCVAALCAACFLLGVCVVNRYWAVPEPPDCPSKANSGRSRAVLSQAQTREVIIALDRTISDIEMRLAAARAAQMRNQGVSPSDSAADQGNMRPRLLFVMGIMTTFDNRRRRDSIRKTWMPQGERLRMLEKDKGIVTRFVIGRSANPGPDSEVERAMDAEEKEYNDILRLNHVEGQDGLPLKIQMFLSSALSTWDADFYVKVDDDVHVNIGITRSILARHRSKPRVYIGCMKSGPVIANNESKYYEPDHWKFGTAGNNYFRHATRQLYAITRDLATYISANKHILHKYTNEDVSFGSWLIGLDVEHVDERSLCCGIPPDCEWKAQAGNPCGASFDWNCSGVCNPAERMEEVHRRCWEHREAALPQAQES

SEQ ID NO: 10936 - protein, 305 aa, Triticum aestivum
  misc_feature (1)..(305): Ceres Seq. ID no. 13597500
MRLAAARAAQMRNQGVSPSDSAADQGNMRPRLLFVMGIMTTFDNRRRRDSIRKTWMPQGERLRMLEKDKGIVTRFVIGRSANPGPDSEVERAMDAEEKEYNDILRLNHVEGQDGLPLKIQMFLSSALSTWDADFYVKVDDDVHVNIGITRSILARHRSKPRVYIGCMKSGPVIANNESKYYEPDHWKFGTAGNNYFRHATRQLYAITRDLATYISANKHILHKYTNEDVSFGSWLIGLDVEHVDERSLCCGIPPDCEWKAQAGNPCGASFDWNCSGVCNPAERMEEVHRRCWEHREAALPQAQES

SEQ ID NO: 10937 - protein, 295 aa, Triticum aestivum
  misc_feature (1)..(295): Ceres Seq. ID no. 13597501
MRNQGVSPSDSAADQGNMRPRLLFVMGIMTTFDNRRRRDSIRKTWMPQGERLRMLEKDKGIVTRFVIGRSANPGPDSEVERAMDAEEKEYNDILRLNHVEGQDGLPLKIQMFLSSALSTWDADFYVKVDDDVHVNIGITRSILARHRSKPRVYIGCMKSGPVIANNESKYYEPDHWKFGTAGNNYFRHATRQLYAITRDLATYISANKHILHKYTNEDVSFGSWLIGLDVEHVDERSLCCGIPPDCEWKAQAGNPCGASFDWNCSGVCNPAERMEEVHRRCWEHREAALPQAQES

SEQ ID NO: 10938 - DNA, 1099 bp, Triticum aestivum
  misc_feature (1)..(1099): Ceres Seq. ID no. 13597506
actagtagcagctatagctagcctacgagccacacacatcacatcaaagcgcatccagcaggcaatggcgtcctcctcctcgtctccgctgctcatgttgctgctgctgccgctcctgcgcgccatggcgcgcccgtgctccgccgtcgacgccatcggcacctactgcgccaagaacggcaccagcgcggagacgcaggccagcatcgaccaggtcctcgcggcgctcgtcccgcgcgcctcggccgcctactacgccacggccaccgccggccgctcctcgtccgcggtctggggcctcgcgcagtgccgcggcgacgtgccgcgccaggactgctcgctctgcctcgccgccgcggccaaggaggtcgcgtcgtcctgccgcggcagctccgacggccgggtcttctacgactactgcctgctccggtactccacctccaacttcgtcggcctcgcggacacgggctacacgctcatcctcctcaacacccagaacgccaccggcgtcgacctggccgcgttcgaccgggcgcaggggaaactcatgtcccgcgtcgcctccgaggccggcgacgccgccaacaaggggcttgcgacggacacgacgaggctcggcagcgagggcggcggagccaagacgaccatctacgggctcggctggtgcaccagggacatcacggcggcggactgcgggctttgcgtggcgcaggcggtggcggagctgcccaactactgccggtaccggcgtgggtgccgcgtcatctacagcagctgcatggcgcgctacgaggtgtaccccttcttcttccccctcgacggcgccgacgagtcggccgacgagctcggacagtgcgacaagatcgtcttgaactacccgtgatgggtggagtacagctacgtagtcaactacggtgctagtatctactgtacgtagcactctagctcgttgtgcgtacctggtggtggcgaatccatttgtagtgtatggctagctcgtagctagcctagaatccaagcagggtcaaaataattttcgttaagtgcaaaataataagcgaaaaactagccttgtgttcctcgcacatgtttgcttgcg

SEQ ID NO: 10939 - protein, 293 aa, Triticum aestivum
  misc_feature (1)..(293): Ceres Seq. ID no. 15222116
LVAAIASLRATHITSKRIQQAMASSSSSPLLMLLLLPLLRAMARPCSAVDAIGTYCAKNGTSAETQASIDQVLAALVPRASAAYYATATAGRSSSAVWGLAQCRGDVPRQDCSLCLAAAAKEVASSCRGSSDGRVFYDYCLLRYSTSNFVGLADTGYTLILLNTQNATGVDLAAFDRAQGKLMSRVASEAGDAANKGLATDTTRLGSEGGGAKTTIYGLGWCTRDITAADCGLCVAQAVAELPNYCRYRRGCRVIYSSCMARYEVYPFFFPLDGADESADELGQCDKIVLNYP

SEQ ID NO: 10940 - protein, 272 aa, Triticum aestivum
  misc_feature (1)..(272): Ceres Seq. ID no. 15222117
MASSSSSPLLMLLLLPLLRAMARPCSAVDAIGTYCAKNGTSAETQASIDQVLAALVPRASAAYYATATAGRSSSAVWGLAQCRGDVPRQDCSLCLAAAAKEVASSCRGSSDGRVFYDYCLLRYSTSNFVGLADTGYTLILLNTQNATGVDLAAFDRAQGKLMSRVASEAGDAANKGLATDTTRLGSEGGGAKTTIYGLGWCTRDITAADCGLCVAQAVAELPNYCRYRRGCRVIYSSCMARYEVYPFFFPLDGADESADELGQCDKIVLNYP

SEQ ID NO: 10941 - protein, 262 aa, Triticum aestivum
  misc_feature (1)..(262): Ceres Seq. ID no. 15222118
MLLLLPLLRAMARPCSAVDAIGTYCAKNGTSAETQASIDQVLAALVPRASAAYYATATAGRSSSAVWGLAQCRGDVPRQDCSLCLAAAAKEVASSCRGSSDGRVFYDYCLLRYSTSNFVGLADTGYTLILLNTQNATGVDLAAFDRAQGKLMSRVASEAGDAANKGLATDTTRLGSEGGGAKTTIYGLGWCTRDITAADCGLCVAQAVAELPNYCRYRRGCRVIYSSCMARYEVYPFFFPLDGADESADELGQCDKIVLNYP

SEQ ID NO: 10942 - DNA, 699 bp, Triticum aestivum
  misc_feature (1)..(699): Ceres Seq. ID no. 13597511
aaaaaaaacacaccgactccactgcatctgcttcgccgcgggcgagtccggccgccggcgatgcggggcccgcacaaccgcccccagtgcacgccggcccaccaggcgggcgccctcctcctggtcgccgtcaccttcctcctcacccgcctcctctccgcccctccccctgccccgcccttccccacccccggcccccggctctccgccgcggccgaccacctccgcgtctacgtctacgccgaggacgaggtcgacggcctgcgcgcgctgctccgcggccgcgacggcgccgtctccgccgccacctgcctcaagggccagtggggaacgcaggtgaagatccaccagcttctcctgaggtcaaggtataggacactggacaaggacgaagcgcatctcttctttgttcccagctacgtcaaatgtgttcgcatgaccggagctctcacagacaaggaaatcaatcagacatatgtcaaggttctgagtcagatgtcatatttccgcagatcgggtgggcgtgaccacatttttgtcttcccaagtggtgctggagctcacctgtttcgctcgtgggcaacttttctgaatcgatccatcatcctcactccagagggtgaccgtactgacaagcgaggtataagcgcatttaatacatggaaagacattattatcccggggaatgtggatgattct

SEQ ID NO: 10943 - protein, 233 aa, Triticum aestivum
  misc_feature (1)..(233): Ceres Seq. ID no. 13597512
KKNTPTPLHLLRRGRVRPPAMRGPHNRPQCTPAHQAGALLLVAVTFLLTRLLSAPPPAPPFPTPGPRLSAAADHLRVYVYAEDEVDGLRALLRGRDGAVSAATCLKGQWGTQVKIHQLLLRSRYRTLDKDEAHLFFVPSYVKCVRMTGALTDKEINQTYVKVLSQMSYFRRSGGRDHIFVFPSGAGAHLFRSWATFLNRSIILTPEGDRTDKRGISAFNTWKDIIIPGNVDDS

SEQ ID NO: 10944 - protein, 213 aa, Triticum aestivum
  misc_feature (1)..(213): Ceres Seq. ID no. 13597513
MRGPHNRPQCTPAHQAGALLLVAVTFLLTRLLSAPPPAPPFPTPGPRLSAAADHLRVYVYAEDEVDGLRALLRGRDGAVSAATCLKGQWGTQVKIHQLLLRSRYRTLDKDEAHLFFVPSYVKCVRMTGALTDKEINQTYVKVLSQMSYFRRSGGRDHIFVFPSGAGAHLFRSWATFLNRSIILTPEGDRTDKRGISAFNTWKDIIIPGNVDDS

SEQ ID NO: 10945 - protein, 123 aa, Triticum aestivum
  misc_feature (1)..(123): Ceres Seq. ID no. 13597514
KKHTDSTASASPRASPAAGDAGPAQPPPVHAGPPGGRPPPGRRHLPPHPPPLRPSPCPALPHPRPPALRRGRPPPRLRLRRGRGRRPARAAPRPRRRRLRRHLPQGPVGNAGEDPPASPEVKV

SEQ ID NO: 10946 - DNA, 1628 bp, Triticum aestivum
  misc_feature (1)..(1628): Ceres Seq. ID no. 13597528
cttgctcatctcatctcattccctcccttgtgccatctgctctgctctctcctatcatctatctagcaactcaattccatttgcatgcctacacacatcttacattcactacctcaacacttaccactccaccctagctaagctatcttcacctccatcacaaatcatcaattgcttcagtttgatcccatcaccatgggcgagcaagtagccaccaaggaggaggccaacaaggaagaatcacctgcacccgccgccgcacctgaagctgcaccggcaccggcaccggcagaggagaagaaggacgaggcagcagccgaccaagacccaaagaaggaggaaccaccagcagccgacccaccgtcccctccgccgccggtgccggtgatcctgggcgtcgaggtgcactgcacgggctgcgccaagcggatcaggcgctccctcctccgctgcaagggcgtcgaggccgtccacgtcgacatgtccgccaaccaggtcaccatcaagggcgccgtcgacccgcaggccctctgcgaccgcctccgcgccaagaccaagcgcgacgccaccctcatctcccctctgccacctcctccgccggccgagggcgaggagcctccgccgccccctcctccggcaccgccgctcgtcagcgaggcccgcacagtggagctgctcgtcaacatgcactgcgaggcctgcgcgcagcagctgcagaccaagatgatgaggatgaagggggtggtcagcgctcagacggacctcgccgccgggaggctcacgctcagtgccaccgtggaggacgagaagattgtggagtacatccaccgacggactgggaagatcgcctccgtcgtgccgccgccgcctccggagccgcccaaggaggaggaaccaccagctcctgctgctgatgctgagccaccaaaggatgaagcaccagccgacggcaagaaagaagaggccggcgacaacaaggcggctgaagacggcaaaggagctgcagaggccggggaggagaagaaggaaggtgccggcgaggaggaccagaagccggggaagcaagaaggtgtggcggtggacggcttcccgccggaggagatgatgaagcggatggtctactggccctacggcggcgcacccggcggcggcatccactacaagctgcatccggccgacgccgaggaggccatgatggccaggaggatggccatgcacgccatgccgccacctatgccgccgccgccgcaccaccaccaccacaacccctacgccatgatgcaccagcagtgggcgcctccaccgccgccgccacctccggggatgccgatgtacaacagctacaactacggcagcagctacatgatggagcggccgccgcagatgttcagcgacgagaaccccaacgcctgcgtcatctcctagtcctagctatctcggatcgatggatggatcaccacatgggccatggcatggatatgagctgagcatgtgagcttggccggattattggaccatcctccatatacatttctatactccgattatgtactgctgcgtaattataagcagtagttattgtactattagcgacgaaattaaaggacattggtcacgcttgtaagatc

SEQ ID NO: 10947 - protein, 409 aa, Triticum aestivum
  misc_feature (1)..(409): Ceres Seq. ID no. 13597529
MGEQVATKEEANKEESPAPAAAPEAAPAPAPAEEKKDEAAADQDPKKEEPPAADPPSPPPPVPVILGVEVHCTGCAKRIRRSLLRCKGVEAVHVDMSANQVTIKGAVDPQALCDRLRAKTKRDATLISPLPPPPPAEGEEPPPPPPPAPPLVSEARTVELLVNMHCEACAQQLQTKMMRMKGVVSAQTDLAAGRLTLSATVEDEKIVEYIHRRTGKIASVVPPPPPEPPKEEEPPAPAADAEPPKDEAPADGKKEEAGDNKAAEDGKGAAEAGEEKKEGAGEEDQKPGKQEGVAVDGFPPEEMMKRMVYWPYGGAPGGGIHYKLHPADAEEAMMARRMAMHAMPPPMPPPPHHHHHNPYAMMHQQWAPPPPPPPPGMPMYNSYNYGSSYMMERPPQMFSDENPNACVIS

SEQ ID NO: 10948 - protein, 314 aa, Triticum aestivum
  misc_feature (1)..(314): Ceres Seq. ID no. 13597530
MSANQVTIKGAVDPQALCDRLRAKTKRDATLISPLPPPPPAEGEEPPPPPPPAPPLVSEARTVELLVNMHCEACAQQLQTKMMRMKGVVSAQTDLAAGRLTLSATVEDEKIVEYIHRRTGKIASVVPPPPPEPPKEEEPPAPAADAEPPKDEAPADGKKEEAGDNKAAEDGKGAAEAGEEKKEGAGEEDQKPGKQEGVAVDGFPPEEMMKRMVYWPYGGAPGGGIHYKLHPADAEEAMMARRMAMHAMPPPMPPPPHHHHHNPYAMMHQQWAPPPPPPPPGMPMYNSYNYGSSYMMERPPQMFSDENPNACVIS

SEQ ID NO: 10949 - protein, 246 aa, Triticum aestivum
  misc_feature (1)..(246): Ceres Seq. ID no. 13597531
MHCEACAQQLQTKMMRMKGVVSAQTDLAAGRLTLSATVEDEKIVEYIHRRTGKIASVVPPPPPEPPKEEEPPAPAADAEPPKDEAPADGKKEEAGDNKAAEDGKGAAEAGEEKKEGAGEEDQKPGKQEGVAVDGFPPEEMMKRMVYWPYGGAPGGGIHYKLHPADAEEAMMARRMAMHAMPPPMPPPPHHHHHNPYAMMHQQWAPPPPPPPPGMPMYNSYNYGSSYMMERPPQMFSDENPNACVIS

SEQ ID NO: 10950 - DNA, 1809 bp, Triticum aestivum
  misc_feature (1)..(1809): Ceres Seq. ID no. 13597532
attaaacccattcacccctttcctaagccctccccgctcccacccgaccgctcgaccatgtccaccaggaaggacgccggcccctcgccggcggcggcgcccgccaccgcgcctgccctaacgccttccccattcatgcccatgtgtcagatgcggcgggatgagtgcgcagacctcctcaagctgatctccggcgtctcgcgccctctcgaggacgtcgtggcggatttcctcgcccgcgtcccgcccgagcgccgcctccgcttcggttccgccatcaagtttctcctcgaggacaaggtgatgtttcaaccagctgagcgtttaattgcactcgcaattcttcatcaagggtattcctcacagctgacaaatccgtttgttccattcttaataaatgttgcctgtgatgaaatttctgagagaccagaacgtgtttttctccagcttttgctaacttcagctaatggggacaacaacaaggagatcttgaaacagtctgcagaagattacttgaaggagccttcttatgcatctcaggtgttgctgccaagagaccagcttgaaagccaatactcctgcaatgatgttcagctgcagacatacactagttgcgcagctgctacggttagaagtgctattcctgacccagatgtttcccaaagctgcggtgattcatcaggattatcaccgaccaaactaaatagagataatgtggtgacaaatttacttcaacaaacaccactgagaggattgtctcctccatggattaggccctctccccccagacttgaaatacttgaaggggagttgcagtggttgaacctggacaacaaccatgagctactatgggatggtagcatgtgtgctgacactagccgaggagcttcaatccgtgatttggtcggaagagcctgtaaaggaccacttgcacctgcccaacaagagcaagttgttttagatttagccagggactggaagctagtttatcattgcggaatgacaccagagaagcttcccgaccttgttgaacataatccactcattgctgttgatgttctttcaaagctgatcaattgtcctgacatggattcttatttcaatgttcttgtgcacatggaaatgagcctgcattcaatggaagttgtaaacaggcttactacagcagtagatctaccaccaggattcattcatgactacatctcaaattgtattcggtcatgccaaaatatcaaggataagtacatgcaaaacagacttgtgagactagtttgtgtttttctacaaagtctcattcggaacaagataataaatgttgaagatctattcattgaggtacaagccttctgcattgcgttttctcgaataagagaagcagctggtttgttcaggcttctcaaatctctagagtgaagaaggttgtatgagttaccggagttcagctctataaacaaattttttcatgctgtacattcatagtcttatattttcgtgttgatctgccaattcagggttgtacttcatagatcatagctcttgttgatgtatttattgtcattaagctgttgccctcacctaaagaaaggtcaaaagatatcagaactattacccaggctttgatagttccgctgaatcattttgatgtggacttaaaccacatgttctttaggtgagacaaattagcaattacctttagcctgttgaaagatagctgaacaatgggcgcctgcttctcagttgaggctcccgagtacaagtaatttgagagatttcttaatttaaattcagatgtaaagactagttgtactc

SEQ ID NO: 10951 - protein, 470 aa, Triticum aestivum
  misc_feature (1)..(470): Ceres Seq. ID no. 15222122
IKPIHPFPKPSPLPPDRSTMSTRKDAGPSPAAAPATAPALTPSPFMPMCQMRRDECADLLKLISGVSRPLEDVVADFLARVPPERRLRFGSAIKFLLEDKVMFQPAERLIALAILHQGYSSQLTNPFVPFLINVACDEISERPERVFLQLLLTSANGDNNKEILKQSAEDYLKEPSYASQVLLPRDQLESQYSCNDVQLQTYTSCAAATVRSAIPDPDVSQSCGDSSGLSPTKLNRDNVVTNLLQQTPLRGLSPPWIRPSPPRLEILEGELQWLNLDNNHELLWDGSMCADTSRGASIRDLVGRACKGPLAPAQQEQVVLDLARDWKLVYHCGMTPEKLPDLVEHNPLIAVDVLSKLINCPDMDSYFNVLVHMEMSLHSMEVVNRLTTAVDLPPGFIHDYISNCIRSCQNIKDKYMQNRLVRLVCVFLQSLIRNKIINVEDLFIEVQAFCIAFSRIREAAGLFRLLKSLE

SEQ ID NO: 10952 - protein, 451 aa, Triticum aestivum
  misc_feature (1)..(451): Ceres Seq. ID no. 15222123
MSTRKDAGPSPAAAPATAPALTPSPFMPMCQMRRDECADLLKLISGVSRPLEDVVADFLARVPPERRLRFGSAIKFLLEDKVMFQPAERLIALAILHQGYSSQLTNPFVPFLINVACDEISERPERVFLQLLLTSANGDNNKEILKQSAEDYLKEPSYASQVLLPRDQLESQYSCNDVQLQTYTSCAAATVRSAIPDPDVSQSCGDSSGLSPTKLNRDNVVTNLLQQTPLRGLSPPWIRPSPPRLEILEGELQWLNLDNNHELLWDGSMCADTSRGASIRDLVGRACKGPLAPAQQEQVVLDLARDWKLVYHCGMTPEKLPDLVEHNPLIAVDVLSKLINCPDMDSYFNVLVHMEMSLHSMEVVNRLTTAVDLPPGFIHDYISNCIRSCQNIKDKYMQNRLVRLVCVFLQSLIRNKIINVEDLFIEVQAFCIAFSRIREAAGLFRLLKSLE

SEQ ID NO: 10953 - protein, 425 aa, Triticum aestivum
  misc_feature (1)..(425): Ceres Seq. ID no. 15222124
MPMCQMRRDECADLLKLISGVSRPLEDVVADFLARVPPERRLRFGSAIKFLLEDKVMFQPAERLIALAILHQGYSSQLTNPFVPFLINVACDEISERPERVFLQLLLTSANGDNNKEILKQSAEDYLKEPSYASQVLLPRDQLESQYSCNDVQLQTYTSCAAATVRSAIPDPDVSQSCGDSSGLSPTKLNRDNVVTNLLQQTPLRGLSPPWIRPSPPRLEILEGELQWLNLDNNHELLWDGSMCADTSRGASIRDLVGRACKGPLAPAQQEQVVLDLARDWKLVYHCGMTPEKLPDLVEHNPLIAVDVLSKLINCPDMDSYFNVLVHMEMSLHSMEVVNRLTTAVDLPPGFIHDYISNCIRSCQNIKDKYMQNRLVRLVCVFLQSLIRNKIINVEDLFIEVQAFCIAFSRIREAAGLFRLLKSLE

SEQ ID NO: 10954 - DNA, 1476 bp, Triticum aestivum
  misc_feature (1)..(1476): Ceres Seq. ID no. 13597537
atgtcgctaccaatcactagcgtctcccgagcccaccaggacccgacccagatcttgccgttggcagctcaactcccgtgtaggtgagccggctactcccctcccacccccaccacccgagagtacacggcgcctcttcttcaaaagccctccctttttgttttctcggcgctcctcgggggttttggtccgccgaggaggggtttggtgcgcccggtaccggagaatcttggcgagaagtgcctagtttccgctaggctggttggtgggaggcgggtgcctggtgccgcggcttcagccatggaggcagtcgcaatgtcgccgtcctccgtctcgtcccacaacctcgacgccgcctccaccagcgacgacatgccgtcctcgcaagagggcctcctcttctcggacagcctcaaggacttgaggaatctgcggtcgcagctatactcagcggcagaatattttgaagtattctacacaaacaactcgcacagatctacggtggtgacgagtttaaaagactacgcagttgaggcactcgttagcacggttgaccatcttggctttgtgtcgtacaaggtggataatctcgtcaatgaaaaggctgacgaggttaatgaaacagaatttcgagtatcgtcggttgaacagagggtaaagatttgccggcaggcaattgaccaggagggaagatctcaacagtctcttcttatcagggcgccgcagtaccacaggcgttacatattaccaggcgtagatatagtggaatccgctatccatccagtttcagagcccacacggtacagcaggcaacatacgggtcgcaaaatgcgcaagtctcagtctaccatgtccactccagttagtaggcagacaacgatgaggagtgtccgttcacggtctccagcagttcgtgaaacacatcatcgatcacgatccatgtcgccgtctcgaaaagcgcgagctaaatcaccatcaccccaagtcgtgaacttgaatccgaaagaaacaagagcaggttcgccaataccaactattcccattcccctggcgcgatctgctacagttgcaagaagaccacctctggatccaaagcattttagacaaacctcgatgcaggtgcagtccgactatgaacaccagaaagagcgggagaaaagatcaagcaaaggcaggggcttcctcaagtcgctgctcacaagacgccggtggaggaatgacgagtcgctctacaattacttggacgagtactgatcgctgaaatgtcttagaccttgttccttgttgaccaatctcgttccttcatacatatgatgttcgagatctcagaccaaatctcattccttcatacatatagcttgtgtgtcatttccatgtgtttatagatacaatgcagacagaaacaccaccagtggtgctcatggcgttgcgcaagcgcatgacggatgaagcaaccaaatacagagcagcttccgt

SEQ ID NO: 10955 - protein, 317 aa, Triticum aestivum
  misc_feature (1)..(317): Ceres Seq. ID no. 15222125
MEAVAMSPSSVSSHNLDAASTSDDMPSSQEGLLFSDSLKDLRNLRSQLYSAAEYFEVFYTNNSHRSTVVTSLKDYAVEALVSTVDHLGFVSYKVDNLVNEKADEVNETEFRVSSVEQRVKICRQAIDQEGRSQQSLLIRAPQYHRRYILPGVDIVESAIHPVSEPTRYSRQHTGRKMRKSQSTMSTPVSRQTTMRSVRSRSPAVRETHHRSRSMSPSRKARAKSPSPQVVNLNPKETRAGSPIPTIPIPLARSATVARRPPLDPKHFRQTSMQVQSDYEHQKEREKRSSKGRGFLKSLLTRRRWRNDESLYNYLDEY

SEQ ID NO: 10956 - protein, 312 aa, Triticum aestivum
  misc_feature (1)..(312): Ceres Seq. ID no. 15222126
MSPSSVSSHNLDAASTSDDMPSSQEGLLFSDSLKDLRNLRSQLYSAAEYFEVFYTNNSHRSTVVTSLKDYAVEALVSTVDHLGFVSYKVDNLVNEKADEVNETEFRVSSVEQRVKICRQAIDQEGRSQQSLLIRAPQYHRRYILPGVDIVESAIHPVSEPTRYSRQHTGRKMRKSQSTMSTPVSRQTTMRSVRSRSPAVRETHHRSRSMSPSRKARAKSPSPQVVNLNPKETRAGSPIPTIPIPLARSATVARRPPLDPKHFRQTSMQVQSDYEHQKEREKRSSKGRGFLKSLLTRRRWRNDESLYNYLDEY

SEQ ID NO: 10957 - protein, 293 aa, Triticum aestivum
  misc_feature (1)..(293): Ceres Seq. ID no. 15222127
MPSSQEGLLFSDSLKDLRNLRSQLYSAAEYFEVFYTNNSHRSTVVTSLKDYAVEALVSTVDHLGFVSYKVDNLVNEKADEVNETEFRVSSVEQRVKICRQAIDQEGRSQQSLLIRAPQYHRRYILPGVDIVESAIHPVSEPTRYSRQHTGRKMRKSQSTMSTPVSRQTTMRSVRSRSPAVRETHHRSRSMSPSRKARAKSPSPQVVNLNPKETRAGSPIPTIPIPLARSATVARRPPLDPKHFRQTSMQVQSDYEHQKEREKRSSKGRGFLKSLLTRRRWRNDESLYNYLDEY

SEQ ID NO: 10958 - DNA, 1383 bp, Triticum aestivum
  misc_feature (1)..(1383): Ceres Seq. ID no. 13597538
gaacatcctaatcgaaaacttctccggttgtgaggccccgtgctgcctcctcctctctgtctgtttctaccgacgccgccccagcccccgcgagagagaaaccctagcctagggttccacgcgccgccgccgccgccgccgacgtcgaccccgcctcgcccttcccccgagctcgccatggacgcgggccgcaagagggccgtgccggagggcgccaacggcggcgccgccgtcaagcgcgccagagaatcggagtcggttcaaacgggtgtaggaagcaaatcgaagccatgcaccaaatttttcagcactgctggttgtccctttggttcaagttgccattttctccataacttccctggaggtcaccaggctgtttcaaagatgaccaacttgggtggtccagctgtttcagctcctcaaggaagaatgcccatgggacctggtgttcctgatgggccacctacacccagcttgaagactcgcttgtgtaacaagtttaacacagcagaaggttgtaaatgggggaacaagtgtcattttgctcatggagagagggagctcggaaagcccatgctgttgaacaactcaatggcacctccaatgggaccaagacccaatggccacttccagcccccaccgatgcctggcccagacatggttcctccctcaacctttggcgcatcggccacagccaagatcagtgttgatgcatcccttgccggcgccattattgggaagggtggagtcaacacaaagcacatatccagaatgactggggccaagctggccatacgggataatgaggcagaccccaaccataaaaacattgagctcgaggggtcgtttgatcaggtcaaccatgccagtgcaatggtgaaagagctgattctccgcattggtggcaacgcccctcctcaagcaaagaacccagggagggggcctgcgggtggtggtgggggaagcaacttcaagaccaagctgtgcgacaacttcaacaaaggctcttgcacatttggagacagatgccacttcgcccatggtgagagtgaactgcgcaagtcggctgcggcttgagagatgcttttttttttatggcttttcatgattaatagtgattagcaaagcctgagctccaaatccgaggccattcacccatggtcatgttgagttgcataagcctgttgttgattgattgggagatactgtcatggcttcggtgtgatcagctcgctgtaactgatagatatccgagaatggatttgcttttgagatttattataggcttagtgtattgccgtcttttttctctctctgctccgcatccaatttttgtactgtttctaaggcattttaatatggcaaatttagcgattctattcc

SEQ ID NO: 10959 - protein, 299 aa, Triticum aestivum
  misc_feature (1)..(299): Ceres Seq. ID no. 13597539
MDAGRKRAVPEGANGGAAVKRARESESVQTGVGSKSKPCTKFFSTAGCPFGSSCHFLHNFPGGHQAVSKMTNLGGPAVSAPQGRMPMGPGVPDGPPTPSLKTRLCNKFNTAEGCKWGNKCHFAHGERELGKPMLLNNSMAPPMGPRPNGHFQPPPMPGPDMVPPSTFGASATAKISVDASLAGAIIGKGGVNTKHISRMTGAKLAIRDNEADPNHKNIELEGSFDQVNHASAMVKELILRIGGNAPPQAKNPGRGPAGGGGGSNFKTKLCDNFNKGSCTFGDRCHFAHGESELRKSAAA

SEQ ID NO: 10960 - protein, 230 aa, Triticum aestivum
  misc_feature (1)..(230): Ceres Seq. ID no. 13597540
MTNLGGPAVSAPQGRMPMGPGVPDGPPTPSLKTRLCNKFNTAEGCKWGNKCHFAHGERELGKPMLLNNSMAPPMGPRPNGHFQPPPMPGPDMVPPSTFGASATAKISVDASLAGAIIGKGGVNTKHISRMTGAKLAIRDNEADPNHKNIELEGSFDQVNHASAMVKELILRIGGNAPPQAKNPGRGPAGGGGGSNFKTKLCDNFNKGSCTFGDRCHFAHGESELRKSAAA

SEQ ID NO: 10961 - protein, 215 aa, Triticum aestivum
  misc_feature (1)..(215): Ceres Seq. ID no. 13597541
MPMGPGVPDGPPTPSLKTRLCNKFNTAEGCKWGNKCHFAHGERELGKPMLLNNSMAPPMGPRPNGHFQPPPMPGPDMVPPSTFGASATAKISVDASLAGAIIGKGGVNTKHISRMTGAKLAIRDNEADPNHKNIELEGSFDQVNHASAMVKELILRIGGNAPPQAKNPGRGPAGGGGGSNFKTKLCDNFNKGSCTFGDRCHFAHGESELRKSAAA

SEQ ID NO: 10962 - DNA, 1891 bp, Triticum aestivum
  misc_feature (1)..(1891): Ceres Seq. ID no. 13597546
aaaacaaacccacacacaacccctctgtctcctcctccttggctttgctagcttcctgctcccttcgcttcccacatgcagccatatcttgagctagcttctctccgcatcaccgccaccatcccgctgtccccaagaatatatagcaccatcttcctcgaggccatggctgccatggcctatatagccctccggggcgcggcattggccgccatcgtcgccctcatccattgggtgtacaggtggcgccaccccaaatgcgccggcacgctcccgccgggatccatgggcatccccatcatcggcgagacgctgcagttcttcgcccccaacccgacctgcggcctctcccccttcgtccgggacagggtgaagaggtacgggagcatgttcaagacgagcatcgtggggcggccggtggtggtgtcggcggacccggacgtgaaccactacgtgttccagaacgaggggaagctgttcgagagctggtacccggacaccttcaccgagatcttcggccgcgacaacgtcggctccctgcacggcttcatctacaagtacctcaagaccctcgtgctccgcctctacggccaggagaacctcaaggcggtgctcctcgccgagaccgacgccgcctgccgcggcagcctcgccgcgtgggcggcgcagccctgtgtcgacatcaaagacgggctctccactatgatatttgatcttactgccaagaagctgatcggctacgagccgaccaagtcctcggagagcctgcgggagaatttcacggcgttcattcgcggcctgatctcgttccccctcaacattcccggcacggcctatcacgaatgcatggaggggaggaagaaagcgatgaaggtgctcaagggcatgatgcaggagaggatggcggatccggagaggaagtgcgaggacttcttcgaccacgtgatccaggaactgaggagggagaagccgcttctgacggagaccatcgcgctggacctcatgttcgtgctcctcttcgccagcttcgagaccacggcgctcgccctcaccctcggcgtcaagctgctcaccgagaaccccagagtcgtcgacgcgctaacggaggaacacgaagcgatcgtgaggaacagggaggacccagatgccgcgatcacgtgggccgagtacaagtcgatgaccttcacagctcatgtcatcatggagatcgtcagactcgccaacatcgtgccggggattttccggaaggccttgcaagacgttgagatcaaaggctacacggttccagcgggatggggtatcatggtgtgtccgccggcggtgcacctaaaccctgacatatacgaagatccgctggcgttcaacccatggaggtggcaggacaaacctgaaatcaccggcggaacgaagcatttcatggcgttcggaggcgggcttcggttctgcgtcggaaccgatctcaccaaggtcttgatggcaacattcattcacaatcttgttacgaaatacagatggaagacagtaaaaggagggaacatagtccggacgccgggcctcggcttcccggatggctttgacatccagctcttccctaagaactgacccttttttgatgatatctcgacagtttagtggttgcagttaaacacaagattgttcctgcaaaagatcacattttaggatggaaaaccatatacttagtctagtggtaggatacacattcctagttataactacagtcatattgccgggtaccacctctcatggatccagaatgggttttttgtacttttggctgttcgttttccatgtggttagtcatctatccatgtgttgtgtgtaaatcaatcccatacatctcaaatgagaaagagagcatattaactgtgtg

SEQ ID NO: 10963 - protein, 508 aa, Triticum aestivum
  misc_feature (1)..(508): Ceres Seq. ID no. 13597547
MQPYLELASLRITATIPLSPRIYSTIFLEAMAAMAYIALRGAALAAIVALIHWVYRWRHPKCAGTLPPGSMGIPIIGETLQFFAPNPTCGLSPFVRDRVKRYGSMFKTSIVGRPVVVSADPDVNHYVFQNEGKLFESWYPDTFTEIFGRDNVGSLHGFIYKYLKTLVLRLYGQENLKAVLLAETDAACRGSLAAWAAQPCVDIKDGLSTMIFDLTAKKLIGYEPTKSSESLRENFTAFIRGLISFPLNIPGTAYHECMEGRKKAMKVLKGMMQERMADPERKCEDFFDHVIQELRREKPLLTETIALDLMFVLLFASFETTALALTLGVKLLTENPRVVDALTEEHEAIVRNREDPDAAITWAEYKSMTFTAHVIMEIVRLANIVPGIFRKALQDVEIKGYTVPAGWGIMVCPPAVHLNPDIYEDPLAFNPWRWQDKPEITGGTKHFMAFGGGLRFCVGTDLTKVLMATFIHNLVTKYRWKTVKGGNIVRTPGLGFPDGFDIQLFPKN

SEQ ID NO: 10964 - protein, 478 aa, Triticum aestivum
  misc_feature (1)..(478): Ceres Seq. ID no. 13597548
MAAMAYIALRGAALAAIVALIHWVYRWRHPKCAGTLPPGSMGIPIIGETLQFFAPNPTCGLSPFVRDRVKRYGSMFKTSIVGRPVVVSADPDVNHYVFQNEGKLFESWYPDTFTEIFGRDNVGSLHGFIYKYLKTLVLRLYGQENLKAVLLAETDAACRGSLAAWAAQPCVDIKDGLSTMIFDLTAKKLIGYEPTKSSESLRENFTAFIRGLISFPLNIPGTAYHECMEGRKKAMKVLKGMMQERMADPERKCEDFFDHVIQELRREKPLLTETIALDLMFVLLFASFETTALALTLGVKLLTENPRVVDALTEEHEAIVRNREDPDAAITWAEYKSMTFTAHVIMEIVRLANIVPGIFRKALQDVEIKGYTVPAGWGIMVCPPAVHLNPDIYEDPLAFNPWRWQDKPEITGGTKHFMAFGGGLRFCVGTDLTKVLMATFIHNLVTKYRWKTVKGGNIVRTPGLGFPDGFDIQLFPKN

SEQ ID NO: 10965 - protein, 475 aa, Triticum aestivum
  misc_feature (1)..(475): Ceres Seq. ID no. 13597549
MAYIALRGAALAAIVALIHWVYRWRHPKCAGTLPPGSMGIPIIGETLQFFAPNPTCGLSPFVRDRVKRYGSMFKTSIVGRPVVVSADPDVNHYVFQNEGKLFESWYPDTFTEIFGRDNVGSLHGFIYKYLKTLVLRLYGQENLKAVLLAETDAACRGSLAAWAAQPCVDIKDGLSTMIFDLTAKKLIGYEPTKSSESLRENFTAFIRGLISFPLNIPGTAYHECMEGRKKAMKVLKGMMQERMADPERKCEDFFDHVIQELRREKPLLTETIALDLMFVLLFASFETTALALTLGVKLLTENPRVVDALTEEHEAIVRNREDPDAAITWAEYKSMTFTAHVIMEIVRLANIVPGIFRKALQDVEIKGYTVPAGWGIMVCPPAVHLNPDIYEDPLAFNPWRWQDKPEITGGTKHFMAFGGGLRFCVGTDLTKVLMATFIHNLVTKYRWKTVKGGNIVRTPGLGFPDGFDIQLFPKN

SEQ ID NO: 10966 - DNA, 1228 bp, Triticum aestivum
  misc_feature (1)..(1228): Ceres Seq. ID no. 13597550
acacagccacaagatcgacacaatatagtacgtcgtctgcagttacacgcacgaaaggaacgtacgtcgtagatcggtcgaagaggcttgttgagatggagatgccgagggtctctgaggaaactgtggccgccgtcgtgcccatcgccgtgtactgggcatacgccggcgtgcacacggcgctggggcagtcgcggctcatggacaagtacaggctcaacaccaaggacgaggaggaccgcaagaacatggtgtccaagcgcgccgtcatcctcaacgtcctcatgcagcacctcatgcagctcgccgccctcgccgtgctcgccatggttacaggaggaagaggggcgacggcgaaggccgctggcggctcaccggcggcggtgtacctgacggcggccgcccggatcgcggtggccgtgctggtgttcgacgcgtaccggtacgcgtggcaccgcctggcgcacatcaaccggttcatttaccggcacctccactcgtggcaccaccgcatcgtggtgccctacgcgttcggcgccatctacggccacccgatcgaggtcctcatcgccgacacggccggggcctcgctcgccgtcctcgtcaccggcctgtcgccgtcgtcgccgcgcgccacggccgtgttcctcaccctctgcaccgtgaaggccatcgacaaccactgcggcgtgtgcctgctgccgcgccgcctgcagtcggtctggaacggcgccgcgtaccacggcgtgcaccacatgccgcgcggcgtccggtacaacttctccgacctcttcttcgtgacgtgggaccatgtgttcgggacccacatgccctacgccgtcgaggagaggccgggcggcgatggcctcgtgctcaagcccctgccgcctcccaaggcaactaattagttaacggcatgctcgatcaggcatgcagttactacgtaccactcctagtgctaatgagtatagttatatgtagattagtcaataagcaagcaagttgcatgtgtatgtacgtgtggcttgcatgcacgcatgcagctacaaaactagaagcagccagtgagatgtgcgtgttgaagtcagcgggtagacgtgagccagtcaaactatttgctcgctgcgccgagtgccgaccatagcacgcatgtgctcagtttttttgttttgttttgagtcactctatgtattgtatattccattcaataaagtgtagaagtctgttc

SEQ ID NO: 10967 - protein, 301 aa, Triticum aestivum
  misc_feature (1)..(301): Ceres Seq. ID no. 15222128
TATRSTQYSTSSAVTRTKGTYVVDRSKRLVEMEMPRVSEETVAAVVPIAVYWAYAGVHTALGQSRLMDKYRLNTKDEEDRKNMVSKRAVILNVLMQHLMQLAALAVLAMVTGGRGATAKAAGGSPAAVYLTAAARIAVAVLVFDAYRYAWHRLAHINRFIYRHLHSWHHRIVVPYAFGAIYGHPIEVLIADTAGASLAVLVTGLSPSSPRATAVFLTLCTVKAIDNHCGVCLLPRRLQSVWNGAAYHGVHHMPRGVRYNFSDLFFVTWDHVFGTHMPYAVEERPGGDGLVLKPLPPPKATN

SEQ ID NO: 10968 - protein, 270 aa, Triticum aestivum
  misc_feature (1)..(270): Ceres Seq. ID no. 15222129
MEMPRVSEETVAAVVPIAVYWAYAGVHTALGQSRLMDKYRLNTKDEEDRKNMVSKRAVILNVLMQHLMQLAALAVLAMVTGGRGATAKAAGGSPAAVYLTAAARIAVAVLVFDAYRYAWHRLAHINRFIYRHLHSWHHRIVVPYAFGAIYGHPIEVLIADTAGASLAVLVTGLSPSSPRATAVFLTLCTVKAIDNHCGVCLLPRRLQSVWNGAAYHGVHHMPRGVRYNFSDLFFVTWDHVFGTHMPYAVEERPGGDGLVLKPLPPPKATN

SEQ ID NO: 10969 - protein, 268 aa, Triticum aestivum
  misc_feature (1)..(268): Ceres Seq. ID no. 15222130
MPRVSEETVAAVVPIAVYWAYAGVHTALGQSRLMDKYRLNTKDEEDRKNMVSKRAVILNVLMQHLMQLAALAVLAMVTGGRGATAKAAGGSPAAVYLTAAARIAVAVLVFDAYRYAWHRLAHINRFIYRHLHSWHHRIVVPYAFGAIYGHPIEVLIADTAGASLAVLVTGLSPSSPRATAVFLTLCTVKAIDNHCGVCLLPRRLQSVWNGAAYHGVHHMPRGVRYNFSDLFFVTWDHVFGTHMPYAVEERPGGDGLVLKPLPPPKATN

SEQ ID NO: 10970 - DNA, 1210 bp, Triticum aestivum
  misc_feature (1)..(1210): Ceres Seq. ID no. 13597551
ctacggccgcttagccaacgcgaggcgccgccggagacggcgatgcaggcggcggcctcttaccggggcgcggcaggccaccgccgcgccggccacccctcccggcgccctcccggtccctctcttcttctacccgtcagcgtcgctggcgtcggccgtttctccgacgcggcggttccgctccgagtcggctccctgccccttcctcgggctcgcggcggcggcgatttcgcgcggctggatgccagggacggggaggcgtggcagctgacgcgcgcgctcgggctaatccttcctggtcaccagaaaatggtgcatgctaacctgctgaaaactgctgttctttcaacaatgtcgatgctcataatgcctcttgaggcatcagcggagacatgtcaaccaactagttcttttgccaatatgccgattttcattgctgtcgctctaataggagctgctgtgggtggattattagcacggcaaagaaaggacgaactgaagcgattgaataatcaacttcgtcagattaatactgcccttagaaggcaggcacagattgaatcgtttgcccccggccttacttatgcgcctgtagggagagcaggagaaattgaggtcattgttgatcccaggaagcagcagttggtggtaaatttgaaaaatgggaagaattatatgaggaatcaggaccttgataaggcagtaatggagttcaagacagctctggagcttgcagaaagcataggggatcgctttgaggagaagaaagctgcgcgaggattaggcgcatcactacaaaggttgggacagtacagagaagcaatgagctggtactacaaggttctggcgctatcaaaggagaccggcgaggattctggctgcaccgaggcctacggcgcgatagccgactgctgcgtcgatctcggcgacttggaaggagcagcgaagctgtatgacgagtacatatcaaggctgcagccccgtgattgagcgctcggaccgttgttggagatcaaacacatcatatgccagagcccgtccgttgccctgcttctgatgtcgcggttgcttgcttgctatctggcggaaaacgagccgattttgcttgtcttttaacttggttggagcacttggattgtccatgaggagcccctctctacttgtgtatatgaatttcgatggtgctatggcatgtgctggttcagagttc

SEQ ID NO: 10971 - protein, 329 aa, Triticum aestivum
  misc_feature (1)..(329): Ceres Seq. ID no. 13597552
LRPLSQREAPPETAMQAAASYRGAAGHRRAGHPSRRPPGPSLLLPVSVAGVGRFSDAAVPLRVGSLPLPRARGGGDFARLDARDGEAWQLTRALGLILPGHQKMVHANLLKTAVLSTMSMLIMPLEASAETCQPTSSFANMPIFIAVALIGAAVGGLLARQRKDELKRLNNQLRQINTALRRQAQIESFAPGLTYAPVGRAGEIEVIVDPRKQQLVVNLKNGKNYMRNQDLDKAVMEFKTALELAESIGDRFEEKKAARGLGASLQRLGQYREAMSWYYKVLALSKETGEDSGCTEAYGAIADCCVDLGDLEGAAKLYDEYISRLQPRD

SEQ ID NO: 10972 - protein, 315 aa, Triticum aestivum
  misc_feature (1)..(315): Ceres Seq. ID no. 13597553
MQAAASYRGAAGHRRAGHPSRRPPGPSLLLPVSVAGVGRFSDAAVPLRVGSLPLPRARGGGDFARLDARDGEAWQLTRALGLILPGHQKMVHANLLKTAVLSTMSMLIMPLEASAETCQPTSSFANMPIFIAVALIGAAVGGLLARQRKDELKRLNNQLRQINTALRRQAQIESFAPGLTYAPVGRAGEIEVIVDPRKQQLVVNLKNGKNYMRNQDLDKAVMEFKTALELAESIGDRFEEKKAARGLGASLQRLGQYREAMSWYYKVLALSKETGEDSGCTEAYGAIADCCVDLGDLEGAAKLYDEYISRLQPRD

SEQ ID NO: 10973 - protein, 226 aa, Triticum aestivum
  misc_feature (1)..(226): Ceres Seq. ID no. 13597554
MVHANLLKTAVLSTMSMLIMPLEASAETCQPTSSFANMPIFIAVALIGAAVGGLLARQRKDELKRLNNQLRQINTALRRQAQIESFAPGLTYAPVGRAGEIEVIVDPRKQQLVVNLKNGKNYMRNQDLDKAVMEFKTALELAESIGDRFEEKKAARGLGASLQRLGQYREAMSWYYKVLALSKETGEDSGCTEAYGAIADCCVDLGDLEGAAKLYDEYISRLQPRD

SEQ ID NO: 10974 - DNA, 549 bp, Triticum aestivum
  misc_feature (1)..(549): Ceres Seq. ID no. 13597555
agagctccgtccccccgcgtcgccgcttagcgtacgcaccaccgcaccggcagcaggcgaggggcggccggcgacctactttggagcgcagacggaaggtttctacattttccatggcgcttgtggtgatgtgcgggcagccgtgcagcggcaagtcagaggctgcagcttgtctcgctgccgctcttcgctcctccgtgcttgacgttactgtccgcgtcattgacgagtcatcgctccatcttggacgcgatgaaagctacaaagatatggttgtggagaaaaacttaagaggagttttgagatcagaagttgataggtccgtgtcacgggatggcataatcatcgtggattctctgaacaatattaaggggtaccgatacgagctgtggtgtcttgcgcgtgcttcgggaataagatattgtgtgttcttttgtgatacagaagtggaccattgtagggattggaacgtcaagcgtcaggagaaaggagaaccctcatatgatagcaatatatttgaagatctggcaaggagatttgagaggcctg

SEQ ID NO: 10975 - protein, 182 aa, Triticum aestivum
  misc_feature (1)..(182): Ceres Seq. ID no. 13597556
SSVPPRRRLAYAPPHRQQARGGRRPTLERRRKVSTFSMALVVMCGQPCSGKSEAAACLAAALRSSVLDVTVRVIDESSLHLGRDESYKDMVVEKNLRGVLRSEVDRSVSRDGIIIVDSLNNIKGYRYELWCLARASGIRYCVFFCDTEVDHCRDWNVKRQEKGEPSYDSNIFEDLARRFERP

SEQ ID NO: 10976 - protein, 145 aa, Triticum aestivum
  misc_feature (1)..(145): Ceres Seq. ID no. 13597557
MALVVMCGQPCSGKSEAAACLAAALRSSVLDVTVRVIDESSLHLGRDESYKDMVVEKNLRGVLRSEVDRSVSRDGIIIVDSLNNIKGYRYELWCLARASGIRYCVFFCDTEVDHCRDWNVKRQEKGEPSYDSNIFEDLARRFERP

SEQ ID NO: 10977 - protein, 140 aa, Triticum aestivum
  misc_feature (1)..(140): Ceres Seq. ID no. 13597558
MCGQPCSGKSEAAACLAAALRSSVLDVTVRVIDESSLHLGRDESYKDMVVEKNLRGVLRSEVDRSVSRDGIIIVDSLNNIKGYRYELWCLARASGIRYCVFFCDTEVDHCRDWNVKRQEKGEPSYDSNIFEDLARRFERP

SEQ ID NO: 10978 - DNA, 1479 bp, Triticum aestivum
  misc_feature (1)..(1479): Ceres Seq. ID no. 13597559
acacagcccactcgcagcagcagtgccactaccagcgcacaccaatccagctgattttgagcacgagcagctcttgcccaacagccaccgtcgtcggctactgtcatccatggccatgaggaacgcgacgcagcaggtggtccgggccttggagccgtccctcaccaggagccttcatgcgtccccggacagcaagaagatcgtgggcgtgttctacaagggcggcgagtacgcggggcagaaccccaacttcgtggggtgtgtggagaacgcgctgggcatccgtagctggctcgagtcgcagggccaccagtacatcgtcaccgacgacaaggacggccccaactgcgagctagagaagcacatcgcggacgcgcacgtgctcatcaccacgccgttccacccggcgtacgtgagcgcggaccggatcaggcgcggcaagaacctggagctgctcctcacggcggggatcggctccgaccacatcgagctgtcggcggcggcggccgcggggctgaccgtcgccgaggtcacgggcagcaacaccgtgtcggtggcggaggaccagctgatgcgcatcctggtcctcatgcgcaacttcctgccgggccaccaccaagccatcaacggggagtgggacctcgccggcatcgcgcaccgggcctacgacctggagggcaagacggtgggcaccgtcggcgccggccgcatcgggaagctgctgctccagcgcctcaagccattcggctgcaacctgctctaccacgacaagctccgcgtcgacgccgcgctggagaaggagctcggcgccgccttcgaggaggacctcgacgccatgctgcccaagtgcgacgtcgtcgtgctcaacatgccgctcaccgagaagacaaagggcatgttcaacaaggagaagatcgccaagatgaagaaaggcgtcatcatcgtgaacaacgctcgtggagcgatcatggatacgcaggcagtggcagacgcttgcaagagtaggcacatcgctggatacggcggcgacgtgtggtacccgcagccggcgcccaaggagcacccgtggaggtacatgcccaacaacgcaatgaccccgcacatctccggcaccaccattgacggccagctgaggtacgcggccggtgtgaaggacatgctggagaggtacttcaagggacaggacttcccggagcccaactacattgtcaaggaaggcaagctcgccagccagtaccagtgagcgtccatccatggagccgcagctgcacgcctgcatcagcatgccggttaccagaaactaaataaaagatgcttggccgttgcaatggccatcacccataaatatatctatacctaaataaaatggaacaaaaactggttgctttaatttgctatcagcttcctttgctgtatttttctcgtacactgtccttcgctgtatttcgtttgaactataataaagtcaaagtgttgtcc

SEQ ID NO: 10979 - protein, 413 aa, Triticum aestivum
  misc_feature (1)..(413): Ceres Seq. ID no. 13597560
HSPLAAAVPLPAHTNPADFEHEQLLPNSHRRRLLSSMAMRNATQQVVRALEPSLTRSLHASPDSKKIVGVFYKGGEYAGQNPNFVGCVENALGIRSWLESQGHQYIVTDDKDGPNCELEKHIADAHVLITTPFHPAYVSADRIRRGKNLELLLTAGIGSDHIELSAAAAAGLTVAEVTGSNTVSVAEDQLMRILVLMRNFLPGHHQAINGEWDLAGIAHRAYDLEGKTVGTVGAGRIGKLLLQRLKPFGCNLLYHDKLRVDAALEKELGAAFEEDLDAMLPKCDVVVLNMPLTEKTKGMFNKEKIAKMKKGVIIVNNARGAIMDTQAVADACKSRHIAGYGGDVWYPQPAPKEHPWRYMPNNAMTPHISGTTIDGQLRYAAGVKDMLERYFKGQDFPEPNYIVKEGKLASQYQ

SEQ ID NO: 10980 - protein, 377 aa, Triticum aestivum
  misc_feature (1)..(377): Ceres Seq. ID no. 13597561
MAMRNATQQVVRALEPSLTRSLHASPDSKKIVGVFYKGGEYAGQNPNFVGCVENALGIRSWLESQGHQYIVTDDKDGPNCELEKHIADAHVLITTPFHPAYVSADRIRRGKNLELLLTAGIGSDHIELSAAAAAGLTVAEVTGSNTVSVAEDQLMRILVLMRNFLPGHHQAINGEWDLAGIAHRAYDLEGKTVGTVGAGRIGKLLLQRLKPFGCNLLYHDKLRVDAALEKELGAAFEEDLDAMLPKCDVVVLNMPLTEKTKGMFNKEKIAKMKKGVIIVNNARGAIMDTQAVADACKSRHIAGYGGDVWYPQPAPKEHPWRYMPNNAMTPHISGTTIDGQLRYAAGVKDMLERYFKGQDFPEPNYIVKEGKLASQYQ

SEQ ID NO: 10981 - protein, 375 aa, Triticum aestivum
  misc_feature (1)..(375): Ceres Seq. ID no. 13597562
MRNATQQVVRALEPSLTRSLHASPDSKKIVGVFYKGGEYAGQNPNFVGCVENALGIRSWLESQGHQYIVTDDKDGPNCELEKHIADAHVLITTPFHPAYVSADRIRRGKNLELLLTAGIGSDHIELSAAAAAGLTVAEVTGSNTVSVAEDQLMRILVLMRNFLPGHHQAINGEWDLAGIAHRAYDLEGKTVGTVGAGRIGKLLLQRLKPFGCNLLYHDKLRVDAALEKELGAAFEEDLDAMLPKCDVVVLNMPLTEKTKGMFNKEKIAKMKKGVIIVNNARGAIMDTQAVADACKSRHIAGYGGDVWYPQPAPKEHPWRYMPNNAMTPHISGTTIDGQLRYAAGVKDMLERYFKGQDFPEPNYIVKEGKLASQYQ

SEQ ID NO: 10982 - DNA, 1572 bp, Triticum aestivum
  misc_feature (1)..(1572): Ceres Seq. ID no. 13597574
atcaatcacttgccatcctaccaccttgtgacattccaaacacaaacctacactccacaacccgcaccacatatcaacaacgaaagttcttgttgccgacatggacggcgtcacagccaacaccaccacgatcagtccccggaagctgcgggtgatgctctactcgtccccactcatggggcacctcgtccccatgatagagctcgccaagctcttcgccgctcgtgggctagccatcacggtagtcctcatggacccgccgtatgataccggcgccacgggccccttcctcagcggtgtctccgcggccaacccctccatttctttccatcgtctgccacaggtcaagctcccagagtctgacgactccgtgatgccagccttagcgttcgcccgtctctccaacccacacctacattacttcctcgccggcgcatctccggacttcctcgtggtggacttcttctgcagtgccgccatggacgtagccgcggagctcggcatccccgcctacttcttctccacctccggcgcccagatcctggctttctttatgcacctcacggttctgcatgggaaaagcacgaggagcttccgggaaatgggcgaagaactcgtgcacgtaccggggatcaccccgtttccggcgacgcactccatccagccactcatggatcgtgacggtgcgtcctaccaggcattactaaatgtgagcctcaacctattccgatcacagggcatcttcatcaacaccttccgctcgctggaacctcgtgccatggacaccatcctcgcggggcactccgccccagctggcctctcgacgcccccagtctactgcattgggccgctagtcaagtcagaggaggtgggcgtgaagcgtggagacgagtgcctcgcgtggttggacacgcaacccaaggccagtgtggtgttcctgtgctttggcagcctcggccggttcaacgccgaacaaaccagggaagtggcaaccgtgctggaggctagtggacaaaggttcctctgggttgtgcggagcccgccgagcgacgacacgactacagagccggacttggatgtgctgctttcgaagggtttcctggaccggaccaagggcaggggcctcgtcgtgaagtcatgggcaccacaaggtgatgttctagcacatcatgccgtgggaagttttgtgacacactgcgggtggaactcggtgctcgagtctactatggcaggtgtgcctatgctggcctggccattgtacgcggagcaaaagatgaatgcggtgttcctcgagaaagagatggagttggctgtcatgatggaagggtacgataaggagatggtggaggcaaaggagattgccaaaaagatcaggtggatgatggattcggaaggcgggagggtgctccgagagcggactctagcggtgatgtggcaggccaatgaggctctactcgagggtggagaatcagaggcaacattgacagagcttgttgatgtgtgggttaaagcttgacatgtgcaacatcatttatgaatgatcatggaaataaagagtgagcattgggtctt

SEQ ID NO: 10983 - protein, 471 aa, Triticum aestivum
  misc_feature (1)..(471): Ceres Seq. ID no. 15222131
MDGVTANTTTISPRKLRVMLYSSPLMGHLVPMIELAKLFAARGLAITVVLMDPPYDTGATGPFLSGVSAANPSISFHRLPQVKLPESDDSVMPALAFARLSNPHLHYFLAGASPDFLVVDFFCSAAMDVAAELGIPAYFFSTSGAQILAFFMHLTVLHGKSTRSFREMGEELVHVPGITPFPATHSIQPLMDRDGASYQALLNVSLNLFRSQGIFINTFRSLEPRAMDTILAGHSAPAGLSTPPVYCIGPLVKSEEVGVKRGDECLAWLDTQPKASVVFLCFGSLGRFNAEQTREVATVLEASGQRFLWVVRSPPSDDTTTEPDLDVLLSKGFLDRTKGRGLVVKSWAPQGDVLAHHAVGSFVTHCGWNSVLESTMAGVPMLAWPLYAEQKMNAVFLEKEMELAVMMEGYDKEMVEAKEIAKKIRWMMDSEGGRVLRERTLAVMWQANEALLEGGESEATLTELVDVWVKA

SEQ ID NO: 10984 - protein, 453 aa, Triticum aestivum
  misc_feature (1)..(453): Ceres Seq. ID no. 15222132
MLYSSPLMGHLVPMIELAKLFAARGLAITVVLMDPPYDTGATGPFLSGVSAANPSISFHRLPQVKLPESDDSVMPALAFARLSNPHLHYFLAGASPDFLVVDFFCSAAMDVAAELGIPAYFFSTSGAQILAFFMHLTVLHGKSTRSFREMGEELVHVPGITPFPATHSIQPLMDRDGASYQALLNVSLNLFRSQGIFINTFRSLEPRAMDTILAGHSAPAGLSTPPVYCIGPLVKSEEVGVKRGDECLAWLDTQPKASVVFLCFGSLGRFNAEQTREVATVLEASGQRFLWVVRSPPSDDTTTEPDLDVLLSKGFLDRTKGRGLVVKSWAPQGDVLAHHAVGSFVTHCGWNSVLESTMAGVPMLAWPLYAEQKMNAVFLEKEMELAVMMEGYDKEMVEAKEIAKKIRWMMDSEGGRVLRERTLAVMWQANEALLEGGESEATLTELVDVWVKA

SEQ ID NO: 10985 - protein, 446 aa, Triticum aestivum
  misc_feature (1)..(446): Ceres Seq. ID no. 15222133
MGHLVPMIELAKLFAARGLAITVVLMDPPYDTGATGPFLSGVSAANPSISFHRLPQVKLPESDDSVMPALAFARLSNPHLHYFLAGASPDFLVVDFFCSAAMDVAAELGIPAYFFSTSGAQILAFFMHLTVLHGKSTRSFREMGEELVHVPGITPFPATHSIQPLMDRDGASYQALLNVSLNLFRSQGIFINTFRSLEPRAMDTILAGHSAPAGLSTPPVYCIGPLVKSEEVGVKRGDECLAWLDTQPKASVVFLCFGSLGRFNAEQTREVATVLEASGQRFLWVVRSPPSDDTTTEPDLDVLLSKGFLDRTKGRGLVVKSWAPQGDVLAHHAVGSFVTHCGWNSVLESTMAGVPMLAWPLYAEQKMNAVFLEKEMELAVMMEGYDKEMVEAKEIAKKIRWMMDSEGGRVLRERTLAVMWQANEALLEGGESEATLTELVDVWVKA

SEQ ID NO: 10986 - DNA, 1547 bp, Triticum aestivum
  misc_feature (1)..(1547): Ceres Seq. ID no. 13597580
atcgaaaaatcgatgcaattcgggaaaaaaaggaaaacgtgggaactggaatatccccacttctccgcggaaccccccaccatttctcctctctgctctcaagctcgctcgcaccaatggccggctcccggctcgtccatctcttccttctcatcctcttcttcccctccctccgcgccgcccccaacaccaccgccgtggtgtccaggatcgcatttggctcctgcgccaaccagagcgcgccccagcccgtgtgggaggccatcgtggggttcgacccgcaggtcttcatctggctcggggacaacgtctacggggacaacaagcgcccgttccgggtgttcgggagggagcgcacggtggggccctggaggaacgtgccgcgcttctacccggcgaccgaggaggagctgcgccggaagtacgagctggccaaggctaacccggggtacgccaagctgagggagagggctagggtcattggaacatgggatgaccatgattatggagtgaatgatgcaggaaaggaatatagtgggaaagtgttatcccaaaggcttctattagatttcctggatgaagacgaagacagtccacggaggaaacaagcaggtgtttatgcctcatacatgtttggccccgaaggaaaacgtgtaaaggtaataatgttggacaccagatatcacagagacccactcttaagtgatggaactatacttggagatcctcagtggcagtggctggagagggagctacgtggtcctcagtcagagatgaccatcattggatcttcaattcaggtggtgtccaatctttctgccaccactcgacctttgttctatgtggagtcttgggcatgctttccgagggaaagagaacggctgtttagactgatcgatagcacaatatttcaatctgttatgagacttctggcttggctgacaccaacccccatgcgagtcttcagccctaactgccgtcacaaatcatgctcatatggtcagccaaattttggagcaatcgaaatagattggaatgcagtaactccacgggttaaaattgaactaagagatttacagggcaattctgttgatggtgtggagttccctatatctgagctgaagccatcaantgcacatgcaaacaaaaaagaagggcattcttttgaagcacattgtagtctcgaaacagagcttccatggctgctacggtaccgccttgcgatgctattctttggcaccattgccgtttttgtcgttgctttggtgcttgtcggaatcgcttgctgttcagctactaaaatgtttactaggaagtgcaagatggcatagctacacatgacagtggacaagagcagagacttttcgatctgactagtgttggacactgaccaggtgagcagggatgttgattggccaaggatcaacatgacacttacttgattgtgaatatggcacgctgtgagcacatactggaaagtgtaacgaagctgtgacgagtcttcatataggtggagaaatgatgccatggaaatccgtttggttggc

SEQ ID NO: 10987 - protein, 442 aa, Triticum aestivum
  misc_feature (1)..(442): Ceres Seq. ID no. 15222137
  misc_feature (377)..(377): Xaa is any aa, unknown or other
RKIDAIREKKENVGTGISPLLRGTPHHFSSLLSSSLAPMAGSRLVHLFLLILFFPSLRAAPNTTAVVSRIAFGSCANQSAPQPVWEAIVGFDPQVFIWLGDNVYGDNKRPFRVFGRERTVGPWRNVPRFYPATEEELRRKYELAKANPGYAKLRERARVIGTWDDHDYGVNDAGKEYSGKVLSQRLLLDFLDEDEDSPRRKQAGVYASYMFGPEGKRVKVIMLDTRYHRDPLLSDGTILGDPQWQWLERELRGPQSEMTIIGSSIQVVSNLSATTRPLFYVESWACFPRERERLFRLIDSTIFQSVMRLLAWLTPTPMRVFSPNCRHKSCSYGQPNFGAIEIDWNAVTPRVKIELRDLQGNSVDGVEFPISELKPSXAHANKKEGHSFEAHCSLETELPWLLRYRLAMLFFGTIAVFVVALVLVGIACCSATKMFTRKCKMA

SEQ ID NO: 10988 - protein, 404 aa, Triticum aestivum
  misc_feature (1)..(404): Ceres Seq. ID no. 15222138
  misc_feature (339)..(339): Xaa is any aa, unknown or other
MAGSRLVHLFLLILFFPSLRAAPNTTAVVSRIAFGSCANQSAPQPVWEAIVGFDPQVFIWLGDNVYGDNKRPFRVFGRERTVGPWRNVPRFYPATEEELRRKYELAKANPGYAKLRERARVIGTWDDHDYGVNDAGKEYSGKVLSQRLLLDFLDEDEDSPRRKQAGVYASYMFGPEGKRVKVIMLDTRYHRDPLLSDGTILGDPQWQWLERELRGPQSEMTIIGSSIQVVSNLSATTRPLFYVESWACFPRERERLFRLIDSTIFQSVMRLLAWLTPTPMRVFSPNCRHKSCSYGQPNFGAIEIDWNAVTPRVKIELRDLQGNSVDGVEFPISELKPSXAHANKKEGHSFEAHCSLETELPWLLRYRLAMLFFGTIAVFVVALVLVGIACCSATKMFTRKCKMA

SEQ ID NO: 10989 - protein, 233 aa, Triticum aestivum
  misc_feature (1)..(233): Ceres Seq. ID no. 15222139
  misc_feature (168)..(168): Xaa is any aa, unknown or other
MFGPEGKRVKVIMLDTRYHRDPLLSDGTILGDPQWQWLERELRGPQSEMTIIGSSIQVVSNLSATTRPLFYVESWACFPRERERLFRLIDSTIFQSVMRLLAWLTPTPMRVFSPNCRHKSCSYGQPNFGAIEIDWNAVTPRVKIELRDLQGNSVDGVEFPISELKPSXAHANKKEGHSFEAHCSLETELPWLLRYRLAMLFFGTIAVFVVALVLVGIACCSATKMFTRKCKMA

SEQ ID NO: 10990 - DNA, 1075 bp, Triticum aestivum
  misc_feature (1)..(1075): Ceres Seq. ID no. 13597604
gaaaagctttaaaagggacgggcaggcgactcaccccaccctctccctccccagcccaaaaaatttcctcgcccctccccgaagaatcccaccaccacaaccactgccacgaagaaccaatccgccccctcgcctcccccagggccgccggttcccccccgagaagggtaaatgggatcagaagggccttcaatcgtgactgtacatgttactggatttaagaagttccatggtgttgctgagaacccgacagagaaacttgtgaccaacattaaatcgttcattgaaaagagagggttgccgaaaaatcttgtacttggaagctgcgaaattctcgaaacagccgggcagggggcgcttggaacattatataaagttctagaatctgccattgcagatagagagaacgggtcatcagctcaggggcaaataatttgggtccactttggggtaaatagtggtgcatcacggtttgctcttgagaatcaagctgtgaatgaagccaccttccgctgcccagatgagcttgggtggaaacctcagagagtgcctattgtgccatctgatggaagcatctcacggacaagagagactacactgccagtgaaggagttaaccaagtcactccgaaagacaggctacgatgtgatgccttcggatgacgcggggagattcgtgtgcaactatgtgtactaccactccctccggtttgcagagcagcacggcatcaagtctctgtttgtgcatgtgcccctcttctcgacagtcgacgaggaggtccagatccatttcgtcgcttccctcgtcgaagctcttgctagcttgaactaggaacggcaacttaaaaggtcagcggtttgacctggacgatgtaaagttggacgcagactgaataagattgtgtggtgattggcgcctattggtcagatcttgctccaaaaagggtgtatttaaggggagagaaaaagaaaaacgatgcttagagtgtgtgtgaaatgccggcttgcatgccatcagttacatgtccttaacttgcatgaaaacctggttccaataaaattgacagatcattggg

SEQ ID NO: 10991 - protein, 219 aa, Triticum aestivum
  misc_feature (1)..(219): Ceres Seq. ID no. 15222146
MGSEGPSIVTVHVTGFKKFHGVAENPTEKLVTNIKSFIEKRGLPKNLVLGSCEILETAGQGALGTLYKVLESAIADRENGSSAQGQIIWVHFGVNSGASRFALENQAVNEATFRCPDELGWKPQRVPIVPSDGSISRTRETTLPVKELTKSLRKTGYDVMPSDDAGRFVCNYVYYHSLRFAEQHGIKSLFVHVPLFSTVDEEVQIHFVASLVEALASLN

SEQ ID NO: 10992 - DNA, 961 bp, Triticum aestivum
  misc_feature (1)..(961): Ceres Seq. ID no. 13597620
ccacgcagcacctcctctcctcgccccccgagatcggaatcggcgcccccctccctccgccgccgccgccgccgccgccatgtcgccgtctctgctcggggggctcaccaagtcgctggccatgaccgtgctctccgaggtcggcgacaagaccttcttcgccgccgcgattctggccatgcgccatccccggaagctcgtccttgctggctgtctatcggcgttaacagtgatgaccgctttatctgcttctctcggctgggctgcaccaaatctgatatcacgtaaatggactcatcatatcaccactctgctgttctttgtgtttggcatctggtcattgtgggaaggcttcaaagaagaaggagagtcagaagatctggctgaattggaagcaaagctggatgcggactttaagactaacaaaggggaatcgaaaaataaatcaaaggcaactgaagatacaaagaaaaagcaaaggccatttctcatgcagttcttctcgccaatttttataaaggcattttccatcactttctttggtgagtggggtgacaagagccagattgctacaattggcttggctgctgatgaaaacccattcggtgtcgtcatcgggggagtcatagctcaagcactctgcactaccgctgccgtgatgggagggaagagcctggcctctcagatatccgagaagatggttgaattgtcgagcggggtgctattcctgttgtttggcataatgtccttgttgtcagggccagaagggcaattgtaatttccccaggaacttcggcaggactctgccagactcctggagtagttaccaagcttaccttatttgatgggtgatggcgacgaaagccggccgtccttcaccaactggatggcgattcattagtttagtcaacacatcattgtaacacttggcttgccactcataaataacttgatgttactg

SEQ ID NO: 10993 - protein, 258 aa, Triticum aestivum
  misc_feature (1)..(258): Ceres Seq. ID no. 13597621
HAAPPLLAPRDRNRRPPPSAAAAAAAMSPSLLGGLTKSLAMTVLSEVGDKTFFAAAILAMRHPRKLVLAGCLSALTVMTALSASLGWAAPNLISRKWTHHITTLLFFVFGIWSLWEGFKEEGESEDLAELEAKLDADFKTNKGESKNKSKATEDTKKKQRPFLMQFFSPIFIKAFSITFFGEWGDKSQIATIGLAADENPFGVVIGGVIAQALCTTAAVMGGKSLASQISEKMVELSSGVLFLLFGIMSLLSGPEGQL

SEQ ID NO: 10994 - protein, 232 aa, Triticum aestivum
  misc_feature (1)..(232): Ceres Seq. ID no. 13597622
MSPSLLGGLTKSLAMTVLSEVGDKTFFAAAILAMRHPRKLVLAGCLSALTVMTALSASLGWAAPNLISRKWTHHITTLLFFVFGIWSLWEGFKEEGESEDLAELEAKLDADFKTNKGESKNKSKATEDTKKKQRPFLMQFFSPIFIKAFSITFFGEWGDKSQIATIGLAADENPFGVVIGGVIAQALCTTAAVMGGKSLASQISEKMVELSSGVLFLLFGIMSLLSGPEGQL

SEQ ID NO: 10995 - protein, 218 aa, Triticum aestivum
  misc_feature (1)..(218): Ceres Seq. ID no. 13597623
MTVLSEVGDKTFFAAAILAMRHPRKLVLAGCLSALTVMTALSASLGWAAPNLISRKWTHHITTLLFFVFGIWSLWEGFKEEGESEDLAELEAKLDADFKTNKGESKNKSKATEDTKKKQRPFLMQFFSPIFIKAFSITFFGEWGDKSQIATIGLAADENPFGVVIGGVIAQALCTTAAVMGGKSLASQISEKMVELSSGVLFLLFGIMSLLSGPEGQL

SEQ ID NO: 10996 - DNA, 1619 bp, Triticum aestivum
  misc_feature (1)..(1619): Ceres Seq. ID no. 13597624
agcgaaaagccgggctccaaaatccccaatctgctccaggtggtcaaaccattccaccattccccggcgcaccaccatggcagcatccccgccggcgatcctggacgagctcttcgaagagatcctcctccgcctcccgcccgacgacccagcctgcctcctccgcgcctccctcgtctgcaaggcctggggttgcgccgtctcccgcccccacttccgccgccgcctccacgagctccaccgggcgcccccggtgctcggcctcctgcacgacctggaagacgagcgcatcccacgattcatccccaccaccgcgtcgtccttctccctcaccgctccgcacaaccggtactggcggaccctcgactgccgccacggccgcgccctcttcctctccaacccccagtccccggaaacccaggagcttctcgtgtgggagccaatcacgggtgcccagcagcgcataccggtgcccgcggcgctcgagagcaacttccccatggcggccgtgttctgcgcagcggacgggtgcgaccaccgcgcctgcctcgggggccctttccgcgtgctcttcatcctctcggtcgtggtaggccaagtcactgacgacgactgctatctcacgtcggcgtgcgcatattcgtcggagactggcacctggggcgagccgacctcgttgccccgccgctcgcccatgcccatgtgctttacattttattccagtgtgctcgttggaaagtctctgctctatttcatgtctgatgatgcgttcattctcgagtgtgacttggcaaggcacagactggctgtgttcaacccaccaaaccatgagccggtctgcggccaatataccatcatgctggcggaggacggtggactgggagtttgccaaaggatggatcagcagctcaaattgtggtcaagggaggtgagtgacagtgttgaagcacgatgggtgctgagccgggtcgtctacctggaaaatttgctcccggttggtgctctcgtggatgcagagactagagtgcaagtgctgggctttgccgagggagcaaataccattttcctaaccacggttgatggcatcttcatgatcaaactgcaatcggagcgggcgaggagggtgtgcgatgaatccgatgatcatctcttttgttatttgattccggttgtcagcttctacactcctgtgcctcgaggtgagcacagggatccgtcgttgaagcatagtgaggatgcaggtggtgaggagaaaacagtatatcaggcacaacaattgatcaacaaaatgagtcaaatgttaccaggggggactttgtcaacgctttcgattgcatcaaccacgccatagagaacagggttccaccctattatgaagttgctcctgagtgtaccagcatggtttacggacattgatgcagcttgctataggaagaatccatgaagacttcagccagcaaagaagatgctaggaactcaaaagacctcaggtagcaatgttaatgatgctccaccttcagagaaaaggtgattctgaataatgtgttgtatataccactgatccttttgccccagaggcccagacctgtgtggctaaatactcaaaattttcattatcc

SEQ ID NO: 10997 - protein, 449 aa, Triticum aestivum
  misc_feature (1)..(449): Ceres Seq. ID no. 15222150
AKSRAPKSPICSRWSNHSTIPRRTTMAASPPAILDELFEEILLRLPPDDPACLLRASLVCKAWGCAVSRPHFRRRLHELHRAPPVLGLLHDLEDERIPRFIPTTASSFSLTAPHNRYWRTLDCRHGRALFLSNPQSPETQELLVWEPITGAQQRIPVPAALESNFPMAAVFCAADGCDHRACLGGPFRVLFILSVVVGQVTDDDCYLTSACAYSSETGTWGEPTSLPRRSPMPMCFTFYSSVLVGKSLLYFMSDDAFILECDLARHRLAVFNPPNHEPVCGQYTIMLAEDGGLGVCQRMDQQLKLWSREVSDSVEARWVLSRVVYLENLLPVGALVDAETRVQVLGFAEGANTIFLTTVDGIFMIKLQSERARRVCDESDDHLFCYLIPVVSFYTPVPRGEHRDPSLKHSEDAGGEEKTVYQAQQLINKMSQMLPGGTLSTLSIASTTP

SEQ ID NO: 10998 - protein, 424 aa, Triticum aestivum
  misc_feature (1)..(424): Ceres Seq. ID no. 15222151
MAASPPAILDELFEEILLRLPPDDPACLLRASLVCKAWGCAVSRPHFRRRLHELHRAPPVLGLLHDLEDERIPRFIPTTASSFSLTAPHNRYWRTLDCRHGRALFLSNPQSPETQELLVWEPITGAQQRIPVPAALESNFPMAAVFCAADGCDHRACLGGPFRVLFILSVVVGQVTDDDCYLTSACAYSSETGTWGEPTSLPRRSPMPMCFTFYSSVLVGKSLLYFMSDDAFILECDLARHRLAVFNPPNHEPVCGQYTIMLAEDGGLGVCQRMDQQLKLWSREVSDSVEARWVLSRVVYLENLLPVGALVDAETRVQVLGFAEGANTIFLTTVDGIFMIKLQSERARRVCDESDDHLFCYLIPVVSFYTPVPRGEHRDPSLKHSEDAGGEEKTVYQAQQLINKMSQMLPGGTLSTLSIASTTP

SEQ ID NO: 10999 - protein, 283 aa, Triticum aestivum
  misc_feature (1)..(283): Ceres Seq. ID no. 15222152
MAAVFCAADGCDHRACLGGPFRVLFILSVVVGQVTDDDCYLTSACAYSSETGTWGEPTSLPRRSPMPMCFTFYSSVLVGKSLLYFMSDDAFILECDLARHRLAVFNPPNHEPVCGQYTIMLAEDGGLGVCQRMDQQLKLWSREVSDSVEARWVLSRVVYLENLLPVGALVDAETRVQVLGFAEGANTIFLTTVDGIFMIKLQSERARRVCDESDDHLFCYLIPVVSFYTPVPRGEHRDPSLKHSEDAGGEEKTVYQAQQLINKMSQMLPGGTLSTLSIASTTP

SEQ ID NO: 11000 - DNA, 1326 bp, Triticum aestivum
  misc_feature (1)..(1326): Ceres Seq. ID no. 13597633
acatcctaatcgaaaaaaaaaaccccaagcaaaagaagcccctttcctcctccgccgccgccgccgcttctgccgccatggccgacgagctggacgagctcatcgagttcctctccaacggctcccctcaggtgcgcggcgccgcggcggacatcgtgcgggggctcacgggggacagcgacgggctgcggtccctcgcggcgcgcgccgaccgcgcgctgccggcgctgctccggctgctcgcatccgtgggggccggctgcgcgggcgaggcggcggctgactcgctcgtcaacctcagccaggacggcgaccttgccgcgcgcctcgtggtgctcggagccgtcgcggccgccatggacgtgatggtcaagcgcggcggcgagcagcccaagctcgcgcgcagccttgtcatgctgctcgtcaacctcacccaggtcgagtccggcatctcggccctcctccaggttggtgatgaaaaggtgcaagggttgtatgttgcaaagcttgtgcgctcattctgcaggtcatcctgtgactctgaagatgaagatatatttgaacacattgcctctatacttgtgaatatctcaaaggtcgaagctggacggagaatactgatggaacctaagagaggtcttctaaagcagattataggacaatttgattcaacaaatcaacttagaaagaaaggggttgctggcaccatccgtaactgttgctttgaagctgatacccagatacaaaatttgctttctatagcagaatatctttggccagctctacttttgccagtagctggaaagaagatctatagcgaagaagatagatcgaaaatgcctcccgagcttgcaaatgcactttctcatgaacgggaagctgttgatgattccgagattcgtgaacgggcactagaggctatttatatgatcgtgatgcaggatgatggacgaaaggccttttggtcagtcaatgggccacggatactgcaggttggttatgaagacgaagaggacttgaaagtgatgggcgcatatgagttgattggttctttgcttgtcggcaagggtgaaattgaacaagatcaagagcaaggagaagataagcctcaatgatgggctcaactatgtacaatttgtaatctgtcttatctacttgctgcaagaaaatagggctgcatcgcttccaatcttaagaatgtcctgtcgtattgatccaaatttcttgcaataactggcttgttctacctcctggtttcagtttgttgtccacagtatttaatacaactatgtaagagcattaagaacatcgtccagtttttgcctc

SEQ ID NO: 11001 - protein, 370 aa, Triticum aestivum
  misc_feature (1)..(370): Ceres Seq. ID no. 13597634
ILIEKKNPKQKKPLSSSAAAAASAAMADELDELIEFLSNGSPQVRGAAADIVRGLTGDSDGLRSLAARADRALPALLRLLASVGAGCAGEAAADSLVNLSQDGDLAARLVVLGAVAAAMDVMVKRGGEQPKLARSLVMLLVNLTQVESGISALLQVGDEKVQGLYVAKLVRSFCRSSCDSEDEDIFEHIASILVNISKVEAGRRILMEPKRGLLKQIIGQFDSTNQLRKKGVAGTIRNCCFEADTQIQNLLSIAEYLWPALLLPVAGKKIYSEEDRSKMPPELANALSHEREAVDDSEIRERALEAIYMIVMQDDGRKAFWSVNGPRILQVGYEDEEDLKVMGAYELIGSLLVGKGEIEQDQEQGEDKPQ

SEQ ID NO: 11002 - protein, 345 aa, Triticum aestivum
  misc_feature (1)..(345): Ceres Seq. ID no. 13597635
MADELDELIEFLSNGSPQVRGAAADIVRGLTGDSDGLRSLAARADRALPALLRLLASVGAGCAGEAAADSLVNLSQDGDLAARLVVLGAVAAAMDVMVKRGGEQPKLARSLVMLLVNLTQVESGISALLQVGDEKVQGLYVAKLVRSFCRSSCDSEDEDIFEHIASILVNISKVEAGRRILMEPKRGLLKQIIGQFDSTNQLRKKGVAGTIRNCCFEADTQIQNLLSIAEYLWPALLLPVAGKKIYSEEDRSKMPPELANALSHEREAVDDSEIRERALEAIYMIVMQDDGRKAFWSVNGPRILQVGYEDEEDLKVMGAYELIGSLLVGKGEIEQDQEQGEDKPQ

SEQ ID NO: 11003 - protein, 252 aa, Triticum aestivum
  misc_feature (1)..(252): Ceres Seq. ID no. 13597636
MDVMVKRGGEQPKLARSLVMLLVNLTQVESGISALLQVGDEKVQGLYVAKLVRSFCRSSCDSEDEDIFEHIASILVNISKVEAGRRILMEPKRGLLKQIIGQFDSTNQLRKKGVAGTIRNCCFEADTQIQNLLSIAEYLWPALLLPVAGKKIYSEEDRSKMPPELANALSHEREAVDDSEIRERALEAIYMIVMQDDGRKAFWSVNGPRILQVGYEDEEDLKVMGAYELIGSLLVGKGEIEQDQEQGEDKPQ

SEQ ID NO: 11004 - DNA, 1368 bp, Triticum aestivum
  misc_feature (1)..(1368): Ceres Seq. ID no. 13597643
aaaacctcccccgactcctaaaaccttaaaccctagctccggccactcccccatggcggccatccgggtcatcctccctcatccccacctccccatcccctcgtggagaccccagctcaagccctcctcatcctatccccgccgcgcggtcgccgccccagcttcgctgtctccgtcgcccctcacggcttccctgcaactcggagatgtgatcgaggcgcagcagttcgatcggcaggcgcttaatgagatctttgaggtggcgcgggagatggaggccgtggagcgcagctcccacgggttccggagccgcgtccttgaggggtacctcatggccacgctcttctacgagccctccacccgcacgcgcctctccttcgaggccgccatgcgccgtcttggcggggaggtgctcactaccgagaacgctcgcgagttctcgtccgctgccaagggcgagaccctagaagataccataagaaccgttgaaggttattctgatattatcgttctgagacattttgaaagtggagctgccagaagagcagcggctactgcagaaattccggttattaatgcaggtgatgggccagggcaacatcctactcaggctttgttggatgtatatacaataaagagagagattggtaggctagatggaatcaaacttggtttggttggagaccttgccaatgggagaactgttcgttctctggcctatttgatcgctaagtaccagaacattaagatatacttcgtatctccagatgttgtaaaaatgaaggatgatattaaggagtacttaacttcacaaggtgttgaatgggaagaaagttcagatttattggatgtggcatccaggtgtgatgtaatttatcaaacacgcattcaaaaagaaagattcggagagaggatcgatcactatgaggcagctcgtgggaaatatattgtggataagaaggttttaggtgtgctgccaaagcatgctgttatcatgcatccccttccaaggctggatgagatcacagtagatgttgatagtgatccaagggctgcatattttaggcaggctaagaatggcctctacataaggatggcactgctcaaacttctgcttgttggccattgacattctttttcctggtgcgtgagctttgcgatgtcaaaggatcagaaatgtagtcttaatcattggctccaagttcaactgttcggtgctgtgcaaggtataagaaaattggatccttgcaagaataaagcaatgattgtatgatacatgctccataggaattttctctgttattatgtggaacatccttttccccaggatggaatgcaatgttcgaaaagaaaattatattttacctg

SEQ ID NO: 11005 - protein, 375 aa, Triticum aestivum
  misc_feature (1)..(375): Ceres Seq. ID no. 13597644
KPPPTPKTLNPSSGHSPMAAIRVILPHPHLPIPSWRPQLKPSSSYPRRAVAAPASLSPSPLTASLQLGDVIEAQQFDRQALNEIFEVAREMEAVERSSHGFRSRVLEGYLMATLFYEPSTRTRLSFEAAMRRLGGEVLTTENAREFSSAAKGETLEDTIRTVEGYSDIIVLRHFESGAARRAAATAEIPVINAGDGPGQHPTQALLDVYTIKREIGRLDGIKLGLVGDLANGRTVRSLAYLIAKYQNIKIYFVSPDVVKMKDDIKEYLTSQGVEWEESSDLLDVASRCDVIYQTRIQKERFGERIDHYEAARGKYIVDKKVLGVLPKHAVIMHPLPRLDEITVDVDSDPRAAYFRQAKNGLYIRMALLKLLLVGH

SEQ ID NO: 11006 - protein, 358 aa, Triticum aestivum
  misc_feature (1)..(358): Ceres Seq. ID no. 13597645
MAAIRVILPHPHLPIPSWRPQLKPSSSYPRRAVAAPASLSPSPLTASLQLGDVIEAQQFDRQALNEIFEVAREMEAVERSSHGFRSRVLEGYLMATLFYEPSTRTRLSFEAAMRRLGGEVLTTENAREFSSAAKGETLEDTIRTVEGYSDIIVLRHFESGAARRAAATAEIPVINAGDGPGQHPTQALLDVYTIKREIGRLDGIKLGLVGDLANGRTVRSLAYLIAKYQNIKIYFVSPDVVKMKDDIKEYLTSQGVEWEESSDLLDVASRCDVIYQTRIQKERFGERIDHYEAARGKYIVDKKVLGVLPKHAVIMHPLPRLDEITVDVDSDPRAAYFRQAKNGLYIRMALLKLLLVGH

SEQ ID NO: 11007 - protein, 285 aa, Triticum aestivum
  misc_feature (1)..(285): Ceres Seq. ID no. 13597646
MEAVERSSHGFRSRVLEGYLMATLFYEPSTRTRLSFEAAMRRLGGEVLTTENAREFSSAAKGETLEDTIRTVEGYSDIIVLRHFESGAARRAAATAEIPVINAGDGPGQHPTQALLDVYTIKREIGRLDGIKLGLVGDLANGRTVRSLAYLIAKYQNIKIYFVSPDVVKMKDDIKEYLTSQGVEWEESSDLLDVASRCDVIYQTRIQKERFGERIDHYEAARGKYIVDKKVLGVLPKHAVIMHPLPRLDEITVDVDSDPRAAYFRQAKNGLYIRMALLKLLLVGH

SEQ ID NO: 11008 - DNA, 1621 bp, Triticum aestivum
  misc_feature (1)..(1621): Ceres Seq. ID no. 13597656
atacctctcccgtgccagccagtctcccccctccctccctccacccgccgccgccgccacccacaaaccctagaaaccctagctctcatcccctcgcccgagacagccatggcggagcacgacctgacggcgagcgtggcggcgtggatggacccccacctggtgctcccggtgctggagttcctccaggagcgcggggtctacgccgacgaggagatcctgcggggcaagatccgcctcctcggcggcaccaacatggtcgactacgccatggacatccacaagtcgctccacggcaccgacgacgtccccgccgacatggtcgcccgccgctccgaggtcgtcgagaggctccgggccctccaggaggccgtcgcgcccatagtcgccttcctctccagcccgcagctcgtgcaggagctccacgccgacaagcagtacaacctccacatgctccaggagcgccaccagatcggcccggaccagatcgaggccctctaccagtacgccaagttccagtacgagtgcgggatgtactccgacgccgccgatttcctgtcccagtaccgcgctctgtgcaccaacagcgagaggagcctgagtgccctgtgggggaagctggcggcggagatactgatgcagaactgggatgtcgcgcaggaggagctcaacaggctcaaggagatgattgattccagcagcttcacctcgtcgcctgtgaaccagctccacagcaggatatggctgatgcactggagcctcttcatcttcttcaaccatgagaatggaaggaacgggatcatcgacctcttcttccaggacaggtacctcaatgctatccagaccaacgctccccatcttctgaggtaccttgctgctgcagttgttgtcaacaagaggagaaggaacatgcttaaggaactcatcaaggtcatccagcaggagcagaacagctacaaggatcccatcattgagttcctggagtgcctgtatgtcaagtatgattttgatggcgctcagcagaagctcgtcgagtgcgagcaggttatactgaatgatcctttcctgggcaagcgcgttgaagagaggaatggcatcgctgttcctctgagagacgagttccttgaaaatgctcgcctgttcatttttgagacttactgccgtatacatcgctgcatcgatattggtgtgcttgcggagaagctgaacatgacctatgatgaagccgagttgtggataatgaacatggtcaagagttccaagctagatgccaagattgattcagtgacgggaactctcatcatgacgaccaatcgtgttgatgtccatgagcagattattgagagcatgaagaacctcaatgccaggacctacatgctagcaaagagcgtcgtggatccagggcatgcagcagcacagcaggctgctcggtgagaccaacagatgatctgcagctttgaggcggtaaaaattactttgggaactttgttgttaggcagtgacttcgttgctagtatttgaatcatattgctacagcttatgctgatgttttaaatgctttgtactccttttactcaagtttatcgtcctatgaattaatactgcaaaagacgtttaacgc

SEQ ID NO: 11009 - protein, 477 aa, Triticum aestivum
  misc_feature (1)..(477): Ceres Seq. ID no. 13597657
IPLPCQPVSPLPPSTRRRRHPQTLETLALIPSPETAMAEHDLTASVAAWMDPHLVLPVLEFLQERGVYADEEILRGKIRLLGGTNMVDYAMDIHKSLHGTDDVPADMVARRSEVVERLRALQEAVAPIVAFLSSPQLVQELHADKQYNLHMLQERHQIGPDQIEALYQYAKFQYECGMYSDAADFLSQYRALCTNSERSLSALWGKLAAEILMQNWDVAQEELNRLKEMIDSSSFTSSPVNQLHSRIWLMHWSLFIFFNHENGRNGIIDLFFQDRYLNAIQTNAPHLLRYLAAAVVVNKRRRNMLKELIKVIQQEQNSYKDPIIEFLECLYVKYDFDGAQQKLVECEQVILNDPFLGKRVEERNGIAVPLRDEFLENARLFIFETYCRIHRCIDIGVLAEKLNMTYDEAELWIMNMVKSSKLDAKIDSVTGTLIMTTNRVDVHEQIIESMKNLNARTYMLAKSVVDPGHAAAQQAAR

SEQ ID NO: 11010 - protein, 441 aa, Triticum aestivum
  misc_feature (1)..(441): Ceres Seq. ID no. 13597658
MAEHDLTASVAAWMDPHLVLPVLEFLQERGVYADEEILRGKIRLLGGTNMVDYAMDIHKSLHGTDDVPADMVARRSEVVERLRALQEAVAPIVAFLSSPQLVQELHADKQYNLHMLQERHQIGPDQIEALYQYAKFQYECGMYSDAADFLSQYRALCTNSERSLSALWGKLAAEILMQNWDVAQEELNRLKEMIDSSSFTSSPVNQLHSRIWLMHWSLFIFFNHENGRNGIIDLFFQDRYLNAIQTNAPHLLRYLAAAVVVNKRRRNMLKELIKVIQQEQNSYKDPIIEFLECLYVKYDFDGAQQKLVECEQVILNDPFLGKRVEERNGIAVPLRDEFLENARLFIFETYCRIHRCIDIGVLAEKLNMTYDEAELWIMNMVKSSKLDAKIDSVTGTLIMTTNRVDVHEQIIESMKNLNARTYMLAKSVVDPGHAAAQQAAR

SEQ ID NO: 11011 - protein, 428 aa, Triticum aestivum
  misc_feature (1)..(428): Ceres Seq. ID no. 13597659
MDPHLVLPVLEFLQERGVYADEEILRGKIRLLGGTNMVDYAMDIHKSLHGTDDVPADMVARRSEVVERLRALQEAVAPIVAFLSSPQLVQELHADKQYNLHMLQERHQIGPDQIEALYQYAKFQYECGMYSDAADFLSQYRALCTNSERSLSALWGKLAAEILMQNWDVAQEELNRLKEMIDSSSFTSSPVNQLHSRIWLMHWSLFIFFNHENGRNGIIDLFFQDRYLNAIQTNAPHLLRYLAAAVVVNKRRRNMLKELIKVIQQEQNSYKDPIIEFLECLYVKYDFDGAQQKLVECEQVILNDPFLGKRVEERNGIAVPLRDEFLENARLFIFETYCRIHRCIDIGVLAEKLNMTYDEAELWIMNMVKSSKLDAKIDSVTGTLIMTTNRVDVHEQIIESMKNLNARTYMLAKSVVDPGHAAAQQAAR

SEQ ID NO: 11012 - DNA, 1127 bp, Triticum aestivum
  misc_feature (1)..(1127): Ceres Seq. ID no. 13597660
actaatcgaaaaatcaatcactaacccctcacgcacgcaagccttttcacccattctccggcggcggccgccgccgccgccgccgccggcagccgttcgtctcgagattgacctttggtgactgttagaaaccacaggcggtggcggcaaggttcgggctccgacgcatgttctccatcgccgacttcgcgacgccgaacgcgcgcatgttctccatctcggccttcgcgccgccgagcctgcccacgcctcccccgaaggccgacccctcccccaacctcttcgtctccgggctaagcaagcgtacaacaactgatggacttagagaagcttttgcaaagtttggggaagttgaacacgctcgagttgtcacagatcgtgtcactggtttttctaaggggtttggctttgtaaggtatgttacggttgaagatgcagctaaaggaatagaaggaatggatggaaaagggagccttggcgcagtggtaaagctgctgccttgtgaccatgaggtcatgggttcaagtcctggaaacagcctcttacagaaatgtagggaaaggctgcgtactatagacccaaagtggtcggacccttccctggaccctgcgcaagcgggagctacatgcaccagtttctggatggatgggttatttttgccgaatatgctagacccagaccaccgccgcagatgggaggggcaactccgcagccacaacaatcatggggcactcctggttcctggggctcacagtagatgaagggacgatcattctatctggttgtgcgcctgacagcgtatcaaccagccatcgcagtctacatttagatcatagctaccatcgtgttgtcccaggtgtgaacacccttgcctgatccaatattcttgtcgtgttggactggtcgtttacggcctccacatggagaagcacttgtggaaccttatatggaccaagcaggtattactgtcagcatgcaacagcttcggaccattgctaataatgtcttcttgtcccttttatttgaattgtcgtaagccttatcagctggtcatggcatgtgctgctcttgtactactggataatgaatcatagctcggaataagaacacgtttgcaagcgaatctc

SEQ ID NO: 11013 - protein, 197 aa, Triticum aestivum
  misc_feature (1)..(197): Ceres Seq. ID no. 15222159
MFSIADFATPNARMFSISAFAPPSLPTPPPKADPSPNLFVSGLSKRTTTDGLREAFAKFGEVEHARVVTDRVTGFSKGFGFVRYVTVEDAAKGIEGMDGKGSLGAVVKLLPCDHEVMGSSPGNSLLQKCRERLRTIDPKWSDPSLDPAQAGATCTSFWMDGLFLPNMLDPDHRRRWEGQLRSHNNHGALLVPGAHSR

SEQ ID NO: 11014 - protein, 184 aa, Triticum aestivum
  misc_feature (1)..(184): Ceres Seq. ID no. 15222160
MFSISAFAPPSLPTPPPKADPSPNLFVSGLSKRTTTDGLREAFAKFGEVEHARVVTDRVTGFSKGFGFVRYVTVEDAAKGIEGMDGKGSLGAVVKLLPCDHEVMGSSPGNSLLQKCRERLRTIDPKWSDPSLDPAQAGATCTSFWMDGLFLPNMLDPDHRRRWEGQLRSHNNHGALLVPGAHSR

SEQ ID NO: 11015 - protein, 101 aa, Triticum aestivum
  misc_feature (1)..(101): Ceres Seq. ID no. 15222161
MDGKGSLGAVVKLLPCDHEVMGSSPGNSLLQKCRERLRTIDPKWSDPSLDPAQAGATCTSFWMDGLFLPNMLDPDHRRRWEGQLRSHNNHGALLVPGAHSR

SEQ ID NO: 11016 - DNA, 1760 bp, Triticum aestivum
  misc_feature (1)..(1760): Ceres Seq. ID no. 13597661
atcctaattgaaaaaacacccaaattccagttactcttttggtctttccatcgtcttccttagccggcgacttgcgcgcaggttttcctcccttcctcggcgacttgaggagtgtccagatctagcaattttactccggtgatgaaaacaagtgcccccgtggtttgtgggcagggaccaaggattgatcgtcgttccataaaaccttttaagatgacaagatccaaggatattcagcttcaccatctacctacagatgtactgcgtcgtatactatcacaattgacaatgaaagaagccatgcgaatgagcatactatctaagaagtggagaaggctttggaaatgctacccaaagttagtattcaccagagccatgatgtgtcgcagtaacgccacgacaggccctgcaaaacccttgcggacaaggtttatcaggggggtcaacagcatccagcgacagctcaagtcatccaacctgaataagtttgtggtcaagtttgcgcttcgcaaaaggcacacacctcacattgatagatgggtcaatttctgtgcctcgtcgatggcgaagcatgttgttctcgatttatgtccagggccgaaaggcagtaccgacacagatgacaagtacagtttcccgctgcatcttctcggcgcctcgggtggttcttgcgtgaagtctcttagtctggggttcgtctatttagcactgcctcctgatcaccgtggatttgcaaaccttaagaagctctctctggaaatagttcatgtcacaggggatctcgggcgcctgctcccaaaatgcgctgttcttgagtggctaagcctcaccaggtgtagactggacgagctaagcataggtgaggaactgagcaggctccgttgtttgcaggtcaagtactgtatgctgcagaagctgcatgtccgagctccaaacctcgccatgtttgtgttcgctggtcgtgtgatacctatattgcttggtgaatctgtgaagatttcagaggcgacggtcgacttggtcacatcctcggactgcttcaattacgtcttcactgatcttgtcgatgctctttcgcatgttccgtccctctccataggcttccgaattgaaaccaaggtgataaattttgtgaaaaatcggaccatgctcacaaatctgagacgtctggtcctgaaaatcgatattgttgggtcgccggaagtcactggtgggattcttcgtttggcctatctgttggagttagcccctgctttggaagagttagtactccatatgcattgttttgactcggcaatctatggtgaaccaagagaagatgcctaccagccacatcctcaccgtcatctcaagactatcaaaatgacggggttctatggattacttggtcaggttgagctagcactctaccttcttcggaatgcgacttctctcgagcgtatgatcatagatccggtggtgaggaataattggcctattccacccatgggtggagcaaagcaagatatagaccggggcacgtcgattgccctcaataaactttcgaggcaagagttcagaaaggtccttgacattctgtattaaggggatatgaaactatgttgcaggtgtattctagattatttgttttaaggaaggagagatgccaatagatgttttttttaaaggagatgccaatagatgtttgtttgaaggaaggagctcaggaaatgccgtccttaccatctgtcagagaaataggaaactgaatcacagctgtc

SEQ ID NO: 11017 - protein, 480 aa, Triticum aestivum
  misc_feature (1)..(480): Ceres Seq. ID no. 15222162
MKTSAPVVCGQGPRIDRRSIKPFKMTRSKDIQLHHLPTDVLRRILSQLTMKEAMRMSILSKKWRRLWKCYPKLVFTRAMMCRSNATTGPAKPLRTRFIRGVNSIQRQLKSSNLNKFVVKFALRKRHTPHIDRWVNFCASSMAKHVVLDLCPGPKGSTDTDDKYSFPLHLLGASGGSCVKSLSLGFVYLALPPDHRGFANLKKLSLEIVHVTGDLGRLLPKCAVLEWLSLTRCRLDELSIGEELSRLRCLQVKYCMLQKLHVRAPNLAMFVFAGRVIPILLGESVKISEATVDLVTSSDCFNYVFTDLVDALSHVPSLSIGFRIETKVINFVKNRTMLTNLRRLVLKIDIVGSPEVTGGILRLAYLLELAPALEELVLHMHCFDSAIYGEPREDAYQPHPHRHLKTIKMTGFYGLLGQVELALYLLRNATSLERMIIDPVVRNNWPIPPMGGAKQDIDRGTSIALNKLSRQEFRKVLDILY

SEQ ID NO: 11018 - protein, 456 aa, Triticum aestivum
  misc_feature (1)..(456): Ceres Seq. ID no. 15222163
MTRSKDIQLHHLPTDVLRRILSQLTMKEAMRMSILSKKWRRLWKCYPKLVFTRAMMCRSNATTGPAKPLRTRFIRGVNSIQRQLKSSNLNKFVVKFALRKRHTPHIDRWVNFCASSMAKHVVLDLCPGPKGSTDTDDKYSFPLHLLGASGGSCVKSLSLGFVYLALPPDHRGFANLKKLSLEIVHVTGDLGRLLPKCAVLEWLSLTRCRLDELSIGEELSRLRCLQVKYCMLQKLHVRAPNLAMFVFAGRVIPILLGESVKISEATVDLVTSSDCFNYVFTDLVDALSHVPSLSIGFRIETKVINFVKNRTMLTNLRRLVLKIDIVGSPEVTGGILRLAYLLELAPALEELVLHMHCFDSAIYGEPREDAYQPHPHRHLKTIKMTGFYGLLGQVELALYLLRNATSLERMIIDPVVRNNWPIPPMGGAKQDIDRGTSIALNKLSRQEFRKVLDILY

SEQ ID NO: 11019 - protein, 431 aa, Triticum aestivum
  misc_feature (1)..(431): Ceres Seq. ID no. 15222164
MKEAMRMSILSKKWRRLWKCYPKLVFTRAMMCRSNATTGPAKPLRTRFIRGVNSIQRQLKSSNLNKFVVKFALRKRHTPHIDRWVNFCASSMAKHVVLDLCPGPKGSTDTDDKYSFPLHLLGASGGSCVKSLSLGFVYLALPPDHRGFANLKKLSLEIVHVTGDLGRLLPKCAVLEWLSLTRCRLDELSIGEELSRLRCLQVKYCMLQKLHVRAPNLAMFVFAGRVIPILLGESVKISEATVDLVTSSDCFNYVFTDLVDALSHVPSLSIGFRIETKVINFVKNRTMLTNLRRLVLKIDIVGSPEVTGGILRLAYLLELAPALEELVLHMHCFDSAIYGEPREDAYQPHPHRHLKTIKMTGFYGLLGQVELALYLLRNATSLERMIIDPVVRNNWPIPPMGGAKQDIDRGTSIALNKLSRQEFRKVLDILY

SEQ ID NO: 11020 - DNA, 1319 bp, Triticum aestivum
  misc_feature (1)..(1319): Ceres Seq. ID no. 13597701
ccaccactcctggcatagatctccacctcccggtgagtgaccatggcggaggccgcaggagcgactcctctcctcgctggcctcccggacgagatcaccgtctcggagatcctcgctcgcctgccccccaaacccctcctccgctgccgcgccgtcagccccgcgtggcgccgcgccacctccacccgcgatttcctcctgtcccaccacgcccgccagcccgccctgcccctcctctgcagccacagcgacgtagccgacggcggccagtccctggacgtcacgctcttcgaccaccgtgcaggagtcgccgccgccgaccagttccagcgcgtcgcgcgactgaaaacaccccccttggaaggggggattgacgggagtgaaagtttcactcccctcttctatccggtggcctcctgcgacggcctcctcctcctctccatcgagtgtgacctctgcatctgcaacccggcgactcggcagtatgctcccctcgagcagctcgatggcttcatgaccgtggggttgtaccctcaccctcttaccggcgagtaccggctgttgctgtaccatgaaacagatcaacgtgccatctatgttttctcaattggctccaaccagccgccgaggcgcatcgggcgccctgatccgttggctggtgacgggcttctgttccgtggtagcctgcattggcacactggcaaccggataatggtattcgacaccgccactgagtcgttccggcagatccgtgccccggttgcccatgaggactatggacgactgtttgagatggatgacatgcttggcatcttctttcttaatgatgaaaagacgaccgttgatatttgggtgatgcaggactaccaaggcgaggtctgggctttcaagtgtcgggttgaattgccggttgccgagatcagggaccggtgtcaaaattctagccatattgaggaagtgatggttgttaatggtgatggtgagttgctcgtgttggtcggttttgaggactggctgtttcaggttgatattgatggcaagttgattgccagtttccatgccagaggcctcccttcctataatattgtgcacaagcaaactcttgttcaacataccttctttccgacactcgagggttatgttatgaatgattcgcctttcatttgaccagatgattatgttgtcaacgcttaggaatattgagtgttgtggtgtttcttattggcctagctctgcatgtccacatgagctgttgtatgtatcaactagatccattattaagcttctttgttcttggttgatgaatataaaaaagtatg

SEQ ID NO: 11021 - protein, 374 aa, Triticum aestivum
  misc_feature (1)..(374): Ceres Seq. ID no. 13597702
MAEAAGATPLLAGLPDEITVSEILARLPPKPLLRCRAVSPAWRRATSTRDFLLSHHARQPALPLLCSHSDVADGGQSLDVTLFDHRAGVAAADQFQRVARLKTPPLEGGIDGSESFTPLFYPVASCDGLLLLSIECDLCICNPATRQYAPLEQLDGFMTVGLYPHPLTGEYRLLLYHETDQRAIYVFSIGSNQPPRRIGRPDPLAGDGLLFRGSLHWHTGNRIMVFDTATESFRQIRAPVAHEDYGRLFEMDDMLGIFFLNDEKTTVDIWVMQDYQGEVWAFKCRVELPVAEIRDRCQNSSHIEEVMVVNGDGELLVLVGFEDWLFQVDIDGKLIASFHARGLPSYNIVHKQTLVQHTFFPTLEGYVMNDSPFI

SEQ ID NO: 11022 - protein, 217 aa, Triticum aestivum
  misc_feature (1)..(217): Ceres Seq. ID no. 13597703
MTVGLYPHPLTGEYRLLLYHETDQRAIYVFSIGSNQPPRRIGRPDPLAGDGLLFRGSLHWHTGNRIMVFDTATESFRQIRAPVAHEDYGRLFEMDDMLGIFFLNDEKTTVDIWVMQDYQGEVWAFKCRVELPVAEIRDRCQNSSHIEEVMVVNGDGELLVLVGFEDWLFQVDIDGKLIASFHARGLPSYNIVHKQTLVQHTFFPTLEGYVMNDSPFI

SEQ ID NO: 11023 - DNA, 1251 bp, Triticum aestivum
  misc_feature (1)..(1251): Ceres Seq. ID no. 13597706
atcacgcggcgctaacgagtagcgacgcggacaggggttgcgtgacactaccggcactgcagaagcacgggagccatggcgcgggaggaggaaggacccgcaatgatggacgccgcggagcgacgcctccgcgtggtctccgcgcacctcgagccgcaggccggcgccaccgctggcctcgcctctaaccccaccgccggcgagtacgcccacgtgcagggctacagcgttgttcttcctgaaaagttgcaaactggaaagtggaacgtgtaccgatctgcagagtcacctctgcgtttaattaacagatttcctgctactccagacattggaacactgcatgataattttgtgtatgcagtcgagacttttacagattgtaggtatctgggtacaagagtgtgcgctgatggagcagtcggagactacaaatggatgacgtatggagaagctagtacgagcagaactgcaataggttctggtcttatttatcatggaatatctgaaggtgcacgcattggtctgtattttataaacagacctgagtggatcataattgatcatgcttgtgctgcatattcatatgtatctgtaccactttatgatactcttggtccagatgcagttcagttcattgtgaaccatgcaacagtagaaactattttctgtgtgcctcaaacactaagcactctgctaagcttcctaactcaaatgccatgtgtccgccttatagtggtagttggtggagacaatgcaaatacgccatctacaacagcagctgctggagtggaaatcataacttactccaggctacacagccagggaaagatgagttctcaaacttaccgtcctccaaaacctgaagatgttgccactatctgctacacgagtggcactactggcacaccaaagggagctgttctttctcatgagaacttaatcgcgaatgttgcaggatcaagcttgggcgttaagttttacccctccgacgtgtatatctcatacctacctttagctcacatctatgagagagctaaccaaattgcactgcttcactatggagttgccattggattttaccaaggggtatgtagattttgaactatttaagatgagagctagtagtactttgcattgttgtatagaaactgaacgacatgaaggacatgtattgagagaagtaactgataatatgtgatcttgtataagttttactcatctaatgcaatagtttgcacttgagttgttttt

SEQ ID NO: 11024 - protein, 341 aa, Triticum aestivum
  misc_feature (1)..(341): Ceres Seq. ID no. 13597707
MAREEEGPAMMDAAERRLRVVSAHLEPQAGATAGLASNPTAGEYAHVQGYSVVLPEKLQTGKWNVYRSAESPLRLINRFPATPDIGTLHDNFVYAVETFTDCRYLGTRVCADGAVGDYKWMTYGEASTSRTAIGSGLIYHGISEGARIGLYFINRPEWIIIDHACAAYSYVSVPLYDTLGPDAVQFIVNHATVETIFCVPQTLSTLLSFLTQMPCVRLIVVVGGDNANTPSTTAAAGVEIITYSRLHSQGKMSSQTYRPPKPEDVATICYTSGTTGTPKGAVLSHENLIANVAGSSLGVKFYPSDVYISYLPLAHIYERANQIALLHYGVAIGFYQGVCRF

SEQ ID NO: 11025 - protein, 332 aa, Triticum aestivum
  misc_feature (1)..(332): Ceres Seq. ID no. 13597708
MMDAAERRLRVVSAHLEPQAGATAGLASNPTAGEYAHVQGYSVVLPEKLQTGKWNVYRSAESPLRLINRFPATPDIGTLHDNFVYAVETFTDCRYLGTRVCADGAVGDYKWMTYGEASTSRTAIGSGLIYHGISEGARIGLYFINRPEWIIIDHACAAYSYVSVPLYDTLGPDAVQFIVNHATVETIFCVPQTLSTLLSFLTQMPCVRLIVVVGGDNANTPSTTAAAGVEIITYSRLHSQGKMSSQTYRPPKPEDVATICYTSGTTGTPKGAVLSHENLIANVAGSSLGVKFYPSDVYISYLPLAHIYERANQIALLHYGVAIGFYQGVCRF

SEQ ID NO: 11026 - protein, 331 aa, Triticum aestivum
  misc_feature (1)..(331): Ceres Seq. ID no. 13597709
MDAAERRLRVVSAHLEPQAGATAGLASNPTAGEYAHVQGYSVVLPEKLQTGKWNVYRSAESPLRLINRFPATPDIGTLHDNFVYAVETFTDCRYLGTRVCADGAVGDYKWMTYGEASTSRTAIGSGLIYHGISEGARIGLYFINRPEWIIIDHACAAYSYVSVPLYDTLGPDAVQFIVNHATVETIFCVPQTLSTLLSFLTQMPCVRLIVVVGGDNANTPSTTAAAGVEIITYSRLHSQGKMSSQTYRPPKPEDVATICYTSGTTGTPKGAVLSHENLIANVAGSSLGVKFYPSDVYISYLPLAHIYERANQIALLHYGVAIGFYQGVCRF

SEQ ID NO: 11027 - DNA, 1512 bp, Triticum aestivum
  misc_feature (1)..(1512): Ceres Seq. ID no. 13597710
cagtccccgtcccagtcccaatcctaatcccgcccccaccagcggagcggcgtagccgccgcctcggccgccctcggcgcccgcgcctgagagccggcgacgatggcgaaccgcacggaccccctggcccggagcatccacggcaccaaccctcagaacctggtggagaagatcgtgcgggccaagatctaccagagcaactactggaaggagcagtgcttcggcctcacggcggagaccctggtcgacaaggccatggagctcgaccacaccggcggcacccacggcggcaaccgcaggccgacccccttcctctgcctcgccctcaagatgctccagatccagcccgacaaggaaatcgtcgtcgagttcatcaagaacgaggactacaagtatgtccgggttcttggggccttctacctgcgcctcactggcaccgtcgccgacgtttaccagtacctcgagccgctttacaacgactaccgcaagattaggcaaaagctcagcgatggaaaattcacgctgacacacgttgacgaattcattgacgagctcctgaccaaggactatagctgcgacactgccctcccccgcattcagaaaagatggatccttgaagcttctggaactctagaacctagaagaagtgcacttgaagacgattttgatgaagaggaggaagataaggaggatggacagcctatggacgtagacgagcctaacactcgtgaaaaggaccatcttcgtggaaggagccccaccaaagaacgggatagggaaagggagagggacagagacaggaaacacgaaaggcatcacagggaccgagatcatgacagagatcgggatcatgacagggactatggaagaggccgggaaagagatcgagacagagatagaggccgtgaaagagatagagagagggatagggaacgagaccgtcaccggacccgagatgacgattacaaccgagatcgagaccgggatggcagggaaagggaacgccgggacagagaccgtggcaggcacaggagttgctcaaggagcaggagccgggatcggcgtgaaagagaccgtgaagtgggagagctccgtaagaggcgtggccgtggtagtgccagtcctcctcgagggcgtgccgaggatggtccgagggaggagcctaataagaagagaaaggaaaagaaagagaagaagggcagcgggaacggtccagatcctaatgatccagagattatagagatgaacaagctgcgtgcatcgatagggttgggaccactgaagtagtggcacattgctgtaatgtattttgaagctccaagcttaaaaccaacaaaggattagctagcatttttcttttaacactgcaagcttgtcaaaataccctgtaatgtaactttggcggtttggcctgcttttctggctctaccttccgcggtcttttttgcatttttcttgagacacagtgaaggctgatgaaggaaagcatttgatttcaactgtattgtgttg

SEQ ID NO: 11028 - protein, 394 aa, Triticum aestivum
  misc_feature (1)..(394): Ceres Seq. ID no. 13597711
MANRTDPLARSIHGTNPQNLVEKIVRAKIYQSNYWKEQCFGLTAETLVDKAMELDHTGGTHGGNRRPTPFLCLALKMLQIQPDKEIVVEFIKNEDYKYVRVLGAFYLRLTGTVADVYQYLEPLYNDYRKIRQKLSDGKFTLTHVDEFIDELLTKDYSCDTALPRIQKRWILEASGTLEPRRSALEDDFDEEEEDKEDGQPMDVDEPNTREKDHLRGRSPTKERDRERERDRDRKHERHHRDRDHDRDRDHDRDYGRGRERDRDRDRGRERDRERDRERDRHRTRDDDYNRDRDRDGRERERRDRDRGRHRSCSRSRSRDRRERDREVGELRKRRGRGSASPPRGRAEDGPREEPNKKRKEKKEKKGSGNGPDPNDPEIIEMNKLRASIGLGPLK

SEQ ID NO: 11029 - protein, 343 aa, Triticum aestivum
  misc_feature (1)..(343): Ceres Seq. ID no. 13597712
MELDHTGGTHGGNRRPTPFLCLALKMLQIQPDKEIVVEFIKNEDYKYVRVLGAFYLRLTGTVADVYQYLEPLYNDYRKIRQKLSDGKFTLTHVDEFIDELLTKDYSCDTALPRIQKRWILEASGTLEPRRSALEDDFDEEEEDKEDGQPMDVDEPNTREKDHLRGRSPTKERDRERERDRDRKHERHHRDRDHDRDRDHDRDYGRGRERDRDRDRGRERDRERDRERDRHRTRDDDYNRDRDRDGRERERRDRDRGRHRSCSRSRSRDRRERDREVGELRKRRGRGSASPPRGRAEDGPREEPNKKRKEKKEKKGSGNGPDPNDPEIIEMNKLRASIGLGPLK

SEQ ID NO: 11030 - protein, 318 aa, Triticum aestivum
  misc_feature (1)..(318): Ceres Seq. ID no. 13597713
MLQIQPDKEIVVEFIKNEDYKYVRVLGAFYLRLTGTVADVYQYLEPLYNDYRKIRQKLSDGKFTLTHVDEFIDELLTKDYSCDTALPRIQKRWILEASGTLEPRRSALEDDFDEEEEDKEDGQPMDVDEPNTREKDHLRGRSPTKERDRERERDRDRKHERHHRDRDHDRDRDHDRDYGRGRERDRDRDRGRERDRERDRERDRHRTRDDDYNRDRDRDGRERERRDRDRGRHRSCSRSRSRDRRERDREVGELRKRRGRGSASPPRGRAEDGPREEPNKKRKEKKEKKGSGNGPDPNDPEIIEMNKLRASIGLGPLK

SEQ ID NO: 11031 - DNA, 1335 bp, Triticum aestivum
  misc_feature (1)..(1335): Ceres Seq. ID no. 13597721
ctaaaaccctagctccaccaccacccacctaaaacccgccgccgccaccgccaccgccgttccccttcttccccgccaccgggagatcctggccatcgggtctccttccttcctccgaggatcaaagttcaggttggcgccaacatgtcgtcgaagaagatagagctagaccacaaggacatggttcatgattctgccattgactattatgggaagcgccttgccacagcctcctctgactccactgtgaagatcaccaacattgggagtgcatctgccccgtcccagctcgttgcgaccctcactggccactatggtcctgtgtggcgtgttggatgggcccatcccaagtatggttccattctcgcatcctgcggctatgatggccgtgtgatagtctggaaggaggctgccactgggcaatggtctcagctccatgtgtttgacaaccacaaggcctcagttaactccattgcttgggctccatatgaacttggcctttgccttgcctgtgggtcttctgacggcaccatctctgtcatctccatgcggcttgatacaggaggatgtgacgctgcaaccattgagcgggcacaccctgttggcgtgacagcagtctcctgggctccggcagcagcacttgggtccatggttggctcagatcagctcgtccacaagatcgtgtctggtggctttgactgtgtcgtcaaggtgtgggagtttgtcaatggtggctggaagctggagagtgctttggtctctgacatgcacaaagagtgcgtgagagacgtctcatgggcaccggtcctgggcctggcaaagtcaaccatcgccagtgcttcccaagacggcaaggttgtcatctggaccagtggcaaaggaggaggcaagtgggaaggaaagctcatgcgtgactttgaggctccggtgtggagggtgtcctggtccctgacgggaaacatactgtctgtggctgccggcgagggcgacattactctgtggaaggaatcgtcggacgggcagtgggagtcgctgtggaccaaggcctcagaggagccgccgcaggaggagcaggcgatcgaggaggccatgcagtaggggagtcgacgccacatctcccgtgttgattttggaccatgattcgtgtttctagcgccaacgccatgacttgctttcacctgctgccctgatactcttagagatactcgttgccatcttttttgccgtttgtttctatatggacaatgtctgattgcactgtttaagttttatactggtcatgtactcttatgcacaccgtcagaatgtatcgcctgtttgaactgtttatatcct

SEQ ID NO: 11032 - protein, 317 aa, Triticum aestivum
  misc_feature (1)..(317): Ceres Seq. ID no. 13597722
MSSKKIELDHKDMVHDSAIDYYGKRLATASSDSTVKITNIGSASAPSQLVATLTGHYGPVWRVGWAHPKYGSILASCGYDGRVIVWKEAATGQWSQLHVFDNHKASVNSIAWAPYELGLCLACGSSDGTISVISMRLDTGGCDAATIERAHPVGVTAVSWAPAAALGSMVGSDQLVHKIVSGGFDCVVKVWEFVNGGWKLESALVSDMHKECVRDVSWAPVLGLAKSTIASASQDGKVVIWTSGKGGGKWEGKLMRDFEAPVWRVSWSLTGNILSVAAGEGDITLWKESSDGQWESLWTKASEEPPQEEQAIEEAMQ

SEQ ID NO: 11033 - protein, 305 aa, Triticum aestivum
  misc_feature (1)..(305): Ceres Seq. ID no. 13597723
MVHDSAIDYYGKRLATASSDSTVKITNIGSASAPSQLVATLTGHYGPVWRVGWAHPKYGSILASCGYDGRVIVWKEAATGQWSQLHVFDNHKASVNSIAWAPYELGLCLACGSSDGTISVISMRLDTGGCDAATIERAHPVGVTAVSWAPAAALGSMVGSDQLVHKIVSGGFDCVVKVWEFVNGGWKLESALVSDMHKECVRDVSWAPVLGLAKSTIASASQDGKVVIWTSGKGGGKWEGKLMRDFEAPVWRVSWSLTGNILSVAAGEGDITLWKESSDGQWESLWTKASEEPPQEEQAIEEAMQ

SEQ ID NO: 11034 - protein, 183 aa, Triticum aestivum
  misc_feature (1)..(183): Ceres Seq. ID no. 13597724
MRLDTGGCDAATIERAHPVGVTAVSWAPAAALGSMVGSDQLVHKIVSGGFDCVVKVWEFVNGGWKLESALVSDMHKECVRDVSWAPVLGLAKSTIASASQDGKVVIWTSGKGGGKWEGKLMRDFEAPVWRVSWSLTGNILSVAAGEGDITLWKESSDGQWESLWTKASEEPPQEEQAIEEAMQ

SEQ ID NO: 11035 - DNA, 1106 bp, Triticum aestivum
  misc_feature (1)..(1106): Ceres Seq. ID no. 13597725
ctttcagccccacctcgcctccctccatccccctccattaaagcccgcgccctcctcctccgctccattcccctcgccaccgcccagatccagaccatgacggtgccgccgtcgccggagccgttccgcgtcttcgtcgggtacgacccgaaggagcacgaggcctacgaggtgtgtcgccgcagcctgatccgccacgccaccgtgccgctcgacgtgcgccccatccggcagccggacctccgcgcgtcggggctctactggcgcacgcggggtcacatggagagcactgagttctccttcacccgcttcctcacccccttcctcgccggctaccgcggctgggcgctcttcatcgactgcgacttcctctacctcgccgacgtcgccgagctcatcgcctccgccgtgccctcggacgctgccgccgccaagcgcctcgccgtcgtctgcgtcaagcacgagtacaagcccctcgaggccaccaagatggacggcgccatgcagaccgtgtacccgcgcaagaactggtcctccatggtgctctacaactgcgcccaccccaagaacgtcgccgcgctcaccccggacgccgtcagcaccaagaccggcgccttcctccaccgattctcctggctcgacgacgacgagatcggggaggtgcccttcgtctggaacttcctcgtcggccacaacagggtcgaccctgacgacccggccacgcagcccaaggccctgcactacacctgcgggggaccctggttcgacaggtacagggactgcgagttcgccgacctctggatcaaggaggccgaggagctcagggcggagaaggagaagcgcagagccgagaaggagaggctcgagctcgaggacgacgaggacgacgaggggaattgatggatgatggggccggccaacaagttcactgcattgcattggttcttttgcgccgtgggaattctttcgattcaatctgtttgttatgctggtttcttggtataggtggtaggggaggccagagtagaatagctcgagtatattggtttagtatgctcttgtgtagtagctgcaatcgatctatgaatgaaccagtcctcattgcc

SEQ ID NO: 11036 - protein, 299 aa, Triticum aestivum
  misc_feature (1)..(299): Ceres Seq. ID no. 13597726
LSAPPRLPPSPSIKARALLLRSIPLATAQIQTMTVPPSPEPFRVFVGYDPKEHEAYEVCRRSLIRHATVPLDVRPIRQPDLRASGLYWRTRGHMESTEFSFTRFLTPFLAGYRGWALFIDCDFLYLADVAELIASAVPSDAAAAKRLAVVCVKHEYKPLEATKMDGAMQTVYPRKNWSSMVLYNCAHPKNVAALTPDAVSTKTGAFLHRFSWLDDDEIGEVPFVWNFLVGHNRVDPDDPATQPKALHYTCGGPWFDRYRDCEFADLWIKEAEELRAEKEKRRAEKERLELEDDEDDEGN

SEQ ID NO: 11037 - protein, 267 aa, Triticum aestivum
  misc_feature (1)..(267): Ceres Seq. ID no. 13597727
MTVPPSPEPFRVFVGYDPKEHEAYEVCRRSLIRHATVPLDVRPIRQPDLRASGLYWRTRGHMESTEFSFTRFLTPFLAGYRGWALFIDCDFLYLADVAELIASAVPSDAAAAKRLAVVCVKHEYKPLEATKMDGAMQTVYPRKNWSSMVLYNCAHPKNVAALTPDAVSTKTGAFLHRFSWLDDDEIGEVPFVWNFLVGHNRVDPDDPATQPKALHYTCGGPWFDRYRDCEFADLWIKEAEELRAEKEKRRAEKERLELEDDEDDEGN

SEQ ID NO: 11038 - protein, 206 aa, Triticum aestivum
  misc_feature (1)..(206): Ceres Seq. ID no. 13597728
MESTEFSFTRFLTPFLAGYRGWALFIDCDFLYLADVAELIASAVPSDAAAAKRLAVVCVKHEYKPLEATKMDGAMQTVYPRKNWSSMVLYNCAHPKNVAALTPDAVSTKTGAFLHRFSWLDDDEIGEVPFVWNFLVGHNRVDPDDPATQPKALHYTCGGPWFDRYRDCEFADLWIKEAEELRAEKEKRRAEKERLELEDDEDDEGN

SEQ ID NO: 11039 - DNA, 644 bp, Triticum aestivum
  misc_feature (1)..(644): Ceres Seq. ID no. 13597729
attctttgactatgtctcaaaaaaattggattctttgacttgttggttcgatttctcttctcaaaggaacccccaacaccgccgtcggagcagcggcggcagcaagaggagaggaggagcgagatggcgccgcccagcaaggagccgtgcaagaaggaggcgtgcgacatccaggcctgcctctccaagaacctcttcgattccaagaagtgtttgaaagttattcagtcactacaatcttgttgtgagcaatgcgagtacaaatcaacacattgtggttctttgtcgggcttgctcaaaaacatttcaaagtgatgtaataagactatcactcaataaaggtaattttaggtttgcttgggagttaatcaggatatcagtttctctaatccatcatgtatgactgggaaaaataataatgcgccatcctcaacctgcagaaaggtgctgtggttgctagttgttcggtgctgagtttgtcaacacatttctttaagagggatactgatattgccgtatagctgtattatcctttgtatttcttattatgcccatgtgcagatataattcaagaaaataagtgaaccctggccttgttgtacaccaatctgcatttatgatatgggaagtgttttttgaattgc

SEQ ID NO: 11040 - protein, 71 aa, Triticum aestivum
  misc_feature (1)..(71): Ceres Seq. ID no. 13597730
FFDYVSKKLDSLTCWFDFSSQRNPQHRRRSSGGSKRRGGARWRRPARSRARRRRATSRPASPRTSSIPRSV

SEQ ID NO: 11041 - protein, 63 aa, Triticum aestivum
  misc_feature (1)..(63): Ceres Seq. ID no. 13597731
MAPPSKEPCKKEACDIQACLSKNLFDSKKCLKVIQSLQSCCEQCEYKSTHCGSLSGLLKNISK

SEQ ID NO: 11042 - DNA, 1128 bp, Triticum aestivum
  misc_feature (1)..(1128): Ceres Seq. ID no. 13597743
aaaaccgcagacctcaccatccccctcccccctcccctccccagcagccagcctcccccgcgaacgaaccctagccaggcacggcggcggatccctcgggcggcccggagccacaggccgccgcgatgatggacggcggcggcggcgtcggagacccggtcgaggagttcctcatcgggggcgccggcgacggcggggaggactccctcgccgccttctgcgacggaggacttgggattgaggatgtgcgcggaggtgactctggtctcgggcactctaatttggggaaaaggggcagagatgaaccatctccatctggtccaaagtcaaaggcttgccgcgagaaaatgcggagggataaactgaatgacaggtttcttgaattatgctcggttatgaattctggcaagcacactggtgttgaagaatgttcggctagcaatcctgggaagaacgctaagttggataaagcaagtatcttgagtgatgcaactcgtatgttgacacaactcagaggcgagaccgaaaagctgaaggaatcaaatgtgaatcttcgagagacaatcaaggaccttaaggcggagaagaatgagctccgagatgagaagttgagcctgaaggcagaaaaggaaaggctggaacaacaactcaaagcagcaagtgctgctcctacaggatttgctcctcatatgccttatccagctgcgttccaccccgcagtattccctccatttgcaccaccttatcaagtcccagccaacaaaggcgctccggtccccgctgcattccctggaatggcgatgtggcactggttgcccccaactgccatggacacaactcaagacccaaagctttggccgccgaatgcttaggcgtgccgaccccgggatgctgacttgcgctgccattcgcccattggcaagtcagaacgtttgtcaggtccctgagatgaaaggaagctcgcgattgcagttattgtgtttagcctgttgttttggggtcacttgtcccatagagaggtgatacctgtaattaatctggatcttaaccctcttgcttggaaaatatattcagtgctaccatacctcttgtatgagtgttatgtatggaattgcactggtttgtttc

SEQ ID NO: 11043 - protein, 248 aa, Triticum aestivum
  misc_feature (1)..(248): Ceres Seq. ID no. 13597744
MMDGGGGVGDPVEEFLIGGAGDGGEDSLAAFCDGGLGIEDVRGGDSGLGHSNLGKRGRDEPSPSGPKSKACREKMRRDKLNDRFLELCSVMNSGKHTGVEECSASNPGKNAKLDKASILSDATRMLTQLRGETEKLKESNVNLRETIKDLKAEKNELRDEKLSLKAEKERLEQQLKAASAAPTGFAPHMPYPAAFHPAVFPPFAPPYQVPANKGAPVPAAFPGMAMWHWLPPTAMDTTQDPKLWPPNA

SEQ ID NO: 11044 - protein, 247 aa, Triticum aestivum
  misc_feature (1)..(247): Ceres Seq. ID no. 13597745
MDGGGGVGDPVEEFLIGGAGDGGEDSLAAFCDGGLGIEDVRGGDSGLGHSNLGKRGRDEPSPSGPKSKACREKMRRDKLNDRFLELCSVMNSGKHTGVEECSASNPGKNAKLDKASILSDATRMLTQLRGETEKLKESNVNLRETIKDLKAEKNELRDEKLSLKAEKERLEQQLKAASAAPTGFAPHMPYPAAFHPAVFPPFAPPYQVPANKGAPVPAAFPGMAMWHWLPPTAMDTTQDPKLWPPNA

SEQ ID NO: 11045 - protein, 174 aa, Triticum aestivum
  misc_feature (1)..(174): Ceres Seq. ID no. 13597746
MRRDKLNDRFLELCSVMNSGKHTGVEECSASNPGKNAKLDKASILSDATRMLTQLRGETEKLKESNVNLRETIKDLKAEKNELRDEKLSLKAEKERLEQQLKAASAAPTGFAPHMPYPAAFHPAVFPPFAPPYQVPANKGAPVPAAFPGMAMWHWLPPTAMDTTQDPKLWPPNA

SEQ ID NO: 11046 - DNA, 1393 bp, Triticum aestivum
  misc_feature (1)..(1393): Ceres Seq. ID no. 13597747
atattcttcttcttctcccctttgcttcttccagaagctccctgaaagtccaggcccgatcccccatggcctccggcgaaggcaccggagattcgaacgctgcgggggcagggatggaggtgccggaggtggagttgtgcctcgacctcacgagctgccagctgcacgatctgagtgaggtggagatcccgcccaccctggaggagctggaccttacggcgaaccgtctcaccgcagtcgacccccggatcggccacctccctcgcctccgcaaactctcgttccgccagaatctcctcgacgacgacgccgtcgcgcccctcttcacctgggatgccatcgctggcttacaggagatagtccttagagataacaagcttataaagatccccgatgccagcatcttcaagggtcttctggtgtttgatgtttctttcaatgagttgtcgtccttaaatgggttatccaaggtttccagcacagtgaaagaactctacttttcgaagaatgaggttccaaagatggaagaacttgaacatttccatgcattagaattgcttgaacttggtagcaacagattaagggtgatggaaaatctggaaactttgacaaatctacaggagttatggctcggaagaaaccggatccggactatcaacttatgtgggttgaaatcaatcaaaaaaataagtctgcaaagcaacaggctaacttcaatgaatggcttacaagaatgtgttgcgttagaggaactgtatctcagccataatggaatccaaaagatggaaggcctttctatgttacagaaccttcgtgttttagatgtttcatctaacaaactaaccgctatcgaagatattgagccattaaccaggttagaggacttgtggttgaatgacaaccaaataccatcactgtctgggatagaatctgctttgtctggttcacgagagaaactgaccaccatatatcttgagagaaatccttgtgcaaaaactcccaactattcatccacattgaaggaaatgtttccaaatcttgagcaaattgattcagatatgctagcgtgaaacaggttgactcactttctcagattgttgaagttagtcgaaatatgtgttgtgtttctacaggaagaaagcagtcatccagttcagaacagacaacataagctcccggtcaagtagcgctgcagtttgtactggtgatctgaatggattattgccaactttatttgaaaggcccgtcctgaagttgggtcatttcctgccgagatctataaaaactgaacttatgtgataaagccatcctatggtccatgactccatgctcgtgccacgttgcaagggatgatgtatttgttttcccttttcccttgagtgatttttcagtt

SEQ ID NO: 11047 - protein, 355 aa, Triticum aestivum
  misc_feature (1)..(355): Ceres Seq. ID no. 13597748
ILLLLPFASSRSSLKVQARSPMASGEGTGDSNAAGAGMEVPEVELCLDLTSCQLHDLSEVEIPPTLEELDLTANRLTAVDPRIGHLPRLRKLSFRQNLLDDDAVAPLFTWDAIAGLQEIVLRDNKLIKIPDASIFKGLLVFDVSFNELSSLNGLSKVSSTVKELYFSKNEVPKMEELEHFHALELLELGSNRLRVMENLETLTNLQELWLGRNRIRTINLCGLKSIKKISLQSNRLTSMNGLQECVALEELYLSHNGIQKMEGLSMLQNLRVLDVSSNKLTAIEDIEPLTRLEDLWLNDNQIPSLSGIESALSGSREKLTTIYLERNPCAKTPNYSSTLKEMFPNLEQIDSDMLA

SEQ ID NO: 11048 - protein, 334 aa, Triticum aestivum
  misc_feature (1)..(334): Ceres Seq. ID no. 13597749
MASGEGTGDSNAAGAGMEVPEVELCLDLTSCQLHDLSEVEIPPTLEELDLTANRLTAVDPRIGHLPRLRKLSFRQNLLDDDAVAPLFTWDAIAGLQEIVLRDNKLIKIPDASIFKGLLVFDVSFNELSSLNGLSKVSSTVKELYFSKNEVPKMEELEHFHALELLELGSNRLRVMENLETLTNLQELWLGRNRIRTINLCGLKSIKKISLQSNRLTSMNGLQECVALEELYLSHNGIQKMEGLSMLQNLRVLDVSSNKLTAIEDIEPLTRLEDLWLNDNQIPSLSGIESALSGSREKLTTIYLERNPCAKTPNYSSTLKEMFPNLEQIDSDMLA

SEQ ID NO: 11049 - protein, 318 aa, Triticum aestivum
  misc_feature (1)..(318): Ceres Seq. ID no. 13597750
MEVPEVELCLDLTSCQLHDLSEVEIPPTLEELDLTANRLTAVDPRIGHLPRLRKLSFRQNLLDDDAVAPLFTWDAIAGLQEIVLRDNKLIKIPDASIFKGLLVFDVSFNELSSLNGLSKVSSTVKELYFSKNEVPKMEELEHFHALELLELGSNRLRVMENLETLTNLQELWLGRNRIRTINLCGLKSIKKISLQSNRLTSMNGLQECVALEELYLSHNGIQKMEGLSMLQNLRVLDVSSNKLTAIEDIEPLTRLEDLWLNDNQIPSLSGIESALSGSREKLTTIYLERNPCAKTPNYSSTLKEMFPNLEQIDSDMLA

SEQ ID NO: 11050 - DNA, 1218 bp, Triticum aestivum
  misc_feature (1)..(1218): Ceres Seq. ID no. 13597765
agtctagctagctagggtttttgcccctaaaccaagaccccctctctcagctctcgcgcccgctcgaccagcgcggatggggaaggacgggaaggggaaggaggccaaggggaagggcaagcaggcggccggctcctccgacgacgccggaggcgccaagggaggcaagggcaagggcaagggcggcaagggcggcgacgacctcggcacctgcaccttcgtcaaagctaggcacgtgttgtgcgagaagcaggggaagatcaatgaggcgtacaagaagctgcaggaaggctggttggacaacggggacaaggtccctcctgctgagtttgccaaggtagcccaagaattctctgaatgcccatcaggaaagaaaggtggggatcttggatggttcccgcgtggcaaaatggctggtcctttccaggaggttgcgtttaacacacctgtgggagctactagtgcaccattcaagtctacgcacgggtaccacttcatcctctgcgaaggcaggaagaactgatatgaaagtatgcttcaggtttggaatgcaagcaccttgggataatgtgggatgcaaatgccccccattacttgtctgttgactcaataaccgttgtgcctggacatattaggtctaggtttagttcatgtcttcggctatatgctagtctttggctacatgccggtcatcggctctatgtcgggagggagatgccaggtctaggggcccggatctggtattgctttgtctctctgctccttgttgcgcgctcccatggacggagccagaggtgatgaggaggagagcacctgaaacctccaataataaaaaggttgttgtggtggagcttgggttctgggtgcctctccgcgatctcgtcgtcgcggtggcggaagatggagaggggtggtcgaatatgagttggagatcaccacatgacagccacgatctgccgccatgacctttggctgagaaggcggcctttccagacgcctttgagagcgtcatctcaacctcctccaagacggaggccctctgtgggattcccagcggcgcgcagcggccttcctctcccatgtggtttcgtccccggcgagaaggaggacggtcggcggtggagtccctgttgttgtggtggagaaggacttgattgcttttcgatgttactttttagggtcctttgtgttaatttccaggactgttgtgtaacttct

SEQ ID NO: 11051 - protein, 148 aa, Triticum aestivum
  misc_feature (1)..(148): Ceres Seq. ID no. 15222185
MGKDGKGKEAKGKGKQAAGSSDDAGGAKGGKGKGKGGKGGDDLGTCTFVKARHVLCEKQGKINEAYKKLQEGWLDNGDKVPPAEFAKVAQEFSECPSGKKGGDLGWFPRGKMAGPFQEVAFNTPVGATSAPFKSTHGYHFILCEGRKN

SEQ ID NO: 11052 - protein, 93 aa, Triticum aestivum
  misc_feature (1)..(93): Ceres Seq. ID no. 15222186
MTATICRHDLWLRRRPFQTPLRASSQPPPRRRPSVGFPAARSGLPLPCGFVPGEKEDGRRWSPCCCGGEGLDCFSMLLFRVLCVNFQDCCVTS

SEQ ID NO: 11053 - protein, 76 aa, Triticum aestivum
  misc_feature (1)..(76): Ceres Seq. ID no. 15222187
MWDANAPHYLSVDSITVVPGHIRSRFSSCLRLYASLWLHAGHRLYVGREMPGLGARIWYCFVSLLLVARSHGRSQR

SEQ ID NO: 11054 - DNA, 1369 bp, Triticum aestivum
  misc_feature (1)..(1369): Ceres Seq. ID no. 13597766
atcgttcacaaacaataaatctccaatacacaagaaggtttctcagtcagctagagaaatggctttcgcgctcaatgcgtcttgctatccttcgtctttccagtcgtcgctgctcccgaggcggatggcagcagcggtgatgataccgaggcggaggaatgttctgcctgtcattagggcggttgccgtggctccgcccgccccggcgccggcgaagccagcagccgtgaggagccggcccgtgtcggtcaccatggccaagctcatggctaagggcaagacagcgctcatcccgtatatcaccgccggtgatcctgacctggccacaacggcagaggcgctgcatctcctggatgcctgtggcgccgacgtcattgagctcggcgtgccgtgctccgacccctacgtggacggtccgatcatccaggcttcgagtgcgagggctctcgctggcggtgccacaatggacggcgtgctggcgatgctcaaggaggtgacgccggagctgtcgtgccctgtggtgctcttctcgtactacaggcctatcttatgtcgagggttggccgaaatcaaagaagccggtgtacacggtcttatagtgcctgatctcccttatgtagccgcgcatgcattatggagtgaagccaagaagaacaacctcgagctggtgctgctcacaacaccagccataccagaagaaagaatgaagggaatcacgaaagcttcggaaggtttcatttacctggtgagcgtcaatggagttacaggtccccgtgaaaacgtgaacctgcgggttaagtccctcattcaagagataaaaaaggttactgacaaacctgttgctgttggctttggcatatcaaaacctgaacacgtaaagcagattgcaggatggggtgcggatggggtgatcattggcagtgcgatggtgaggcagttgggtgaagcagcttcgcccagagaaggattgaaaaggctagaggcatatgcgaggagcatgaagaatgcactaccatgatgaagtgtgtggatggacacagcaccagtaataaattgatcggaagcccagtaataaagctactccgactagatcgtcaatacgttatcagcatgtggagttaaaatcggaatactaccgtgtttccagttcagcgagtagatcgtcattgtatcattagcctttggccggccggtgatggtcctgagtaactagttcaccggttacagcaagttggaataagccgtgtatatacaaaaatgtgcttgaatccatgactcggcaaataaaacaagatgtgctcatgctcatcgggacatcgttctacgtttctagctatctttttttgcgagaataaaagagttttattct

SEQ ID NO: 11055 - protein, 338 aa, Triticum aestivum
  misc_feature (1)..(338): Ceres Seq. ID no. 13597767
SFTNNKSPIHKKVSQSAREMAFALNASCYPSSFQSSLLPRRMAAAVMIPRRRNVLPVIRAVAVAPPAPAPAKPAAVRSRPVSVTMAKLMAKGKTALIPYITAGDPDLATTAEALHLLDACGADVIELGVPCSDPYVDGPIIQASSARALAGGATMDGVLAMLKEVTPELSCPVVLFSYYRPILCRGLAEIKEAGVHGLIVPDLPYVAAHALWSEAKKNNLELVLLTTPAIPEERMKGITKASEGFIYLVSVNGVTGPRENVNLRVKSLIQEIKKVTDKPVAVGFGISKPEHVKQIAGWGADGVIIGSAMVRQLGEAASPREGLKRLEAYARSMKNALP

SEQ ID NO: 11056 - protein, 319 aa, Triticum aestivum
  misc_feature (1)..(319): Ceres Seq. ID no. 13597768
MAFALNASCYPSSFQSSLLPRRMAAAVMIPRRRNVLPVIRAVAVAPPAPAPAKPAAVRSRPVSVTMAKLMAKGKTALIPYITAGDPDLATTAEALHLLDACGADVIELGVPCSDPYVDGPIIQASSARALAGGATMDGVLAMLKEVTPELSCPVVLFSYYRPILCRGLAEIKEAGVHGLIVPDLPYVAAHALWSEAKKNNLELVLLTTPAIPEERMKGITKASEGFIYLVSVNGVTGPRENVNLRVKSLIQEIKKVTDKPVAVGFGISKPEHVKQIAGWGADGVIIGSAMVRQLGEAASPREGLKRLEAYARSMKNALP

SEQ ID NO: 11057 - protein, 297 aa, Triticum aestivum
  misc_feature (1)..(297): Ceres Seq. ID no. 13597769
MAAAVMIPRRRNVLPVIRAVAVAPPAPAPAKPAAVRSRPVSVTMAKLMAKGKTALIPYITAGDPDLATTAEALHLLDACGADVIELGVPCSDPYVDGPIIQASSARALAGGATMDGVLAMLKEVTPELSCPVVLFSYYRPILCRGLAEIKEAGVHGLIVPDLPYVAAHALWSEAKKNNLELVLLTTPAIPEERMKGITKASEGFIYLVSVNGVTGPRENVNLRVKSLIQEIKKVTDKPVAVGFGISKPEHVKQIAGWGADGVIIGSAMVRQLGEAASPREGLKRLEAYARSMKNALP

SEQ ID NO: 11058 - DNA, 2138 bp, Triticum aestivum
  misc_feature (1)..(2138): Ceres Seq. ID no. 13597779
gagagagaaagcgagagggagacagagggttccgtgctcatccacgcatcgaatcgggtcgaccctcaggcgtctcgtcggcgccctgtcctgcccgctaagatcaggaggaccctcgccgagctagcccgccccccaccttttttgttcgtcgcgatcgtgatcggacggcgagccatccccgattcggggttgtgaacagtcgattccagggctgttttttcctttgcaatggcatctggaactgatgagaaagccaagatggagagtttgacatcgcctgcagcctttgtagagggtggggtccaggatgcatgtgatgatgcatgtagcatttgtcttgaggctttctgtgagagtgatccttccacattgacaggttgcaaacatgagttccatctccaatgcattcttgaatggtgtcaaagaagttctcagtgccctatgtgctggcagcctgtcagtatgaaggatcctaccaggcaagtgctggaaatatatattgatattcattggatattcaaatgccaaacatgttgttcaacacgtactccctccgtcccatattagggctcctttgattcaaaggaattctataggatttctggaggattgaaatccttaagaatttttcctatgttggtcctttgattcataggattggatcccataggaatttttcctatggaatcttttgtactacatttcataggaaatctaacatccactccaatctctttttacaattcctttgcttttcctgtgccatcaaacactccatgctaattctgtaggattcatgtgtgcatgccactctaaccctatacttttcctattcctacgatttgaaaatcctgcgaatcaaagagggcctaattgatgctcaaacggatgtatctagtactgaaatagtgctagatacatccatttgagcgtcaattaatatgggacggagggagtagaatttttctaactatggctgtactaatatctcagtcaagagcttctggaggcagtagagcgggagaggaatataagaaccaatcaaactcgaaatacgactatatttcatcattctgctcttggtgatttcgaagtgcggcatttacctgttgttgctaatgatgctgaaattgaagagcgtatactgcaacacctagctgctgctgcagcaatgggaaggtcacaccaacatggtagaagagaggggcagaggaaccgatctggctctcatggcagcccacagttcttggttttctctgcacatccaaatactcctgctggctctgtttcatcatcttctgctcagggtgaaggtgctgacgacttgaggattcttgttcccagagttggtgacttaccaccacatgctaatcccattgaagaagcaggcaaccaaagtccgggggtccttacctacgatgctgaacaagatgctgttgtttcatctggaaatagtacccccgtatccagtcctaggtttttcaacaggagacattcctctggacaatcaactccagtaggtaatgacagggctgggccatcagatgttcagtctttctcagattctctaaagttgcgcttaaatgctgtctcctcgaagtacaaagaatctattacaaaaagtactcgagggtggaaggagaggcttttttcacgtaactcatctgtgtctgatcttggttctgaagtgagacgcgaagttaataatggaattgcatctgtatcgaggatgatggagcgtttggaaactagaggaagtggtagaccaagctatagcccaacaacatctacttctgaagtttgtctcactacagaaccaagcaatgagagggttaccgaaagtaactctaatactactacgagtactagcaacacttctaccccttgtgtgaccatgtctggttcaaattagtgcatgctactctttctgaagaaggcctgcatgttcccattcttcatcttcaaaggtataggcaggtggcatacctgaaactccaacgacatgatgatgccgtgtcaactgttgcataaatcacctccagaaaatctgaatttgatgtattggttttgatgaaagggcagtgggcctgaggtattgcctaggaagtcaatttaatttcctgtttcatctctgt

SEQ ID NO: 11059 - protein, 246 aa, Triticum aestivum
  misc_feature (1)..(246): Ceres Seq. ID no. 13597780
MGRSHQHGRREGQRNRSGSHGSPQFLVFSAHPNTPAGSVSSSSAQGEGADDLRILVPRVGDLPPHANPIEEAGNQSPGVLTYDAEQDAVVSSGNSTPVSSPRFFNRRHSSGQSTPVGNDRAGPSDVQSFSDSLKLRLNAVSSKYKESITKSTRGWKERLFSRNSSVSDLGSEVRREVNNGIASVSRMMERLETRGSGRPSYSPTTSTSEVCLTTEPSNERVTESNSNTTTSTSNTSTPCVTMSGSN

SEQ ID NO: 11060 - DNA, 1764 bp, Triticum aestivum
  misc_feature (1)..(1764): Ceres Seq. ID no. 13597796
acctagaacatcctaatcgaaaactaaaagaaaaaaaaacactcccctaatcccctccatcttgccgccgccgccgccggattgcttccgcccgtcgccatgtccgccgcgggagaccgctctcccccgcgagaggaaggccgcgcttcgattcgcgcccgggctctccccagcgggccgccggccgggaggctcatcgacgacatcctcgtggagatcctctcgcgcgtcccggccaaggaactctgccgctgcaagagcgtctcgaagcactggttcggcctcatccaccaccccgaccaccgcaagcggctcccccaaaccctggccggcttcttctacggcagcagcgccggcaccaccgcgcagcggctcctggagctgcccttccgcttcaccagcgtctcgggggaccgctgccctccgttcggcgcctccctcaccttcctgcccaaccaccacctgcccgtcgatctgctggactcctgcaacggcctcctcctctgccgatgttaccacgtctccgacggggttggcgcgttccattacgtcgtgtgcaatcccgccacccagaagtgggtcgtgttgcccagctcctgcaaggacagcagcgaggtggccaccacatctctgggcttcgacccggctctatcgtcgcatttccatgtgtttgagctggtagttgagcagaattatactcaggacactgagctttgcggagtggcggtgtattcgtctgaaaccggagaatggatttataaggagaagagatggaacagagctagtcggcactccgcaacagtctttctcgacggccttctgttttttcgtgtccttggccttgaatatcacgactgtgtggctgcggtggacacaaagggagaaacatggatgaaattcagggtccctggtggtcaggttgatgattttggtctggctgatggttttgttcagcagatgttattcagggttcctggtggtccggctgatgattttggtctggctcatggttttattcagcagtcgcagggctgcttgcattttgccaattttcagagggatgaacatggtgttggcattcgattggtggtttatgttctgaaaaactatgaaagcgaagaatggatagtgaagcatagcattaaaacttcagacatatgtggatggacagatttatggcttgatgcggattttgatttcattgcgattcatccagaatgcaactcgttgttcttcattgcggggggtgtcacattaatgtgctataatatggataatcggcaggtcaaagtgatctcctatcttggaggtgccaagccgctatttctgccctatgtgccgttgtacacagagtcactatcactgcactgctaagtggatctctgatcggagtcaattcttcattctatggggcagcgtgcttgccatgtctgcttgaatttggctctcatttgctctgactgatgaatgcatgtttttctggtttggagcaatggtggttcagtatggagggaatttgactgatttctctgtgatctgctatccaaatttgcactaaactttctgccatatgtattggtctctggtttagtcaacttctaccttcatgcattgcttaacctcgtgtagcgtttgtgttaaggtactatgatcattatgtaagacatggacaatggttatcatgcaggaaaacttttctcgaacatcatgctgagggttaaacttttatcttctacagtatttgcagccatgggaattataagc

SEQ ID NO: 11061 - protein, 424 aa, Triticum aestivum
  misc_feature (1)..(424): Ceres Seq. ID no. 13597797
MSAAGDRSPPREEGRASIRARALPSGPPAGRLIDDILVEILSRVPAKELCRCKSVSKHWFGLIHHPDHRKRLPQTLAGFFYGSSAGTTAQRLLELPFRFTSVSGDRCPPFGASLTFLPNHHLPVDLLDSCNGLLLCRCYHVSDGVGAFHYVVCNPATQKWVVLPSSCKDSSEVATTSLGFDPALSSHFHVFELVVEQNYTQDTELCGVAVYSSETGEWIYKEKRWNRASRHSATVFLDGLLFFRVLGLEYHDCVAAVDTKGETWMKFRVPGGQVDDFGLADGFVQQMLFRVPGGPADDFGLAHGFIQQSQGCLHFANFQRDEHGVGIRLVVYVLKNYESEEWIVKHSIKTSDICGWTDLWLDADFDFIAIHPECNSLFFIAGGVTLMCYNMDNRQVKVISYLGGAKPLFLPYVPLYTESLSLHC

SEQ ID NO: 11062 - DNA, 2166 bp, Triticum aestivum
  misc_feature (1)..(2166): Ceres Seq. ID no. 13597798
aacccaaacccccccggacctaaaatctccgaaccctcctcaccggcaacacccggggtggccgccatgcacgcctccgcccgcttgctccgccgcctctcctcttcctactccgcccgctcgctccgccgcctccctctccacccatcaccctcgccgcctccacatccatctcgtctgccgccccttcgaaccgtgacccgcgccctccttccccacctcgctgctccccgcttctccaccatctcttgcgcatccacaccctctctccgcctaggtgaatgcggcgctctgggaaccccggcgataccgtcggcggaggtatccgaggaagaggaggaggtggagtctgtggcggcgcggcatgacaccgacgcgttcgcggcggtggagctcgcgctggactcggtggtgaaggtgttcacggtgtcaagtggccctaactacttcctgccgtggcagaacaaggcccagcgcgagagcatgggctccggctttgtaatttctggaaaaaggatcgtcacaaatgctcatgtggtagctgatcatacttttgttcttgtgaggaagcatggatcacctgcaaagtacaaggcggaagttcaggctattggccatgagtgtgatttggctcttcttacagttgagagtgaggagttttgggaggggatgaacagcttggatcttggagacattccatttttgcaggaagctgtcgccgtggttggctaccctcagggtggagacaatatctctgtcaccaagggggttgtttctagagtggaaccaacacagtatgcccatggtgcgactcagctcatggctatacaaatagatgcagctattaatccaggcaatagtggagggcctgcaatcatgggtgataaagtggctggagttgctttccaaaatctgtcaggagcagaaaacattgggtatattatacctgtgcctgtaattaagcgttttatttctggtgtggaagagagtggcaaatattctgggttttgttctcttgggatatcttgccaggccactgagaacatccaaataagagagtgctttggtatgcggcctgaaatgactggagtgttagtcagtagaataaatcctctgtctggtgcttacgaaattttgaggaaagacgatatccttctcgagtttgatggcgtgcctattgcgaatgatgggacagttccatttcgaaatagagagagaatcacctttgatcatcttgtgtccatgaagaagcctgaagaaacagccgttatcaaagtactaagagatggcaaagagcatgaattgaatgtgacacttagacctttgcaacctttggttcctgtacatcaatttgataaactgcccagctactacatctttgctggttttgtttttatcccgctgacccagccttatctccatgaatttggggaggactggtacaacacttcgccacgtcgattgtgtgaacgggcactgagagaacttccgaagaaggctggccaacagttagtaatattatctcaggtcctaatggatgatattaatgttggttatgaaaggctggctgaactccaggtaaagaaggtgaatggtgttgaggttgagaatttgaagcatttgtgcagtatcgtggagaactgcactgaagaaaacttgagaattgatttggacgatgagcgggtgatcgtcctgaaatttcagaacgcgaggcttgccacgtctcggatcctcaagcggcacaggattccatcagccatgtcaaatgaccttgtcgatgaacaagcgagcaaaggtgagactgaggcatcatgcacaaactgacacattttcatagacgtagctacacagtttctgcggaagcaccgatgttagctcggttgtctttccagagacagatgaggtaggccaaggactgctggagtcagcgatgagcccatgggttgcagcaggctccagttttgctgattcagttttgacagaaggtagaggtcttcagcaaataagaacccaagttcttcagcccgagttgtaacatcattctttgctcccctcccaacgatttatcattctttctttcgccactgtacgggttttggcacccttatgttaaattcggattatgtatcatcaccaaagcagaacataggagatacaaatttcaag

SEQ ID NO: 11063 - protein, 607 aa, Triticum aestivum
  misc_feature (1)..(607): Ceres Seq. ID no. 15222191
NPNPPGPKISEPSSPATPGVAAMHASARLLRRLSSSYSARSLRRLPLHPSPSPPPHPSRLPPLRTVTRALLPHLAAPRFSTISCASTPSLRLGECGALGTPAIPSAEVSEEEEEVESVAARHDTDAFAAVELALDSVVKVFTVSSGPNYFLPWQNKAQRESMGSGFVISGKRIVTNAHVVADHTFVLVRKHGSPAKYKAEVQAIGHECDLALLTVESEEFWEGMNSLDLGDIPFLQEAVAVVGYPQGGDNISVTKGVVSRVEPTQYAHGATQLMAIQIDAAINPGNSGGPAIMGDKVAGVAFQNLSGAENIGYIIPVPVIKRFISGVEESGKYSGFCSLGISCQATENIQIRECFGMRPEMTGVLVSRINPLSGAYEILRKDDILLEFDGVPIANDGTVPFRNRERITFDHLVSMKKPEETAVIKVLRDGKEHELNVTLRPLQPLVPVHQFDKLPSYYIFAGFVFIPLTQPYLHEFGEDWYNTSPRRLCERALRELPKKAGQQLVILSQVLMDDINVGYERLAELQVKKVNGVEVENLKHLCSIVENCTEENLRIDLDDERVIVLKFQNARLATSRILKRHRIPSAMSNDLVDEQASKGETEASCTN

SEQ ID NO: 11064 - protein, 585 aa, Triticum aestivum
  misc_feature (1)..(585): Ceres Seq. ID no. 15222192
MHASARLLRRLSSSYSARSLRRLPLHPSPSPPPHPSRLPPLRTVTRALLPHLAAPRFSTISCASTPSLRLGECGALGTPAIPSAEVSEEEEEVESVAARHDTDAFAAVELALDSVVKVFTVSSGPNYFLPWQNKAQRESMGSGFVISGKRIVTNAHVVADHTFVLVRKHGSPAKYKAEVQAIGHECDLALLTVESEEFWEGMNSLDLGDIPFLQEAVAVVGYPQGGDNISVTKGVVSRVEPTQYAHGATQLMAIQIDAAINPGNSGGPAIMGDKVAGVAFQNLSGAENIGYIIPVPVIKRFISGVEESGKYSGFCSLGISCQATENIQIRECFGMRPEMTGVLVSRINPLSGAYEILRKDDILLEFDGVPIANDGTVPFRNRERITFDHLVSMKKPEETAVIKVLRDGKEHELNVTLRPLQPLVPVHQFDKLPSYYIFAGFVFIPLTQPYLHEFGEDWYNTSPRRLCERALRELPKKAGQQLVILSQVLMDDINVGYERLAELQVKKVNGVEVENLKHLCSIVENCTEENLRIDLDDERVIVLKFQNARLATSRILKRHRIPSAMSNDLVDEQASKGETEASCTN

SEQ ID NO: 11065 - protein, 446 aa, Triticum aestivum
  misc_feature (1)..(446): Ceres Seq. ID no. 15222193
MGSGFVISGKRIVTNAHVVADHTFVLVRKHGSPAKYKAEVQAIGHECDLALLTVESEEFWEGMNSLDLGDIPFLQEAVAVVGYPQGGDNISVTKGVVSRVEPTQYAHGATQLMAIQIDAAINPGNSGGPAIMGDKVAGVAFQNLSGAENIGYIIPVPVIKRFISGVEESGKYSGFCSLGISCQATENIQIRECFGMRPEMTGVLVSRINPLSGAYEILRKDDILLEFDGVPIANDGTVPFRNRERITFDHLVSMKKPEETAVIKVLRDGKEHELNVTLRPLQPLVPVHQFDKLPSYYIFAGFVFIPLTQPYLHEFGEDWYNTSPRRLCERALRELPKKAGQQLVILSQVLMDDINVGYERLAELQVKKVNGVEVENLKHLCSIVENCTEENLRIDLDDERVIVLKFQNARLATSRILKRHRIPSAMSNDLVDEQASKGETEASCTN

SEQ ID NO: 11066 - DNA, 529 bp, Triticum aestivum
  misc_feature (1)..(529): Ceres Seq. ID no. 13597799
caaaaagaactcttgttcccatcgcatctcggcggcttcctaccccctcctcgccccgatctaactcgccggcggccatgtcgcagccggctgccgccgccgttgcggcgcagccgcaggggcaggccgcggctgggcggcagggaggcggcctgggccagagcctcgccggcatcgtgcggatggcggtgttctggtacttcgcgtccaagttcttcggccccaagcgcgcccccacggagccggggttgctcatgtccaacctctttcagaagggagagccaatggtgagaacgccctcccaagcccaggaacctcgattttggttagaggaggcgtgttaggtttctatggcggttttagagcggtttattattgggtcagtaaaggcggggggctccgccctcatgcagtgctgttgggttctgcttgctccggggtgaaaattgtgcagcgatctcagcagttttttttactgtgatctcgaacttttctttttcttaatatatcagatggtgtatttgtgctg

SEQ ID NO: 11067 - protein, 113 aa, Triticum aestivum
  misc_feature (1)..(113): Ceres Seq. ID no. 15222194
KRTLVPIASRRLPTPSSPRSNSPAAMSQPAAAAVAAQPQGQAAAGRQGGGLGQSLAGIVRMAVFWYFASKFFGPKRAPTEPGLLMSNLFQKGEPMVRTPSQAQEPRFWLEEAC

SEQ ID NO: 11068 - protein, 96 aa, Triticum aestivum
  misc_feature (1)..(96): Ceres Seq. ID no. 15222195
QKELLFPSHLGGFLPPPRPDLTRRRPCRSRLPPPLRRSRRGRPRLGGREAAWARASPASCGWRCSGTSRPSSSAPSAPPRSRGCSCPTSFRRESQW

SEQ ID NO: 11069 - protein, 88 aa, Triticum aestivum
  misc_feature (1)..(88): Ceres Seq. ID no. 15222196
MSQPAAAAVAAQPQGQAAAGRQGGGLGQSLAGIVRMAVFWYFASKFFGPKRAPTEPGLLMSNLFQKGEPMVRTPSQAQEPRFWLEEAC

SEQ ID NO: 11070 - DNA, 1306 bp, Triticum aestivum
  misc_feature (1)..(1306): Ceres Seq. ID no. 13597804
atcgaaaaaagataagccagacatcgagtagtccctctcgggtcgcagtacagagtacggacagaggagcgatatggacccggccggcgcggggaaggcgacggcggcggcggcggctgtgtgcgtgacgggcgcgggaggcttcatcgcctcgtggctcgtggagcgccttctcgccggaggagactacgcggtgcatggcaccgtccgtgatcccagcgaccccaagaataaacacctgagggcgctggacggcgccggcgagcggctgcgcctgttcaaggccgacgtgctggactacgcgagcgtggcgtccaccgtggccggctgtgccggcgtcttccacgtcgccagcccctgccccgccgcccaacccacgaaccccgaggtggagctgcttgccccggcggtggccggcacgctgaacgtgctccgggcctgccgggaggccggcgtccgccgcgtcgtggtggtgtcgtcggtcggcgcggtcttcatgaaccccaacccccccgagggccccaccatggacgaacactgctggtcgaacgaggagtactgcagagccaccgagaactggtactgcctctccaagacgctggtcgagcgcgaggcctgggcttacgcagagaaggccgggctggacgtggtgaccgtgtgcccgccgctggtgttcgggcctctgctgcagcccacggtgaacaccagcagcctgttcctcatcagatacctgaaatgcgacggcgtgaacgccatggacgacagggtgaggaacatggtggacgtcagggacgtcgccgacgcccttgtgctggcgtacgagagcccggaggcggccggccggtacatctgcagtgcgcacgccaggaaggtgtccgaaatggtttccgtcgtcaggagcctgcatccgagcctgaactgcgcaaacaagttcgttcagctggtgggagatgagaaagtgttcagcaccgagaagctgcagaggctggggtggaagttcaggacgctggaggagacgctcaaggacagcgtcgagtcctacatgtctgcaggcatactcagctgagcagggcccaaggttgcgcgcggatcggagccaggtgggcattttgtatcctaacgagcactgcggatgtgccgctagtttcagttcaaggatagcacggtagctaatgcgatgatcaaacggtggtgtgaaattgtattgatcaaactagtgtcacaaatactgcaattgctatatgtaaattgactgaatttgtaatttgggtaagtcggttttatgggagaaggagctattgaaggg

SEQ ID NO: 11071 - protein, 330 aa, Triticum aestivum
  misc_feature (1)..(330): Ceres Seq. ID no. 15222197
MDPAGAGKATAAAAAVCVTGAGGFIASWLVERLLAGGDYAVHGTVRDPSDPKNKHLRALDGAGERLRLFKADVLDYASVASTVAGCAGVFHVASPCPAAQPTNPEVELLAPAVAGTLNVLRACREAGVRRVVVVSSVGAVFMNPNPPEGPTMDEHCWSNEEYCRATENWYCLSKTLVEREAWAYAEKAGLDVVTVCPPLVFGPLLQPTVNTSSLFLIRYLKCDGVNAMDDRVRNMVDVRDVADALVLAYESPEAAGRYICSAHARKVSEMVSVVRSLHPSLNCANKFVQLVGDEKVFSTEKLQRLGWKFRTLEETLKDSVESYMSAGILS

SEQ ID NO: 11072 - protein, 189 aa, Triticum aestivum
  misc_feature (1)..(189): Ceres Seq. ID no. 15222198
MNPNPPEGPTMDEHCWSNEEYCRATENWYCLSKTLVEREAWAYAEKAGLDVVTVCPPLVFGPLLQPTVNTSSLFLIRYLKCDGVNAMDDRVRNMVDVRDVADALVLAYESPEAAGRYICSAHARKVSEMVSVVRSLHPSLNCANKFVQLVGDEKVFSTEKLQRLGWKFRTLEETLKDSVESYMSAGILS

SEQ ID NO: 11073 - protein, 179 aa, Triticum aestivum
  misc_feature (1)..(179): Ceres Seq. ID no. 15222199
MDEHCWSNEEYCRATENWYCLSKTLVEREAWAYAEKAGLDVVTVCPPLVFGPLLQPTVNTSSLFLIRYLKCDGVNAMDDRVRNMVDVRDVADALVLAYESPEAAGRYICSAHARKVSEMVSVVRSLHPSLNCANKFVQLVGDEKVFSTEKLQRLGWKFRTLEETLKDSVESYMSAGILS

SEQ ID NO: 11074 - DNA, 1529 bp, Triticum aestivum
  misc_feature (1)..(1529): Ceres Seq. ID no. 13597805
ctctcccccgatctctcgcccgcgacctgctccgataccctgcgaagtacggactccggcgagcttacggggctcgcgcggcgagctcgcggccgcgatggacgaggcgggcacctcgtcgtccgcaggctccgccccgcgcggagggcgcccggcgagatcgggagtattctataagttcacccagcaggatcttccagcttggaaaccggcaatgacaccaggatacgtgatagccattttcttgataattgggattatttttgtaccgcttggactaatttgtcttcaagcttcaaacagagttgcagaaatcgttcaccgttatgatattgattgtgtacctaatgcttacagaagcaataagcaggcctatatcaaagacagctcgatttcgaaggaatgcattcagaaagtgaaggtacaataccacatgaaagctccaatttatgtgtattatgaactcgacaacttctaccagaatcatcgtaggtatatcaaaagtagaagcgacaagcaactacgctatgggctgaaatacactgatagctcatgcagtccaatagaaaagagcgacggccttccaattgttccctgtggattgattgcctggagcttgttcaatgatacttatgattttacccgtggatccatgggaatagtggttgatcggaaaaatatttcatggagaagtgatcgggagcataagtatggcaaggatgtctatcctttcaactttcagaatggatctttgattggaggaggaaaacttgaccctgatataccactaagcaatcaggaagatcttatcgtgtggatgcgcgcagctgctcttccccagtttcgaaagctgtatggtgtcatcgaagaggatatacaagctgatgaaatcattaccatgcacataacaaacaattacaatacctacagctttggtggaaagaaaagcctggttcttacaacatcaacctggctaggtggcaagaatgactttcttggatatgtatatcttatcactggttccttgagcattttcttgtcgattctctttgctctgatccatgtgaaaatcccaaggccacatggtgatgctgcttacctatcttggagcaggaaaaacggcaataactaagcttctgtgcatagttttttctttgtgtaagctagcagtacagcaccctggccagaggtttccccgcggcgttccgtctgcgcaccctgtctcgagggaaatggcatagtagcagcttcaggtttcatacactcgacacttggacggagcatgaaatgcgtagcagcttcagatttcatacacatacttggagcatgaaacgcttgatgactgctgaggatatacggtaaggccatggttcaccgacatgttcgtgcaattcaggccagcgctctgacggcgccctcgaggaaaactagagccgtgtaaaaactgatatatgtgtatgtaaagcgccataccatggattccatgatgttgtatgaatgaatacatataatgtttcagtttcgtgccg

SEQ ID NO: 11075 - protein, 376 aa, Triticum aestivum
  misc_feature (1)..(376): Ceres Seq. ID no. 13597806
SPPISRPRPAPIPCEVRTPASLRGSRGELAAAMDEAGTSSSAGSAPRGGRPARSGVFYKFTQQDLPAWKPAMTPGYVIAIFLIIGIIFVPLGLICLQASNRVAEIVHRYDIDCVPNAYRSNKQAYIKDSSISKECIQKVKVQYHMKAPIYVYYELDNFYQNHRRYIKSRSDKQLRYGLKYTDSSCSPIEKSDGLPIVPCGLIAWSLFNDTYDFTRGSMGIVVDRKNISWRSDREHKYGKDVYPFNFQNGSLIGGGKLDPDIPLSNQEDLIVWMRAAALPQFRKLYGVIEEDIQADEIITMHITNNYNTYSFGGKKSLVLTTSTWLGGKNDFLGYVYLITGSLSIFLSILFALIHVKIPRPHGDAAYLSWSRKNGNN

SEQ ID NO: 11076 - protein, 344 aa, Triticum aestivum
  misc_feature (1)..(344): Ceres Seq. ID no. 13597807
MDEAGTSSSAGSAPRGGRPARSGVFYKFTQQDLPAWKPAMTPGYVIAIFLIIGIIFVPLGLICLQASNRVAEIVHRYDIDCVPNAYRSNKQAYIKDSSISKECIQKVKVQYHMKAPIYVYYELDNFYQNHRRYIKSRSDKQLRYGLKYTDSSCSPIEKSDGLPIVPCGLIAWSLFNDTYDFTRGSMGIVVDRKNISWRSDREHKYGKDVYPFNFQNGSLIGGGKLDPDIPLSNQEDLIVWMRAAALPQFRKLYGVIEEDIQADEIITMHITNNYNTYSFGGKKSLVLTTSTWLGGKNDFLGYVYLITGSLSIFLSILFALIHVKIPRPHGDAAYLSWSRKNGNN

SEQ ID NO: 11077 - protein, 305 aa, Triticum aestivum
  misc_feature (1)..(305): Ceres Seq. ID no. 13597808
MTPGYVIAIFLIIGIIFVPLGLICLQASNRVAEIVHRYDIDCVPNAYRSNKQAYIKDSSISKECIQKVKVQYHMKAPIYVYYELDNFYQNHRRYIKSRSDKQLRYGLKYTDSSCSPIEKSDGLPIVPCGLIAWSLFNDTYDFTRGSMGIVVDRKNISWRSDREHKYGKDVYPFNFQNGSLIGGGKLDPDIPLSNQEDLIVWMRAAALPQFRKLYGVIEEDIQADEIITMHITNNYNTYSFGGKKSLVLTTSTWLGGKNDFLGYVYLITGSLSIFLSILFALIHVKIPRPHGDAAYLSWSRKNGNN

SEQ ID NO: 11078 - DNA, 1205 bp, Triticum aestivum
  misc_feature (1)..(1205): Ceres Seq. ID no. 13597821
gagccggcgagccgcgcaaccttcgactccgaggggaaccgctcaccggagcaccaccgacccgcggacatggccgacgaggggaagcacctggagacgggccgggccgaccgctccgtctggctcatgaagtgcccgaccatcgtctcgcgcgcctggcaggaggccgccgccgcccaccgccgccgccgatgcgggaggccccaaccctaaccctaaccccgtcgtcgccaaggtcatcctctccttcgacccgctcagcaccgacgaggacccgaaccagttcaagatggagatggctcaaactaataatggcaacacaccgaagaattactctttaaatatgttcaaggattttgtgccaatgtgtgttttctcagagtctaaccaaggggtaagactaggttcctataatccctccccagaccccaccttgtgtgggagcttctatgcactgggtaagcttgcatgcgaaggaaaagtcgagcacaaatttgacatggaaccgcacaaagaaaacctttcagactatgcaaaattatgccgtgagaggactaaaaattctatgattaaaacaagaaaagtgcatgtacttgacaaggagcatgtgaacgtgcgcacaatgattagcatgattggtggcgggcctcattctggtccaaaggacaagaagaagccggcgccaaccagaactcctgaagtgaaaagaacacgcagggatcgtggggacattgaaaacatcctattcaagttatttgagaggcagccgaattggtcactgaggcatctaatgcaggaaactgatcaaccagagcaattcctgaaggagataatgaacgatctttgtgtctacaacaagagaggaccgaatcaagggacacatgagctcaagcctgaatacaagaagtctgttgaggacactagcgcgacctgaagtctatatcatctcttatgatatgctatacctgagagctagaagcccgtatgctctgataagttgaatgtgggtcatcgacagattctgactccagcctgttagttgctgatgaatcgcgtatgcttcatctggttgttctttgcaaaagtaatttttacgctgtataagcctcgagatatcttgttataccacggtttgccgtatcaaagatcctgagttttcagcatccttgtgtcccgaaggaaaagttgttcatgtttctgtgtat

SEQ ID NO: 11079 - protein, 214 aa, Triticum aestivum
  misc_feature (1)..(214): Ceres Seq. ID no. 15222203
MEMAQTNNGNTPKNYSLNMFKDFVPMCVFSESNQGVRLGSYNPSPDPTLCGSFYALGKLACEGKVEHKFDMEPHKENLSDYAKLCRERTKNSMIKTRKVHVLDKEHVNVRTMISMIGGGPHSGPKDKKKPAPTRTPEVKRTRRDRGDIENILFKLFERQPNWSLRHLMQETDQPEQFLKEIMNDLCVYNKRGPNQGTHELKPEYKKSVEDTSAT

SEQ ID NO: 11080 - protein, 212 aa, Triticum aestivum
  misc_feature (1)..(212): Ceres Seq. ID no. 15222204
MAQTNNGNTPKNYSLNMFKDFVPMCVFSESNQGVRLGSYNPSPDPTLCGSFYALGKLACEGKVEHKFDMEPHKENLSDYAKLCRERTKNSMIKTRKVHVLDKEHVNVRTMISMIGGGPHSGPKDKKKPAPTRTPEVKRTRRDRGDIENILFKLFERQPNWSLRHLMQETDQPEQFLKEIMNDLCVYNKRGPNQGTHELKPEYKKSVEDTSAT

SEQ ID NO: 11081 - protein, 196 aa, Triticum aestivum
  misc_feature (1)..(196): Ceres Seq. ID no. 15222205
MFKDFVPMCVFSESNQGVRLGSYNPSPDPTLCGSFYALGKLACEGKVEHKFDMEPHKENLSDYAKLCRERTKNSMIKTRKVHVLDKEHVNVRTMISMIGGGPHSGPKDKKKPAPTRTPEVKRTRRDRGDIENILFKLFERQPNWSLRHLMQETDQPEQFLKEIMNDLCVYNKRGPNQGTHELKPEYKKSVEDTSAT

SEQ ID NO: 11082 - DNA, 1851 bp, Triticum aestivum
  misc_feature (1)..(1851): Ceres Seq. ID no. 13597826
atctatccaggtccagccgagcccatggcggccaagcacctgctctcccgcgcccgcctcctcctcacccgccaccgcagccgccccaccatcctcccgcccgcgctcacccgcctcctcttcggcgggacaaccacccccgccgagccggaggacgacgacaaggccagggcccgggcggcggcggcggcggcggccgtcgccctggacgccaagagggccaagcgggaaggctccgacgacgacgacgagggcgccgggctgccctggacgtcctggcggcccgacgtggcctggctgaccaaggcactcgagcccgcgctgcagctctacaagcactacaactggaagccattcgcctctgacaacatccccgcaagcacccgcacttttagcgagatcataagtgacctccagcacagcaaggtgagcatacaggactggagcctcagtgatcttaccgtcggtctctacctcatttaccttacccaagcttccgcaaagaatgctcaagccttcaagggcgttcagatttcctccaataagaaggttcaagaactaatttatcaccttgaacttgcaaaaggttgctataagggcagtgccactgggcttgcaaagcatagcatgctccggccaaggaatgttttaaagtttgtgaaagattctagtatctttagacctggatattacatcggcatcgatccacgtgctaaactggtcatccttgggattcgtgggacccatacggtttatgaccttgtcaccgatttggttgcattgagcgataagaaggtatcacctaaaggtttctcaacacactttggaacctacgaggccgctcgatggtacctacgccatgagttgagcatcatcagaaaatgtttggaaaaacacaaggactacaagttgcggttggtaggtcactcccttggaggagcttcagctgcattgcttgctataatgttaaggaagaagtcgaaggaggagcttggatttagtcccgacatagtttcagctgttggatttggagtcccaccctgtgtatcgagagagatagccgagagttgcgcaagctatgtcaccactgttgtattgcaggatgatatagttcctaggttaagtgcagcttcactggcaagattgcgaaatgagataattgaaacagattgggccaaagttttggagaaggaagattggaagcatatagtggatatcgtgaccaatgctaagctagttgtttcgtccatccaagacgtggcaaacaaacttgccgattacgccaaagttgtaacatcagctagctccggtgatgccgcgaaagaccagccccgtcttcagggcccgacgaaagttttgaagcctgacggtgaagaagacgtctatgtgcctgaggatctcttcctcccagggacgctgtattacctccagagggacgtcgagaatataaatggcgttgaggacgagtcgtacacgctctggagaggcaacgccggggagaatttccagcggatactgttgtctggcaatttgatgtctgatcacaaatgcgatagcatacagtacgcgctcagagatgtgctcaagactctgcccctccctctgcccctgcaggaggattgatactaccaagttccaaagcttatgcagaaagcgggcttcgcaaaaatcgagtgttttgttgtacagttttaggttatgcaagggattgccaagaatgacaaagtgctaggaaactctcaagttgcagttcagagtttctggtgctgatctaggtgtagtacacctcttctttttttacaagaggtatatatagtgtaactctttgaaacttgagataaaagggtgacg

SEQ ID NO: 11083 - protein, 540 aa, Triticum aestivum
  misc_feature (1)..(540): Ceres Seq. ID no. 13597827
IYPGPAEPMAAKHLLSRARLLLTRHRSRPTILPPALTRLLFGGTTTPAEPEDDDKARARAAAAAAAVALDAKRAKREGSDDDDEGAGLPWTSWRPDVAWLTKALEPALQLYKHYNWKPFASDNIPASTRTFSEIISDLQHSKVSIQDWSLSDLTVGLYLIYLTQASAKNAQAFKGVQISSNKKVQELIYHLELAKGCYKGSATGLAKHSMLRPRNVLKFVKDSSIFRPGYYIGIDPRAKLVILGIRGTHTVYDLVTDLVALSDKKVSPKGFSTHFGTYEAARWYLRHELSIIRKCLEKHKDYKLRLVGHSLGGASAALLAIMLRKKSKEELGFSPDIVSAVGFGVPPCVSREIAESCASYVTTVVLQDDIVPRLSAASLARLRNEIIETDWAKVLEKEDWKHIVDIVTNAKLVVSSIQDVANKLADYAKVVTSASSGDAAKDQPRLQGPTKVLKPDGEEDVYVPEDLFLPGTLYYLQRDVENINGVEDESYTLWRGNAGENFQRILLSGNLMSDHKCDSIQYALRDVLKTLPLPLPLQED

SEQ ID NO: 11084 - protein, 532 aa, Triticum aestivum
  misc_feature (1)..(532): Ceres Seq. ID no. 13597828
MAAKHLLSRARLLLTRHRSRPTILPPALTRLLFGGTTTPAEPEDDDKARARAAAAAAAVALDAKRAKREGSDDDDEGAGLPWTSWRPDVAWLTKALEPALQLYKHYNWKPFASDNIPASTRTFSEIISDLQHSKVSIQDWSLSDLTVGLYLIYLTQASAKNAQAFKGVQISSNKKVQELIYHLELAKGCYKGSATGLAKHSMLRPRNVLKFVKDSSIFRPGYYIGIDPRAKLVILGIRGTHTVYDLVTDLVALSDKKVSPKGFSTHFGTYEAARWYLRHELSIIRKCLEKHKDYKLRLVGHSLGGASAALLAIMLRKKSKEELGFSPDIVSAVGFGVPPCVSREIAESCASYVTTVVLQDDIVPRLSAASLARLRNEIIETDWAKVLEKEDWKHIVDIVTNAKLVVSSIQDVANKLADYAKVVTSASSGDAAKDQPRLQGPTKVLKPDGEEDVYVPEDLFLPGTLYYLQRDVENINGVEDESYTLWRGNAGENFQRILLSGNLMSDHKCDSIQYALRDVLKTLPLPLPLQED

SEQ ID NO: 11085 - protein, 331 aa, Triticum aestivum
  misc_feature (1)..(331): Ceres Seq. ID no. 13597829
MLRPRNVLKFVKDSSIFRPGYYIGIDPRAKLVILGIRGTHTVYDLVTDLVALSDKKVSPKGFSTHFGTYEAARWYLRHELSIIRKCLEKHKDYKLRLVGHSLGGASAALLAIMLRKKSKEELGFSPDIVSAVGFGVPPCVSREIAESCASYVTTVVLQDDIVPRLSAASLARLRNEIIETDWAKVLEKEDWKHIVDIVTNAKLVVSSIQDVANKLADYAKVVTSASSGDAAKDQPRLQGPTKVLKPDGEEDVYVPEDLFLPGTLYYLQRDVENINGVEDESYTLWRGNAGENFQRILLSGNLMSDHKCDSIQYALRDVLKTLPLPLPLQED

SEQ ID NO: 11086 - DNA, 1289 bp, Triticum aestivum
  misc_feature (1)..(1289): Ceres Seq. ID no. 13597831
ttctgcgatttccatttgcttcctccgtcttctccatcccccctccctgctgccgaccatccctgagcactcccagtcccaggccattagcctagctagctaccccctccatgcgagggcggcaatggcgcccgcctccgcctccttcgccgtctccctctccgcccccgtccgcttaattccgcccagatgcttccgcggtaggccgaggtggtcccgcccaatcagggcttcgagcgacacgaagggcgccccgaacggggagcggaggatcggggctctggagaggagggtgggggatttgagggcgcttgtcgcctcggtgcctcctgctgttgtctcgatcaggaaaaacattggactaaattccattgccggtttcggtttcggcattgcatttttggctgctctcgcaagacaggtcatcataagaactcaacagcaagatagtagtggttctgtttctgatctagtaaggcgcgggcatctaaaatctgggcaacgtgggattgcaaagccacgtgtgtacaatgatcctttcaataattcattagtcaagatcgatgaagatacttctactgctcagatgtttggcaaggagtaccgcatggctcctgtccggcttacaaatgaacaacaggcaatgcatcagaaaaggagatcacatgcatatcagtggaaaaggcccactgtgtttcttaaagaaggtgatcccctgccaccagatgtcgatccagagacagttagatggattccagtaaaccacccatttgctgctggttcggttgaagtagatgaggagactgccaaaaggaatgtttaccaaaaggatggcgtcccgtcccgtgtaaaagccgaacatgaagctttgcgggcaaggctagaggcttcaaatgatgtaacaccattctctaacggtccaaggggtatgcaacatagtgcaagatcatcgaagttatcagacgagccatctgggaatctgcaacagtctaaacctgacatggtgaatgaccaaaatggccaaccaatgttagagcctgagcctgagcccaagagctctgacaacggttcactatcaaaaagcttggaaggacagtaacggtgtgaattgtataaacccttcggcactttgttttgttatgtagtgttgtcaggttttagctgtagatagaggagttttggaacaacagatttacgtactgaacacatgatatggagcagtgttattgttatgtgctgctgtatatctgatattttttttgcccgaagatctccagatgcacgatctc

SEQ ID NO: 11087 - protein, 365 aa, Triticum aestivum
  misc_feature (1)..(365): Ceres Seq. ID no. 15222207
SAISICFLRLLHPPSLLPTIPEHSQSQAISLASYPLHARAAMAPASASFAVSLSAPVRLIPPRCFRGRPRWSRPIRASSDTKGAPNGERRIGALERRVGDLRALVASVPPAVVSIRKNIGLNSIAGFGFGIAFLAALARQVIIRTQQQDSSGSVSDLVRRGHLKSGQRGIAKPRVYNDPFNNSLVKIDEDTSTAQMFGKEYRMAPVRLTNEQQAMHQKRRSHAYQWKRPTVFLKEGDPLPPDVDPETVRWIPVNHPFAAGSVEVDEETAKRNVYQKDGVPSRVKAEHEALRARLEASNDVTPFSNGPRGMQHSARSSKLSDEPSGNLQQSKPDMVNDQNGQPMLEPEPEPKSSDNGSLSKSLEGQ

SEQ ID NO: 11088 - protein, 324 aa, Triticum aestivum
  misc_feature (1)..(324): Ceres Seq. ID no. 15222208
MAPASASFAVSLSAPVRLIPPRCFRGRPRWSRPIRASSDTKGAPNGERRIGALERRVGDLRALVASVPPAVVSIRKNIGLNSIAGFGFGIAFLAALARQVIIRTQQQDSSGSVSDLVRRGHLKSGQRGIAKPRVYNDPFNNSLVKIDEDTSTAQMFGKEYRMAPVRLTNEQQAMHQKRRSHAYQWKRPTVFLKEGDPLPPDVDPETVRWIPVNHPFAAGSVEVDEETAKRNVYQKDGVPSRVKAEHEALRARLEASNDVTPFSNGPRGMQHSARSSKLSDEPSGNLQQSKPDMVNDQNGQPMLEPEPEPKSSDNGSLSKSLEGQ

SEQ ID NO: 11089 - DNA, 1748 bp, Triticum aestivum
  misc_feature (1)..(1748): Ceres Seq. ID no. 13597843
aatttcgtttcccattttgtacgcagctaataattctcgagcagcgttgcctgcacgcccagcctgtggtaaaaaacaagacccgccgtgtcacccgctcaaaagcttcctcgaccgcgggcataatccatccgagactcctagccgatcgtgcaccaaccagatgacgaccccgaccgtcgtgctgctgccggtctgggccgccggccacctcatgtccatgctcgacgccggcaagcggctgctcgcgcgcagcggcggcgcgctgtcgctcacggtgctcgtcatgccggcgccgggggagaaccacaggtgcgaggtcgccgcccacatacagagggaggaggcgtccggcctggacatccgcttccaccacctccccgccgtcgagcccccgacggactgcctgggcatcgaggagttcgtctcccggttcgtgcagctccacgcggcccacgtgaaggcggccgtctccggcctggcgtgccccgtggccgcgctcgtcctcgacttcttctgcacgaccatgctcgacgtgtcccgggagctcgccgtaccggcctacgtgtacatcaccgccgacgccgccttctgcgcgctcctcctgcgcctgccggcgctccacgaggaggtggccgtcgagttcgaggagatggagggcatggtgggcgtgcctggcctgccgccggtgccgccgtcgtccctcccggttccggtgatggacaagaagaaccccaactacacgtggttcatgtaccacggcaggcgtttcacggaggccaagggcgtcatcatcaacacggtcaccgagctggagcagagcgttcttgcagccatcggcgacggctggtgcgcgcccggatttcctgccccggcggtctatccagtaggccccgtgctctccgtgaccccgccagcggagcagccgcacgaatgcgtgcggtggctggacgcgcagcctccggcgtccgtggtgctcctctgcttcggcagcatggggttctccacggcggcacaggcgcacgagatagcccacgggctggagcgcagcgggcaccgcttcctgtgggctctgcgcggcccgccggctgccggcgcgggaccaggacagccctcggacgcggacctcggggagctgctcccggaggggttcctggagaggacgaaggagaagggcctggtgtggccgacgaaggccccgcagaaggagatcctggcgcacgccgccgtggggggcttcgtgacgcacggcgggtggaactcgaccctggagagcctgtggttcggcgtgccgatggtgccgtggccgctgtacgcggagcagcacctcaacgcgttcacgctggtggcctacatgggcgtggccgtggccatggaggtggaccggaagaggaacaactttgtcgccgcgtcggagctggagcgggccgtgaaggcgctcatggagcgcgactccgaggaggggaagagggcgagggagaaggccgcggagatgaaggccgcgtgccggaaggccgtcgaggagggcgggtcctcctactctgccctcgggaggctctctgaggcgataatcaaaggcgccagtaagtaattgacgaacatccggagacgaacttggagagtgtgggtgctctgtggttgcagttcttgttctgcctgccgatcattccgagttgtgtgccggcatcgcgagcaatccacctccggtagagagccttaataaaaccacatgctcctcgtttggtctc

SEQ ID NO: 11090 - protein, 529 aa, Triticum aestivum
  misc_feature (1)..(529): Ceres Seq. ID no. 13597844
ISFPILYAANNSRAALPARPACGKKQDPPCHPLKSFLDRGHNPSETPSRSCTNQMTTPTVVLLPVWAAGHLMSMLDAGKRLLARSGGALSLTVLVMPAPGENHRCEVAAHIQREEASGLDIRFHHLPAVEPPTDCLGIEEFVSRFVQLHAAHVKAAVSGLACPVAALVLDFFCTTMLDVSRELAVPAYVYITADAAFCALLLRLPALHEEVAVEFEEMEGMVGVPGLPPVPPSSLPVPVMDKKNPNYTWFMYHGRRFTEAKGVIINTVTELEQSVLAAIGDGWCAPGFPAPAVYPVGPVLSVTPPAEQPHECVRWLDAQPPASVVLLCFGSMGFSTAAQAHEIAHGLERSGHRFLWALRGPPAAGAGPGQPSDADLGELLPEGFLERTKEKGLVWPTKAPQKEILAHAAVGGFVTHGGWNSTLESLWFGVPMVPWPLYAEQHLNAFTLVAYMGVAVAMEVDRKRNNFVAASELERAVKALMERDSEEGKRAREKAAEMKAACRKAVEEGGSSYSALGRLSEAIIKGASK

SEQ ID NO: 11091 - protein, 475 aa, Triticum aestivum
  misc_feature (1)..(475): Ceres Seq. ID no. 13597845
MTTPTVVLLPVWAAGHLMSMLDAGKRLLARSGGALSLTVLVMPAPGENHRCEVAAHIQREEASGLDIRFHHLPAVEPPTDCLGIEEFVSRFVQLHAAHVKAAVSGLACPVAALVLDFFCTTMLDVSRELAVPAYVYITADAAFCALLLRLPALHEEVAVEFEEMEGMVGVPGLPPVPPSSLPVPVMDKKNPNYTWFMYHGRRFTEAKGVIINTVTELEQSVLAAIGDGWCAPGFPAPAVYPVGPVLSVTPPAEQPHECVRWLDAQPPASVVLLCFGSMGFSTAAQAHEIAHGLERSGHRFLWALRGPPAAGAGPGQPSDADLGELLPEGFLERTKEKGLVWPTKAPQKEILAHAAVGGFVTHGGWNSTLESLWFGVPMVPWPLYAEQHLNAFTLVAYMGVAVAMEVDRKRNNFVAASELERAVKALMERDSEEGKRAREKAAEMKAACRKAVEEGGSSYSALGRLSEAIIKGASK

SEQ ID NO: 11092 - protein, 458 aa, Triticum aestivum
  misc_feature (1)..(458): Ceres Seq. ID no. 13597846
MSMLDAGKRLLARSGGALSLTVLVMPAPGENHRCEVAAHIQREEASGLDIRFHHLPAVEPPTDCLGIEEFVSRFVQLHAAHVKAAVSGLACPVAALVLDFFCTTMLDVSRELAVPAYVYITADAAFCALLLRLPALHEEVAVEFEEMEGMVGVPGLPPVPPSSLPVPVMDKKNPNYTWFMYHGRRFTEAKGVIINTVTELEQSVLAAIGDGWCAPGFPAPAVYPVGPVLSVTPPAEQPHECVRWLDAQPPASVVLLCFGSMGFSTAAQAHEIAHGLERSGHRFLWALRGPPAAGAGPGQPSDADLGELLPEGFLERTKEKGLVWPTKAPQKEILAHAAVGGFVTHGGWNSTLESLWFGVPMVPWPLYAEQHLNAFTLVAYMGVAVAMEVDRKRNNFVAASELERAVKALMERDSEEGKRAREKAAEMKAACRKAVEEGGSSYSALGRLSEAIIKGASK

SEQ ID NO: 11093 - DNA, 1155 bp, Triticum aestivum
  misc_feature (1)..(1155): Ceres Seq. ID no. 13597851
accgatcatttccacccgacgcttccaccgcccgaatccagccagccagccagccaggcgaagctgcgaggatgtaccgagatcccaatcccttcgacgagggcgccgacgacagcgccttctccaatgggggaggacgcggtggtgccgctggtggtggtggcggcaagtcgcagttccagtttcgcccgacggagcccgtcggattcggcgccggtggcaacggggacgccgccgtcgacatcccccttgacaacatgaacggttcgaatggcaagcaaagtgagctctcgcagtggcaggcagatctcaagaggcgagaggcggacataaagaggagggaggaagctctcaagagtgctggggtgcccatggaggacaagaactggccgccattcttcccaatcatccaccacgacattgcccatgaaataccagccaacgcgcagcggttgcagtatcttgcttttgctagctggctcggcatcgtgctttgcctcgtttggaatttcattgctgtcacagtctgttggatcagagggggggactctaaactgtttttcctggctactatctacggtatgcttggagtacctttgtcctacttgatgtggtataggcctctgtaccgtgcaatgagaactgacagcgcattcagctttgggtggtttttcctttgttacatgctccacattggcttttgtataattgctgccattgctccgccgatcgtatttcgtgggaagtcattaacgggtatactggctgcaatcgataccttctctgatcatgcattagttgggatactttactttgttggatttgccttgttttcactggagacagttgtgagcatttgggttcttcagagagtatacatgtatttcagagggcacaagtgaagcgggcaacggaagaaaatacagaagtccaccggtgtcatcggagcgtgctgcggttctgtgcatacatatgagtacatgccattctttgtatgttatggtagttatgggaataatttgcctcagaaattcagaagtttgtttatttgttgcaagagagtagaagtgtaacaaacgttgtattagtgttatctcttgaactgtctgttgtttaaaaccttggatcttacctatataaactgcatgttgttgg

SEQ ID NO: 11094 - protein, 299 aa, Triticum aestivum
  misc_feature (1)..(299): Ceres Seq. ID no. 15222209
RSFPPDASTARIQPASQPGEAARMYRDPNPFDEGADDSAFSNGGGRGGAAGGGGGKSQFQFRPTEPVGFGAGGNGDAAVDIPLDNMNGSNGKQSELSQWQADLKRREADIKRREEALKSAGVPMEDKNWPPFFPIIHHDIAHEIPANAQRLQYLAFASWLGIVLCLVWNFIAVTVCWIRGGDSKLFFLATIYGMLGVPLSYLMWYRPLYRAMRTDSAFSFGWFFLCYMLHIGFCIIAAIAPPIVFRGKSLTGILAAIDTFSDHALVGILYFVGFALFSLETVVSIWVLQRVYMYFRGHK

SEQ ID NO: 11095 - protein, 276 aa, Triticum aestivum
  misc_feature (1)..(276): Ceres Seq. ID no. 15222210
MYRDPNPFDEGADDSAFSNGGGRGGAAGGGGGKSQFQFRPTEPVGFGAGGNGDAAVDIPLDNMNGSNGKQSELSQWQADLKRREADIKRREEALKSAGVPMEDKNWPPFFPIIHHDIAHEIPANAQRLQYLAFASWLGIVLCLVWNFIAVTVCWIRGGDSKLFFLATIYGMLGVPLSYLMWYRPLYRAMRTDSAFSFGWFFLCYMLHIGFCIIAAIAPPIVFRGKSLTGILAAIDTFSDHALVGILYFVGFALFSLETVVSIWVLQRVYMYFRGHK

SEQ ID NO: 11096 - protein, 214 aa, Triticum aestivum
  misc_feature (1)..(214): Ceres Seq. ID no. 15222211
MNGSNGKQSELSQWQADLKRREADIKRREEALKSAGVPMEDKNWPPFFPIIHHDIAHEIPANAQRLQYLAFASWLGIVLCLVWNFIAVTVCWIRGGDSKLFFLATIYGMLGVPLSYLMWYRPLYRAMRTDSAFSFGWFFLCYMLHIGFCIIAAIAPPIVFRGKSLTGILAAIDTFSDHALVGILYFVGFALFSLETVVSIWVLQRVYMYFRGHK

SEQ ID NO: 11097 - DNA, 1407 bp, Triticum aestivum
  misc_feature (1)..(1407): Ceres Seq. ID no. 13597866
gcaagcaaccacccatggacacgcccgtgccgaaacggcctcgcctcgtgccagcaccggcaccggcgcctcggacaatcgccgacatggccccggagatcctcctccgcctccctccagacgaccccccgcgccttgtgcgcgcctcccttgtctgctggcgctggcgccgcctcctcaccgacccggcgtacctccgccgctaccgcgcattccatcgaacacctcccatgctcggcttcgtcctcaacctgaaacagcactaccaaggcatggcccagctcgtccccacctcctccttccgccccgctgcctccgaccgccccggcctgaatgtgctggacgcccgccacggccgcgtgctcctccacaccgctcagggccagcgcctcgtcgtctgggaccccgtcacgggtgaagagtgcaagatcccccgcgtgccgtcctacgcgctcggcttcaacgcggccgtgctctgcgccgcggtcggctgcgaccacctcgactgtcatggcggacccttccgtgtcgccttcgtgggatgcggcgaacgcggcatcacgttcgcctgcacctactcgtcggaggccggtgcctggagccagcgaattgagatcgagcagccggcgtttgttgacgggcgaccgagcgtccttgtggggaacacgctctacttcacctgcgacccgtacctcagtttcaaaatgttggggtacaacatcgtcacgcaggaactctcggtgatctggccgccgtcccagcatgagtactactcttgcactgtcctcgtgaaagcggatgatggcaagctggggttcgccggcgtgcagaatggcacgctctacctgtggtcgatgaaggacggcgccgacggatatgtggaatgggtgcagcgcagagttatccagcacaagacgatgctccgtactcgtggcctctcgacgccacctgaggtcgttggcttcgcggatggtcacggattcattttcgtgaggacaggcaacacggtgttctccatggatctcaagtcaggccatgtccgtaaagtatacacctgcaggtcaagaaactacgacgtcatcgttgttccctacatgagcttctgcactccagatcgtgctatgggcagactgccatcgccacgaggacccactgtcatcctgtaacaaggacttgctgctcttggcttgttgcatagatgacgctcaaagtattttgctttcaaggtggactgtttaagtagttaccatggtcaatgttggtatgtttagtttacagtgtggcagttgaaacaaggaaaaaagtaatatgtaatcacggtcagtttagtatgttctctttgcagttgtgaagcttaagcaagactgatggttaattagtagaaaaaaaaaaaaaaaaaagcttatc

SEQ ID NO: 11098 - protein, 387 aa, Triticum aestivum
  misc_feature (1)..(387): Ceres Seq. ID no. 13597867
KQPPMDTPVPKRPRLVPAPAPAPRTIADMAPEILLRLPPDDPPRLVRASLVCWRWRRLLTDPAYLRRYRAFHRTPPMLGFVLNLKQHYQGMAQLVPTSSFRPAASDRPGLNVLDARHGRVLLHTAQGQRLVVWDPVTGEECKIPRVPSYALGFNAAVLCAAVGCDHLDCHGGPFRVAFVGCGERGITFACTYSSEAGAWSQRIEIEQPAFVDGRPSVLVGNTLYFTCDPYLSFKMLGYNIVTQELSVIWPPSQHEYYSCTVLVKADDGKLGFAGVQNGTLYLWSMKDGADGYVEWVQRRVIQHKTMLRTRGLSTPPEVVGFADGHGFIFVRTGNTVFSMDLKSGHVRKVYTCRSRNYDVIVVPYMSFCTPDRAMGRLPSPRGPTVIL

SEQ ID NO: 11099 - protein, 383 aa, Triticum aestivum
  misc_feature (1)..(383): Ceres Seq. ID no. 13597868
MDTPVPKRPRLVPAPAPAPRTIADMAPEILLRLPPDDPPRLVRASLVCWRWRRLLTDPAYLRRYRAFHRTPPMLGFVLNLKQHYQGMAQLVPTSSFRPAASDRPGLNVLDARHGRVLLHTAQGQRLVVWDPVTGEECKIPRVPSYALGFNAAVLCAAVGCDHLDCHGGPFRVAFVGCGERGITFACTYSSEAGAWSQRIEIEQPAFVDGRPSVLVGNTLYFTCDPYLSFKMLGYNIVTQELSVIWPPSQHEYYSCTVLVKADDGKLGFAGVQNGTLYLWSMKDGADGYVEWVQRRVIQHKTMLRTRGLSTPPEVVGFADGHGFIFVRTGNTVFSMDLKSGHVRKVYTCRSRNYDVIVVPYMSFCTPDRAMGRLPSPRGPTVIL

SEQ ID NO: 11100 - protein, 359 aa, Triticum aestivum
  misc_feature (1)..(359): Ceres Seq. ID no. 13597869
MAPEILLRLPPDDPPRLVRASLVCWRWRRLLTDPAYLRRYRAFHRTPPMLGFVLNLKQHYQGMAQLVPTSSFRPAASDRPGLNVLDARHGRVLLHTAQGQRLVVWDPVTGEECKIPRVPSYALGFNAAVLCAAVGCDHLDCHGGPFRVAFVGCGERGITFACTYSSEAGAWSQRIEIEQPAFVDGRPSVLVGNTLYFTCDPYLSFKMLGYNIVTQELSVIWPPSQHEYYSCTVLVKADDGKLGFAGVQNGTLYLWSMKDGADGYVEWVQRRVIQHKTMLRTRGLSTPPEVVGFADGHGFIFVRTGNTVFSMDLKSGHVRKVYTCRSRNYDVIVVPYMSFCTPDRAMGRLPSPRGPTVIL

SEQ ID NO: 11101 - DNA, 1205 bp, Triticum aestivum
  misc_feature (1)..(1205): Ceres Seq. ID no. 13597888
actcctctccaccgcctggacgccgcgccgccgcctcgaccgagcctcggccacgcggctcgccccgtcccccggcctgtcctgccgctcctcccggccgacgcgctccgtgcgcccgatggcgtcgtcgacgaccgcggcccgggccgacgcggcgccgccggggctgaaggagggcatcgcggggctctacgacgagtcgtccggcctgtgggagagcatctggggcgagcacatgcaccacggcttctacgactccggcgaggccgcctccatgtccgaccaccgccgcgcccagatccgcatgatcgaggaggccctcgccttcgccgccgtccccgacgatccgacaaacaaaccgaaaacgattgttgatgttggatgcggaatcggtggtagctcaagatacctggcgaacaaatatggagcacaatgctctgggatcacattgagcccagtgcaagccgagagaggaaatgccctcgcagcagtgcaggggttgtcggacaaggcttctttccaagttgctgatgctctggagcaaccatttcctgatgggcagtttgatcttgtctggtctatggagagtggtgagcacatgccgaacaaacagaagtttgtaagcgagctggcacgcgtcgcagctccaggagcaactatcatcatcgtgacctggtgccataggaacctcgcgccgtcggaggactcactgaaacctgacgagctgaatcttttgaaaaagatttgtgatgcatattacctcccagattggtgctcgccctcggattatgtcaagattgccgagtcattgtctcttgaggatatcaaaacggctgactggtctgaaaacgtggccccgttctggcctgctgtcatccaatcagcactgacatggaaaggcctcacttctctactaaggagtggatggaagacgataaagggagcactggtgatgcctctcatgatccaaggctacaagaaaggcctcattaagttcagcatcatcacctgccgcaaaccccaagcagcaatagaaggagaacctgaggccgcatcgcccagtgtagaatagaacccatgtgattggaatagactcggcttgctgtcgcctcgtagctgaataatttcatgttaccgtgcatctgtatctgcaactggaagtgccatatgaaagtggttcctaaagcaaaattctcctcacattc

SEQ ID NO: 11102 - protein, 356 aa, Triticum aestivum
  misc_feature (1)..(356): Ceres Seq. ID no. 13597889
LLSTAWTPRRRLDRASATRLAPSPGLSCRSSRPTRSVRPMASSTTAARADAAPPGLKEGIAGLYDESSGLWESIWGEHMHHGFYDSGEAASMSDHRRAQIRMIEEALAFAAVPDDPTNKPKTIVDVGCGIGGSSRYLANKYGAQCSGITLSPVQAERGNALAAVQGLSDKASFQVADALEQPFPDGQFDLVWSMESGEHMPNKQKFVSELARVAAPGATIIIVTWCHRNLAPSEDSLKPDELNLLKKICDAYYLPDWCSPSDYVKIAESLSLEDIKTADWSENVAPFWPAVIQSALTWKGLTSLLRSGWKTIKGALVMPLMIQGYKKGLIKFSIITCRKPQAAIEGEPEAASPSVE

SEQ ID NO: 11103 - protein, 317 aa, Triticum aestivum
  misc_feature (1)..(317): Ceres Seq. ID no. 13597890
MASSTTAARADAAPPGLKEGIAGLYDESSGLWESIWGEHMHHGFYDSGEAASMSDHRRAQIRMIEEALAFAAVPDDPTNKPKTIVDVGCGIGGSSRYLANKYGAQCSGITLSPVQAERGNALAAVQGLSDKASFQVADALEQPFPDGQFDLVWSMESGEHMPNKQKFVSELARVAAPGATIIIVTWCHRNLAPSEDSLKPDELNLLKKICDAYYLPDWCSPSDYVKIAESLSLEDIKTADWSENVAPFWPAVIQSALTWKGLTSLLRSGWKTIKGALVMPLMIQGYKKGLIKFSIITCRKPQAAIEGEPEAASPSVE

SEQ ID NO: 11104 - protein, 278 aa, Triticum aestivum
  misc_feature (1)..(278): Ceres Seq. ID no. 13597891
MHHGFYDSGEAASMSDHRRAQIRMIEEALAFAAVPDDPTNKPKTIVDVGCGIGGSSRYLANKYGAQCSGITLSPVQAERGNALAAVQGLSDKASFQVADALEQPFPDGQFDLVWSMESGEHMPNKQKFVSELARVAAPGATIIIVTWCHRNLAPSEDSLKPDELNLLKKICDAYYLPDWCSPSDYVKIAESLSLEDIKTADWSENVAPFWPAVIQSALTWKGLTSLLRSGWKTIKGALVMPLMIQGYKKGLIKFSIITCRKPQAAIEGEPEAASPSVE

SEQ ID NO: 11105 - DNA, 959 bp, Triticum aestivum
  misc_feature (1)..(959): Ceres Seq. ID no. 13597898
gcactactacagtccaagccgcaccgctctctcgctagccacctccctctcgtccgccaccgcattaactcttcgcccaccgcttcccaacaaacccgccgcccgcccttgaccgcggcagccatggcgctcgcagcggcacaacgccagcggtcggcgtcggccgtgctggtcgcggcggtgctgctatcgctttcactctcactctcatgcgtgcaggcgcaggcgccgcacgtggcggtgccaccttcggctcccccgaaggcggcggcggcgcctgggccggccgcggggttgagcgcggcgtgcctcaactcgctgctcaacatgtcggactgcctgccgtacgtgcaggccgggagcaaggcgcgggcgccggacaagccgtgctgcccggagctggccggcatggtgggctccaaccccgtctgcctctgcgagctcctctccggggccgccgactccctcggcatcgccgtcgactacgcccgcgcgctcgcgctccccggcgtctgccgcgtcgccaccccgcccatcaccacctgcgcagcaatgggatacaacgttcgtctgggcccgtctccggcgcccgcgccgggatctccctcgcccatgtcgcccggcggcagcccacagtaccccgctggtccttcgccgttcgcctcgccgccggagtcgcccaagcccagccacgcggcgcgccgcttccacgccgccggcgccctygtcgccctcgccgcctccttygccgtcgggatggccttcttytaagcggacaaggccagcgagactgttaaccgttcgataaaaatctgtcgcgtgaatgtcatggacatgctttctccgtctctagtctgtgcgctagtactccagtatgatgattctaggtagataagataatacagtaccagttatttcccgccaatatgttatgtgctatgctaatcaattgatctgtc

SEQ ID NO: 11106 - protein, 256 aa, Triticum aestivum
  misc_feature (1)..(256): Ceres Seq. ID no. 15222229
  misc_feature (242)..(242): Xaa is any aa, unknown or other
  misc_feature (249)..(249): Xaa is any aa, unknown or other
  misc_feature (256)..(256): Xaa is any aa, unknown or other
ALLQSKPHRSLASHLPLVRHRINSSPTASQQTRRPPLTAAAMALAAAQRQRSASAVLVAAVLLSLSLSLSCVQAQAPHVAVPPSAPPKAAAAPGPAAGLSAACLNSLLNMSDCLPYVQAGSKARAPDKPCCPELAGMVGSNPVCLCELLSGAADSLGIAVDYARALALPGVCRVATPPITTCAAMGYNVRLGPSPAPAPGSPSPMSPGGSPQYPAGPSPFASPPESPKPSHAARRFHAAGAXVALAASXAVGMAFX

SEQ ID NO: 11107 - protein, 215 aa, Triticum aestivum
  misc_feature (1)..(215): Ceres Seq. ID no. 15222230
  misc_feature (201)..(201): Xaa is any aa, unknown or other
  misc_feature (208)..(208): Xaa is any aa, unknown or other
  misc_feature (215)..(215): Xaa is any aa, unknown or other
MALAAAQRQRSASAVLVAAVLLSLSLSLSCVQAQAPHVAVPPSAPPKAAAAPGPAAGLSAACLNSLLNMSDCLPYVQAGSKARAPDKPCCPELAGMVGSNPVCLCELLSGAADSLGIAVDYARALALPGVCRVATPPITTCAAMGYNVRLGPSPAPAPGSPSPMSPGGSPQYPAGPSPFASPPESPKPSHAARRFHAAGAXVALAASXAVGMAFX

SEQ ID NO: 11108 - protein, 195 aa, Triticum aestivum
  misc_feature (1)..(195): Ceres Seq. ID no. 15222231
  misc_feature (173)..(173): Xaa is any aa, unknown or other
  misc_feature (180)..(180): Xaa is any aa, unknown or other
  misc_feature (187)..(187): Xaa is any aa, unknown or other
MRAGAGAARGGATFGSPEGGGGAWAGRGVERGVPQLAAQHVGLPAVRAGREQGAGAGQAVLPGAGRHGGLQPRLPLRAPLRGRRLPRHRRRLRPRARAPRRLPRRHPAHHHLRSNGIQRSSGPVSGARAGISLAHVARRQPTVPRWSFAVRLAAGVAQAQPRGAPLPRRRRPXRPRRLLXRRDGLLXSGQGQRDC

SEQ ID NO: 11109 - DNA, 1409 bp, Triticum aestivum
  misc_feature (1)..(1409): Ceres Seq. ID no. 13597899
caaaaccgtttgctccgtttcccccaaatctgccgcacgacccaaacaaaacccttgcggcggcgccccaccccatctccggcggccaagcggaatggagcgctcggcggcgggcgcctcgtaccagcgcttcccgcgcgtgcggatccgcgagctcaaggacgagtacgccaagttcgagctcaaggacaccgacgcgagcatggccaacgccctccgccgcgtcatgatcgccgaggtccccaccgtcgccatcgacctcgtcgagatcgagagcaactcctccgtcctcaacgacgagttcctcgcgcaccgcctcggcctcatcccgctcacctcctccgccgccatgtccatgcgcttctcccgcgactgcgacgcctgcgacggggacggctcctgcgagtactgctccgtcgagttccacctcgccgcccgcgccaccgactccggccagacgctcgaggtcacctccaccaaggacctccgctccaccgaccccaaggtctgccctgtcgaccagcaaagggagtaccagcaggccctcggcaacgtcgacgcttacgagcccgatgctgccggtgaccacaggggcatattaattgtaaagctgcgccgtgggcaagagctgcgtcttcgagcaattgccaggaagggaattggaaaggaccatgccaaatggtctccagctgctactgtgaccttcatgtatgagcctgacatacgtattaaccaagaactcatggagacacttacacttgaggaaaaacaaagctgggtggagagcagccctacaaaagtatttgacattgatcctgtcacccaacaggtgacgattgtggacccagaggcctacacatatgacgatgaggtgatcaagaaagcagaggccatggggaagccaggattggtagagatcaacgccaaggaggacagctttgtgttcactgtggagacaacgggggccattacagcctatgagctgattatgaacgctatcacggtcctgaggcagaagctggacgccgttcgcctgcaagacgatgacggcgatctgggcgagctcggcgcccaccttatcggaggctaaccaccgcttgtctgggaaagaagtcgccagcggtatctttgtttctccgtatctaggctcgtctcgtctaactggcttgcctgtggcaagtggtagttgatgcctcctttgatatgcagcaccagaactctacggtaatcgcctttgtatccctctgtttatgccctgacctctgccggaactctgtacgtgcaaaaagccatgggcgctgaagcttagcggcactgtggaacaagagaatagctggtagcccatgattggccgtgccgtgcggtggtgatacggcgtggtgtcttgaatgcagagttattcgcagggc

SEQ ID NO: 11110 - protein, 362 aa, Triticum aestivum
  misc_feature (1)..(362): Ceres Seq. ID no. 13597900
KTVCSVSPKSAARPKQNPCGGAPPHLRRPSGMERSAAGASYQRFPRVRIRELKDEYAKFELKDTDASMANALRRVMIAEVPTVAIDLVEIESNSSVLNDEFLAHRLGLIPLTSSAAMSMRFSRDCDACDGDGSCEYCSVEFHLAARATDSGQTLEVTSTKDLRSTDPKVCPVDQQREYQQALGNVDAYEPDAAGDHRGILIVKLRRGQELRLRAIARKGIGKDHAKWSPAATVTFMYEPDIRINQELMETLTLEEKQSWVESSPTKVFDIDPVTQQVTIVDPEAYTYDDEVIKKAEAMGKPGLVEINAKEDSFVFTVETTGAITAYELIMNAITVLRQKLDAVRLQDDDGDLGELGAHLIGG

SEQ ID NO: 11111 - protein, 331 aa, Triticum aestivum
  misc_feature (1)..(331): Ceres Seq. ID no. 13597901
MERSAAGASYQRFPRVRIRELKDEYAKFELKDTDASMANALRRVMIAEVPTVAIDLVEIESNSSVLNDEFLAHRLGLIPLTSSAAMSMRFSRDCDACDGDGSCEYCSVEFHLAARATDSGQTLEVTSTKDLRSTDPKVCPVDQQREYQQALGNVDAYEPDAAGDHRGILIVKLRRGQELRLRAIARKGIGKDHAKWSPAATVTFMYEPDIRINQELMETLTLEEKQSWVESSPTKVFDIDPVTQQVTIVDPEAYTYDDEVIKKAEAMGKPGLVEINAKEDSFVFTVETTGAITAYELIMNAITVLRQKLDAVRLQDDDGDLGELGAHLIGG

SEQ ID NO: 11112 - protein, 295 aa, Triticum aestivum
  misc_feature (1)..(295): Ceres Seq. ID no. 13597902
MANALRRVMIAEVPTVAIDLVEIESNSSVLNDEFLAHRLGLIPLTSSAAMSMRFSRDCDACDGDGSCEYCSVEFHLAARATDSGQTLEVTSTKDLRSTDPKVCPVDQQREYQQALGNVDAYEPDAAGDHRGILIVKLRRGQELRLRAIARKGIGKDHAKWSPAATVTFMYEPDIRINQELMETLTLEEKQSWVESSPTKVFDIDPVTQQVTIVDPEAYTYDDEVIKKAEAMGKPGLVEINAKEDSFVFTVETTGAITAYELIMNAITVLRQKLDAVRLQDDDGDLGELGAHLIGG

SEQ ID NO: 11113 - DNA, 691 bp, Triticum aestivum
  misc_feature (1)..(691): Ceres Seq. ID no. 13597970
acacactgcagacaatggcgtctccagccagaagcgcgagcgcctctccagtcctcctcttgctcgtcgtcctcgccgccggggcaagcgcggcaccgctcaccatcacgaaccggtgccacttcacggtgtggccggcggtggcgctcgtgctccaccaagggggcggcggcaccgagctccacccaggggccagctggagcctcgacacgccggtgatcggctcccagtacatatgggggcgcacgggctgctccttcgaccgggccggcaaggggcggtgccagaccggcgactgcggtggcagctcgctgacttgcgggggcaacccggcggtgccggtgaccatggccgaggtgtccgtgctccaaggcaactatacctacggcgtcacgtcgacgctcaaggggttcaacctgcccatggacctgaagtgcagctccggcgacgcgctcccgtgccggaaggctgggtgcgacgttgtccagccgtacgcgaagagctgcagcgcggctggaagccggctccagatcgtcttctgcccatgatgagcggcagaacatatatagcacgtatacgcatgtaataaccaccgcacgtacgggtagtagtacctccgtataccgtacacgtgtgtcaggtattcccagccgcagtgcatacactcgagcgagattccaataaaggtgcc

SEQ ID NO: 11114 - protein, 194 aa, Triticum aestivum
  misc_feature (1)..(194): Ceres Seq. ID no. 13597971
HTADNGVSSQKRERLSSPPLARRPRRRGKRGTAHHHEPVPLHGVAGGGARAPPRGRRHRAPPRGQLEPRHAGDRLPVHMGAHGLLLRPGRQGAVPDRRLRWQLADLRGQPGGAGDHGRGVRAPRQLYLRRHVDAQGVQPAHGPEVQLRRRAPVPEGWVRRCPAVREELQRGWKPAPDRLLPMMSGRTYIARIRM

SEQ ID NO: 11115 - protein, 181 aa, Triticum aestivum
  misc_feature (1)..(181): Ceres Seq. ID no. 13597972
TLQTMASPARSASASPVLLLLVVLAAGASAAPLTITNRCHFTVWPAVALVLHQGGGGTELHPGASWSLDTPVIGSQYIWGRTGCSFDRAGKGRCQTGDCGGSSLTCGGNPAVPVTMAEVSVLQGNYTYGVTSTLKGFNLPMDLKCSSGDALPCRKAGCDVVQPYAKSCSAAGSRLQIVFCP

SEQ ID NO: 11116 - protein, 177 aa, Triticum aestivum
  misc_feature (1)..(177): Ceres Seq. ID no. 13597973
MASPARSASASPVLLLLVVLAAGASAAPLTITNRCHFTVWPAVALVLHQGGGGTELHPGASWSLDTPVIGSQYIWGRTGCSFDRAGKGRCQTGDCGGSSLTCGGNPAVPVTMAEVSVLQGNYTYGVTSTLKGFNLPMDLKCSSGDALPCRKAGCDVVQPYAKSCSAAGSRLQIVFCP

SEQ ID NO: 11117 - DNA, 723 bp, Triticum aestivum
  misc_feature (1)..(723): Ceres Seq. ID no. 13597990
caaggaaatctcttcatgtcatccgcgatggctggaagtccacaacatggagcatggcaatacccgttggtttgcaggagcgctggaaccgtgactgtgtatttgatgttaaagacatcagcttggagccatgcctttctgatcgcatggctatgctgagcagcaagaccatgaaggaacttcaagtgggacaccccatcctaagcatggatgatgacatcgtttacttgctttctgaaaccacacccaagcacatggacaagttggcactgatgtttgctattgatgtgaagaagtcaacactgcgaggattggctgagcttgatgtcaagaagttcgattacctgtccagcttctgcactagtgagatctgcaggggtacctgagcaatattaaggtaacttctttatgctggtagaagcgagctctatcgaataaacaaactgaagagggtaaaccatctgaggttcctgcgaagaactggctaggacaaagaaatttcaaccatgtttgttgaaacttgggagctggatgtgaccttggagattgaatttctttagttgatttatcatgtattacatgtaatgcaactatctgggttatattgcttgcttatgtacttgtcccggtcaaaaaaaagtgctagtgaacttgtgtgggctaaatgtcttggttgaaccatgtttttatgtgttttgatttggttttaattgttctgtatgc

SEQ ID NO: 11118 - protein, 127 aa, Triticum aestivum
  misc_feature (1)..(127): Ceres Seq. ID no. 13597991
RKSLHVIRDGWKSTTWSMAIPVGLQERWNRDCVFDVKDISLEPCLSDRMAMLSSKTMKELQVGHPILSMDDDIVYLLSETTPKHMDKLALMFAIDVKKSTLRGLAELDVKKFDYLSSFCTSEICRGT

SEQ ID NO: 11119 - protein, 110 aa, Triticum aestivum
  misc_feature (1)..(110): Ceres Seq. ID no. 13597992
MAIPVGLQERWNRDCVFDVKDISLEPCLSDRMAMLSSKTMKELQVGHPILSMDDDIVYLLSETTPKHMDKLALMFAIDVKKSTLRGLAELDVKKFDYLSSFCTSEICRGT

SEQ ID NO: 11120 - protein, 79 aa, Triticum aestivum
  misc_feature (1)..(79): Ceres Seq. ID no. 13597993
MAMLSSKTMKELQVGHPILSMDDDIVYLLSETTPKHMDKLALMFAIDVKKSTLRGLAELDVKKFDYLSSFCTSEICRGT

SEQ ID NO: 11121 - DNA, 737 bp, Triticum aestivum
  misc_feature (1)..(737): Ceres Seq. ID no. 13597999
gataggctgacagcactgggcgcccttcacctacgacttttcccccaccggcgcggcggcgcttgcgccgaagtctcccgccagtctacggccgcgcgccgccctgccggtttctttggaagggaatggcgggaggcgaggctaggggcggggagtgcggctactacacgacggacgacgcgctgtcccaggtgggcttcgggaggttccaggcgctggtgctggcctacgccggcgtgggctggaccgcggaggccatggagatcatgatgctgtccttcgtcggcccgtccgtgaaggacgagtggggaatctccggccagcaggaggggctcatcaccagcgtcgtcttcgccgggatgatcatcgggggctgcctcgggggcgtcatctcggactcatatggcagaaggtcgggcgcgctttggctcttgtctcttgataagtaattgtagtatctgccctcttctaaattctaattgaatggtccaagccaacaaacctggatcttgcaaatctttcaaggccataatgtgcctgtgggttgtggctaaattacattctccctccgttcacaaatataaggtgttttggatatttctgttagagttataatataagtcatgtaaacccctttgtatttatcccgttgtataaggggtttcctgcatatgtaccacacctgtacatgtatatatatcggcctatggcctcatgggaatacaagttgcttattc

SEQ ID NO: 11122 - protein, 107 aa, Triticum aestivum
  misc_feature (1)..(107): Ceres Seq. ID no. 13598000
MAGGEARGGECGYYTTDDALSQVGFGRFQALVLAYAGVGWTAEAMEIMMLSFVGPSVKDEWGISGQQEGLITSVVFAGMIIGGCLGGVISDSYGRRSGALWLLSLDK

SEQ ID NO: 11123 - protein, 89 aa, Triticum aestivum
  misc_feature (1)..(89): Ceres Seq. ID no. 13598001
DRLTALGALHLRLFPHRRGGACAEVSRQSTAARRPAGFFGREWREARLGAGSAATTRRTTRCPRWASGGSRRWCWPTPAWAGPRRPWRS

SEQ ID NO: 11124 - protein, 63 aa, Triticum aestivum
  misc_feature (1)..(63): Ceres Seq. ID no. 13598002
MEIMMLSFVGPSVKDEWGISGQQEGLITSVVFAGMIIGGCLGGVISDSYGRRSGALWLLSLDK

SEQ ID NO: 11125 - DNA, 634 bp, Triticum aestivum
  misc_feature (1)..(634): Ceres Seq. ID no. 13598011
taaatttggaatcaaagatgccatatctagatcaaaggagcgaaagggaacattacacaaccaacagaaggttctgaatgaggagagactgaagcggaaaaggctggctgcggcagcgaaactgccagatagctaccctgttgtaacacaaagcacagcggccatgcaagtggcacatccatccatgtccaaccccgttacaacataccctgtgactgactatggacagaaccaggtcccgaaaagtcttgaaagggttcgcgaaacgagctcaagtgcaatagctgatgagagcagcaaaaatgctggtgacatgaagaagaagaaaaggaagtcggatcctgatgttgtcgatacacaagccaacattgttaccatgcccaccgtgcttggtctccctttctatgaccaacaaccaagctgattatttcgctgtgacatcagataactttatttctgctcgtaaacttttggggggtggtgtgagaaaatatccctgtagagagagcatgccattttgtaatctctcccggttaacagagttcggttcgaccccctttatatcggtcgtaacttgtaaagcatgagttttatctgttaccgttgagatgtaaattcagattgggaatgtggt

SEQ ID NO: 11126 - protein, 140 aa, Triticum aestivum
  misc_feature (1)..(140): Ceres Seq. ID no. 13598012
KFGIKDAISRSKERKGTLHNQQKVLNEERLKRKRLAAAAKLPDSYPVVTQSTAAMQVAHPSMSNPVTTYPVTDYGQNQVPKSLERVRETSSSAIADESSKNAGDMKKKKRKSDPDVVDTQANIVTMPTVLGLPFYDQQPS

SEQ ID NO: 11127 - protein, 86 aa, Triticum aestivum
  misc_feature (1)..(86): Ceres Seq. ID no. 13598013
MQVAHPSMSNPVTTYPVTDYGQNQVPKSLERVRETSSSAIADESSKNAGDMKKKKRKSDPDVVDTQANIVTMPTVLGLPFYDQQPS

SEQ ID NO: 11128 - protein, 80 aa, Triticum aestivum
  misc_feature (1)..(80): Ceres Seq. ID no. 13598014
MLSIHKPTLLPCPPCLVSLSMTNNQADYFAVTSDNFISARKLLGGGVRKYPCRESMPFCNLSRLTEFGSTPFISVVTCKA

SEQ ID NO: 11129 - DNA, 2300 bp, Triticum aestivum
  misc_feature (1)..(2300): Ceres Seq. ID no. 13598023
gcccgacctcccacctccgcagtacaaccccctcctcctcctcccgggcggccatggcggcatgtacgccagcgacggccgccgtgtccttctctcttccgtcgtacccgcgccgcctccggcgccgcccgtccctcctccgcgctgcgtccactgcggcgcccccgtcccccgacctctccatccagctctctccccgcccttccccgcgcacctcgcctcccgtagtaccatccctcgcccgcgaccgcgcagaggacctgcaggccgagtcccgcgccatgacccgagccgctgccgccaccgtctacacccccgagctactcgcctcccgctacggctcccaacctttccaggtggcgatgagagcggcggaggtgctctcgaagctgggggcattcgggctaaagctgctgctcgaccagcagaggggggagtcgtcctcgtcagcgaagaggcgtgccagggcggtcgagctgcgaactgtactgacaaggcttggcccgacgttcgtcaagattgggcagggtttgtccacgcggcctgacctctgcccgactgagtatctcgaggagctctccgagctgcaggattctctccccacatttccagatgaagaggcatttgcctgtatcgagagggagcttggctttcctcttgattcaatgtactcagcaatgtcaccttcaccgatagctgcagcaagtttaggtcaagtttacaaggcacggttgaaatactctgagcagttggtagctgtcaaggtgcaaagacctggcatcgaggatgccataggccgtgatttttacctactgaggggacttggttttctaataaataagtatgttgacattataactactgatgcagttgctctgatagatgaatttgcccgaagagttttccaagagcttaattatgtccaggaaggccaaaacgcacgaaggtttaaaaaattatatgctgacaagcaagacatattggtccctgatatattttgggattacacaagtgcaaaggtactgacaatggaatggattgagggtgtaaagcttaatcaacaagctgccattgaaggccaaggcttgaaggtcctggacttggtaaacattggtatacagtgtagcctaaggcagctactagagtatggttactttcatgctgacccgcatcctggtaatattttggcaacacctgaagggaagcttgcttttcttgattttggcatgatgagtgaaaccccagaggatgcaagggtagccatcatagggcatgtcgttcacatggtcaatcgggattatgaagcgatggctcgtgattattatgcacttgattttctgaaacctgaagtggatgtatccccaatcgtacctgccctcaagattttttttgatgatgctttggattcaacagtgagtgagctaaactttaaaaccatagttgatggcttaggcgctgttctttatcagtacccattcaatgtaccggcctactatgcgttgatactgcgatcactcactgtgctggaaggtctggcactctatgccgatcctaattttaaggtgcttgctgcctcatatccttactttgctaaaagattactcacagatcccaatccatatctcagagatgctctgattgagctgctattcaaggatgaaaaattcaggtggaataggcttgaaaatcttcttgttcaaggacgccaggatagagagtttgtagcgaaggatgctctacaaccggttttgaaacttctacttggtccagatggggagaatttaagagtgctagttgtgaaagaagcggttcgtgtcacagaagccatcaccttcggaacactgattgattcatacaacgcagctccagaatttttgaagccattaatatccaatggcaatccagctggaccatttaagataagtgatgttgagcgggaacaaatgttggagctacgagacactgttctcagaatatggggtcttctgagatcctctgatacctttgatccaagtcttttgcagccaattgtacaggtgctacaagagcgtgaagcccgtatgtttggttctcgtattgctggaggtgtctcgcagcgccttgcagcccgcttgctgcagcagctgctcaggatcccacctgcacctgttcctggatcttcttagaatctttgtagataggctcacactaaaccatgtaaattgacacgatactttctgcaccaaaaggaaaaaaaagaaaagcaactataataatcagtaggtaaaaaaaaaaaaaaaaaagcttatcgataccgtcga

SEQ ID NO: 11130 - protein, 720 aa, Triticum aestivum
  misc_feature (1)..(720): Ceres Seq. ID no. 15222246
PTSHLRSTTPSSSSRAAMAACTPATAAVSFSLPSYPRRLRRRPSLLRAASTAAPPSPDLSIQLSPRPSPRTSPPVVPSLARDRAEDLQAESRAMTRAAAATVYTPELLASRYGSQPFQVAMRAAEVLSKLGAFGLKLLLDQQRGESSSSAKRRARAVELRTVLTRLGPTFVKIGQGLSTRPDLCPTEYLEELSELQDSLPTFPDEEAFACIERELGFPLDSMYSAMSPSPIAAASLGQVYKARLKYSEQLVAVKVQRPGIEDAIGRDFYLLRGLGFLINKYVDIITTDAVALIDEFARRVFQELNYVQEGQNARRFKKLYADKQDILVPDIFWDYTSAKVLTMEWIEGVKLNQQAAIEGQGLKVLDLVNIGIQCSLRQLLEYGYFHADPHPGNILATPEGKLAFLDFGMMSETPEDARVAIIGHVVHMVNRDYEAMARDYYALDFLKPEVDVSPIVPALKIFFDDALDSTVSELNFKTIVDGLGAVLYQYPFNVPAYYALILRSLTVLEGLALYADPNFKVLAASYPYFAKRLLTDPNPYLRDALIELLFKDEKFRWNRLENLLVQGRQDREFVAKDALQPVLKLLLGPDGENLRVLVVKEAVRVTEAITFGTLIDSYNAAPEFLKPLISNGNPAGPFKISDVEREQMLELRDTVLRIWGLLRSSDTFDPSLLQPIVQVLQEREARMFGSRIAGGVSQRLAARLLQQLLRIPPAPVPGSS

SEQ ID NO: 11131 - protein, 703 aa, Triticum aestivum
  misc_feature (1)..(703): Ceres Seq. ID no. 15222247
MAACTPATAAVSFSLPSYPRRLRRRPSLLRAASTAAPPSPDLSIQLSPRPSPRTSPPVVPSLARDRAEDLQAESRAMTRAAAATVYTPELLASRYGSQPFQVAMRAAEVLSKLGAFGLKLLLDQQRGESSSSAKRRARAVELRTVLTRLGPTFVKIGQGLSTRPDLCPTEYLEELSELQDSLPTFPDEEAFACIERELGFPLDSMYSAMSPSPIAAASLGQVYKARLKYSEQLVAVKVQRPGIEDAIGRDFYLLRGLGFLINKYVDIITTDAVALIDEFARRVFQELNYVQEGQNARRFKKLYADKQDILVPDIFWDYTSAKVLTMEWIEGVKLNQQAAIEGQGLKVLDLVNIGIQCSLRQLLEYGYFHADPHPGNILATPEGKLAFLDFGMMSETPEDARVAIIGHVVHMVNRDYEAMARDYYALDFLKPEVDVSPIVPALKIFFDDALDSTVSELNFKTIVDGLGAVLYQYPFNVPAYYALILRSLTVLEGLALYADPNFKVLAASYPYFAKRLLTDPNPYLRDALIELLFKDEKFRWNRLENLLVQGRQDREFVAKDALQPVLKLLLGPDGENLRVLVVKEAVRVTEAITFGTLIDSYNAAPEFLKPLISNGNPAGPFKISDVEREQMLELRDTVLRIWGLLRSSDTFDPSLLQPIVQVLQEREARMFGSRIAGGVSQRLAARLLQQLLRIPPAPVPGSS

SEQ ID NO: 11132 - protein, 627 aa, Triticum aestivum
  misc_feature (1)..(627): Ceres Seq. ID no. 15222248
MTRAAAATVYTPELLASRYGSQPFQVAMRAAEVLSKLGAFGLKLLLDQQRGESSSSAKRRARAVELRTVLTRLGPTFVKIGQGLSTRPDLCPTEYLEELSELQDSLPTFPDEEAFACIERELGFPLDSMYSAMSPSPIAAASLGQVYKARLKYSEQLVAVKVQRPGIEDAIGRDFYLLRGLGFLINKYVDIITTDAVALIDEFARRVFQELNYVQEGQNARRFKKLYADKQDILVPDIFWDYTSAKVLTMEWIEGVKLNQQAAIEGQGLKVLDLVNIGIQCSLRQLLEYGYFHADPHPGNILATPEGKLAFLDFGMMSETPEDARVAIIGHVVHMVNRDYEAMARDYYALDFLKPEVDVSPIVPALKIFFDDALDSTVSELNFKTIVDGLGAVLYQYPFNVPAYYALILRSLTVLEGLALYADPNFKVLAASYPYFAKRLLTDPNPYLRDALIELLFKDEKFRWNRLENLLVQGRQDREFVAKDALQPVLKLLLGPDGENLRVLVVKEAVRVTEAITFGTLIDSYNAAPEFLKPLISNGNPAGPFKISDVEREQMLELRDTVLRIWGLLRSSDTFDPSLLQPIVQVLQEREARMFGSRIAGGVSQRLAARLLQQLLRIPPAPVPGSS

SEQ ID NO: 11133 - DNA, 664 bp, Triticum aestivum
  misc_feature (1)..(664): Ceres Seq. ID no. 13598041
tcaagagaaaccaagctggacttctaaggcacttgctaccgaaatcggcatacctgtagactctctcaacagaagaataggtttctggacaagcaagggggtcctgactgaatcggtgggaccagatgccgatgatcacatcttcacaattgttgatagcatgtctgatgtcaacaaaaacagcatcgtgaacgaaagctgcgaagcgtttcaaatgaatgaggacgaaggtgaaagttccgttgcatccgttgaggaacagcttaagaaagaaatgacagtctatgagaaattcatcataggaatgttaaccaatttcggcaatatgacactggacaaaatacataacactttgaagatgttctgtgccgagccatcgtatgataaatcactgcagcaattgcagagttttctttcgggtctagtatcagatgaaaagcttgaaatgagagatggattgtacttgctaaaaaagtaactgctacttagggtgacacattatgctgttagattaaggatgacaggcagtcaaaccagcgcagatggtgggcttcctgatgttgctctgaactcgcttttcttctttccctagccttgatagtttcaactcctgagacaatgtatttctgttatgaaagtaatggaaaggggaaaagcctggttc

SEQ ID NO: 11134 - protein, 158 aa, Triticum aestivum
  misc_feature (1)..(158): Ceres Seq. ID no. 13598042
QEKPSWTSKALATEIGIPVDSLNRRIGFWTSKGVLTESVGPDADDHIFTIVDSMSDVNKNSIVNESCEAFQMNEDEGESSVASVEEQLKKEMTVYEKFIIGMLTNFGNMTLDKIHNTLKMFCAEPSYDKSLQQLQSFLSGLVSDEKLEMRDGLYLLKK

SEQ ID NO: 11135 - protein, 105 aa, Triticum aestivum
  misc_feature (1)..(105): Ceres Seq. ID no. 13598043
MSDVNKNSIVNESCEAFQMNEDEGESSVASVEEQLKKEMTVYEKFIIGMLTNFGNMTLDKIHNTLKMFCAEPSYDKSLQQLQSFLSGLVSDEKLEMRDGLYLLKK

SEQ ID NO: 11136 - protein, 87 aa, Triticum aestivum
  misc_feature (1)..(87): Ceres Seq. ID no. 13598044
MNEDEGESSVASVEEQLKKEMTVYEKFIIGMLTNFGNMTLDKIHNTLKMFCAEPSYDKSLQQLQSFLSGLVSDEKLEMRDGLYLLKK

SEQ ID NO: 11137 - DNA, 637 bp, Triticum aestivum
  misc_feature (1)..(637): Ceres Seq. ID no. 13598057
atatacttttaacgtaatgaagttcaaggatggtaacaggggagcaatcaatgggatgtggccagatggtacactggacatgtccacaatgcaatctagggagatatggccaggcgtgacatacgcgcttgctgcatctatgattcaagaaggcatggttgaggagggtttcaaaacagctgaaggagtctatcatgctgcctggtcttcagaaggacttggatacgcattccaaactcctgaatcttggaacaatgacgatgagtaccggtccttgtgctacatgcgcccactcgccatatgggcgatacagtgggcactctcaaacccaaagctccacaaggagcctcagacagacataacacaagattcttttccgaagaacccagttctcatatgcacgaatagcgaagctcctgcagttacctgaagatgaatcgtccaagagcgtccctcgggttatctatgagatagttcggaacaggtttacttcatgatatatgggccgcgacatgcctgaatgttgaatgcactattggagcaacattgttcaatttggttgttgattgcggaaacatgttattggtcagcacacattagtatggagttaatggtaataaaagatgagatccatgtt

SEQ ID NO: 11138 - protein, 142 aa, Triticum aestivum
  misc_feature (1)..(142): Ceres Seq. ID no. 13598058
YTFNVMKFKDGNRGAINGMWPDGTLDMSTMQSREIWPGVTYALAASMIQEGMVEEGFKTAEGVYHAAWSSEGLGYAFQTPESWNNDDEYRSLCYMRPLAIWAIQWALSNPKLHKEPQTDITQDSFPKNPVLICTNSEAPAVT

SEQ ID NO: 11139 - protein, 137 aa, Triticum aestivum
  misc_feature (1)..(137): Ceres Seq. ID no. 13598059
MKFKDGNRGAINGMWPDGTLDMSTMQSREIWPGVTYALAASMIQEGMVEEGFKTAEGVYHAAWSSEGLGYAFQTPESWNNDDEYRSLCYMRPLAIWAIQWALSNPKLHKEPQTDITQDSFPKNPVLICTNSEAPAVT

SEQ ID NO: 11140 - protein, 124 aa, Triticum aestivum
  misc_feature (1)..(124): Ceres Seq. ID no. 13598060
MWPDGTLDMSTMQSREIWPGVTYALAASMIQEGMVEEGFKTAEGVYHAAWSSEGLGYAFQTPESWNNDDEYRSLCYMRPLAIWAIQWALSNPKLHKEPQTDITQDSFPKNPVLICTNSEAPAVT

SEQ ID NO: 11141 - DNA, 1611 bp, Triticum aestivum
  misc_feature (1)..(1611): Ceres Seq. ID no. 13598067
agaacatcctaatcgaaaactcctccatttcgtttgtatctcatctgctctgctctgctgccgctctggtctgtagatctgggaggatcagagtcagacattggggttttgtgattagactagaagaggcgcgttaatgtcgcaagaactggtgcgtacggcaatggcggccgcgcccggtgatgttccgccgcctttggccactcctgctcttcttccgcaggccaaaagggttaaggaagacccaagttttccccaagcctcgccggtggttccggccatgacggcggaagactggtccaaatggtccacacttccgcccgacctcgtccgctgcatcggcgactccctcctgtccaccaacgacctcgactgctacattcacttccgcgccgtttgccccggctggcgcgccgccgccgacgaccccatgagcgacacctccgacccccgcttccacccgcgccggtggatcgtcctcaacgaggacttccagagcgaagggaagctgctcctgctgaacactgacaacggccgcttcgtccatagaaagctcccgctgctcagcgaccactacgtcgtagccacaactcgcaatggctacttggtcctggcggacaaaagccctcctcactctgcaagcgtcctcaaccctctgaccggcgtcgtcatccgtttcatggcgcctgtgccccctgaggtgggacacgctgctgtctcccttgccagctctgccctcgggctcaccttgtttggcgactcatctcacaagatttactcggcctatcccgacaacaagagttccgtcgtccacgaggctcagcaagcagcttatgttttcttccgtaatgcggtcgtgggcggtgtctactcagacactatagggcatgccgtgattgtccgtttatgcagatcgctgatgcctccagatgcaaaccacctttgttttccagtggctttgggtagagaaatgctgcttgtcgggactgcagagagatcgttctttatttttaaaacagacatcgagttaagtaagctggaggatgtggacaccatcaacaactatgccattttcattggtcatcagaggtgcctggctgtctatgctgataagttcataggcattgaggcaaactgcatctactacactgaaaatctgggttcgtccgctcgtatatgcaagtgcggcatcaaggacagaaaagtagagaagatctctgaaactgccgatttcatcaagaaggacaagaagtttgtcctcgttgctgaccgtccttcgacgatcatcgaccttctcgccagctacaccatcaacatcccggactctcggctggccttgcaacagattccataaggcgccggcagatcttcgttcaactctggggatctcgatgaccaactgacaaggctatgctttcgctaagtaattgctcctaattactgtctagtcccctgctttgttattttggatatgccttgccttgtagtaacatgtaagaagcaggttgatcctaggttagatcacctttagtggaactaccgtttttttgtcttaaaaaaaaaaaaaaaaaagcttatcgataccgtcgacctcgagggggggcmcggtrc

SEQ ID NO: 11142 - protein, 405 aa, Triticum aestivum
  misc_feature (1)..(405): Ceres Seq. ID no. 15222249
MSQELVRTAMAAAPGDVPPPLATPALLPQAKRVKEDPSFPQASPVVPAMTAEDWSKWSTLPPDLVRCIGDSLLSTNDLDCYIHFRAVCPGWRAAADDPMSDTSDPRFHPRRWIVLNEDFQSEGKLLLLNTDNGRFVHRKLPLLSDHYVVATTRNGYLVLADKSPPHSASVLNPLTGVVIRFMAPVPPEVGHAAVSLASSALGLTLFGDSSHKIYSAYPDNKSSVVHEAQQAAYVFFRNAVVGGVYSDTIGHAVIVRLCRSLMPPDANHLCFPVALGREMLLVGTAERSFFIFKTDIELSKLEDVDTINNYAIFIGHQRCLAVYADKFIGIEANCIYYTENLGSSARICKCGIKDRKVEKISETADFIKKDKKFVLVADRPSTIIDLLASYTINIPDSRLALQQIP

SEQ ID NO: 11143 - protein, 396 aa, Triticum aestivum
  misc_feature (1)..(396): Ceres Seq. ID no. 15222250
MAAAPGDVPPPLATPALLPQAKRVKEDPSFPQASPVVPAMTAEDWSKWSTLPPDLVRCIGDSLLSTNDLDCYIHFRAVCPGWRAAADDPMSDTSDPRFHPRRWIVLNEDFQSEGKLLLLNTDNGRFVHRKLPLLSDHYVVATTRNGYLVLADKSPPHSASVLNPLTGVVIRFMAPVPPEVGHAAVSLASSALGLTLFGDSSHKIYSAYPDNKSSVVHEAQQAAYVFFRNAVVGGVYSDTIGHAVIVRLCRSLMPPDANHLCFPVALGREMLLVGTAERSFFIFKTDIELSKLEDVDTINNYAIFIGHQRCLAVYADKFIGIEANCIYYTENLGSSARICKCGIKDRKVEKISETADFIKKDKKFVLVADRPSTIIDLLASYTINIPDSRLALQQIP

SEQ ID NO: 11144 - protein, 357 aa, Triticum aestivum
  misc_feature (1)..(357): Ceres Seq. ID no. 15222251
MTAEDWSKWSTLPPDLVRCIGDSLLSTNDLDCYIHFRAVCPGWRAAADDPMSDTSDPRFHPRRWIVLNEDFQSEGKLLLLNTDNGRFVHRKLPLLSDHYVVATTRNGYLVLADKSPPHSASVLNPLTGVVIRFMAPVPPEVGHAAVSLASSALGLTLFGDSSHKIYSAYPDNKSSVVHEAQQAAYVFFRNAVVGGVYSDTIGHAVIVRLCRSLMPPDANHLCFPVALGREMLLVGTAERSFFIFKTDIELSKLEDVDTINNYAIFIGHQRCLAVYADKFIGIEANCIYYTENLGSSARICKCGIKDRKVEKISETADFIKKDKKFVLVADRPSTIIDLLASYTINIPDSRLALQQIP

SEQ ID NO: 11145 - DNA, 1677 bp, Triticum aestivum
  misc_feature (1)..(1677): Ceres Seq. ID no. 13598075
actacaataagcggcgcctttttcgtctagcatccctcgtgtgtgtgtctccacggtcaaatcgggataaagcaacggcgacgtcatggcctcgccggcgacgccgaggccggcgctgatccggccgcgggcctcgcgcagccgctcccagttgggcgccgtcagcctcgcttccgaccacgccgccgccacggcctcctcgggccgccgccgcgacttcgtcttcgtcgtcaacccctccggcgccaatggccggacgggcaagcagtggaagcagctgctccccttcctccacacccgcctcgccgaccaatgcaacatttgcgagtgcatcacatcgggcccgtcgcacgccatagatgtcacgagggaggctataaaggacggcgctgatgctgtgatcgccgttggcggggatgggacgcttcatgaggtggtgaatggcttcttttggaaaggaagcccggtccgtgctcttgatcgagggcctgaccacttgacggcgcttggtctcatcccacttggaactggctcagactttgctaggacatttggctggtcaaatgatccccatcaggcgattgatcgaattgtgagaggagttaaatcaaaactagacattggcatgatggaaggtccaaatggagatccacatttctttataaatgttgctgatatccatctgagtgccaaggcaggttattttgcttctatgtacaagagatttggcaacttatgttatgttctgggagctttaagaggcttttggggacatagtaatcgagatttgagaataaaggtgaatggaggggaatggagaacagttgataaagtcactgctctatgcgtaggaaatgccaagtactttggaggtggcatgaagattactccaacagttgatccttttagcggtgaccttcaggttgttattatacaagatttcaagtggtacagttttcttcttaagctacataggctttatggaggcacacacttaacggtgaatggcgtgtcatcaataagagttcaatcaattgaagtggtagaggtggtgcctaacggcgacgtctttgtgcaatctgacggggagcatttcggttttcttccgaccaaattctcagttctgcctggtgcagtagatttcttcagctagatcgctgtgctgtttcttcctgttggatgttgacagacagaagatgcatgatccttggccgacttgctctgttcacctagatcacgacgttcttcctcctgttacgctagcttaagatgacgcggcaatcaggttgctccactcactcatcttctggtctgatatggtagtacggacatgaaacaaattactgctgtgcagcggcacccaccatgtatttctatgcctgcatgcagcatacagtagccgagtcgtcgatgttcatagacaagccgtagagtcacagcacagcggccatgagtgtaaatttcacaattgtttcttcagtcttgtgagtaccgtgtgcaatgatacggctgcttgttgttcgaacagctgaagtgcctgcagatccagtgtgaagttgatgcatttcccaacctccaaggtaaatgctgtcgcgaaagctctgtaacttttactctgccccctggttgagtgtactccacaagtgtgagaaaataatctagtgcttcttttggagt

SEQ ID NO: 11146 - protein, 355 aa, Triticum aestivum
  misc_feature (1)..(355): Ceres Seq. ID no. 15222252
MASPATPRPALIRPRASRSRSQLGAVSLASDHAAATASSGRRRDFVFVVNPSGANGRTGKQWKQLLPFLHTRLADQCNICECITSGPSHAIDVTREAIKDGADAVIAVGGDGTLHEVVNGFFWKGSPVRALDRGPDHLTALGLIPLGTGSDFARTFGWSNDPHQAIDRIVRGVKSKLDIGMMEGPNGDPHFFINVADIHLSAKAGYFASMYKRFGNLCYVLGALRGFWGHSNRDLRIKVNGGEWRTVDKVTALCVGNAKYFGGGMKITPTVDPFSGDLQVVIIQDFKWYSFLLKLHRLYGGTHLTVNGVSSIRVQSIEVVEVVPNGDVFVQSDGEHFGFLPTKFSVLPGAVDFFS

SEQ ID NO: 11147 - DNA, 754 bp, Triticum aestivum
  misc_feature (1)..(754): Ceres Seq. ID no. 13598076
agcaagccttagctagttagctttacacagcctccattgaagtgcaagaaccaaatccttagcttacacgtccatcaaacacctcagttggctaccatccgttggagagatgaacacgttgtgcgccaagcccatggggttctctggtggcgtgaagtgccagcggcgggcgcgggtgagggtgtcggccgtggcggcggcgccggagagggtgacgatgtacgacgtgctggcggtggggaacgcggcggggccggaggagatcaaggcggcgtacaggcgcgccgcgcggcggtggcacccggacgcgtgcccgggcggcgccgaccggttcatgagggcgcgcgaggcctacgaggtgctctccgaccccgagcgcaggcggggctacgacatccagctgcgctgtggcgcgggcgcgggcgccgccgggtcccgctccagccccgcgccgcgcgcgggcttcgccgactgggaagcacagctggccgggctgcagtggcggatggcggacacgcgaggcgaaacgtgggggagcaggatgcgccgcggcgccgcgcagccgacattgttctaatctctaaaccgcagcgccggctcgtgctctgtgttttctactgtagtactgtatattctacgtagtttcgccttgttctctccttccattccattttacgcggtgggattcggttggtgatgaaactgtatagtgtagtacagacagtgtacaaaagtacggtagtttttttctttg

SEQ ID NO: 11148 - protein, 155 aa, Triticum aestivum
  misc_feature (1)..(155): Ceres Seq. ID no. 13598077
MNTLCAKPMGFSGGVKCQRRARVRVSAVAAAPERVTMYDVLAVGNAAGPEEIKAAYRRAARRWHPDACPGGADRFMRAREAYEVLSDPERRRGYDIQLRCGAGAGAAGSRSSPAPRAGFADWEAQLAGLQWRMADTRGETWGSRMRRGAAQPTLF

SEQ ID NO: 11149 - protein, 147 aa, Triticum aestivum
  misc_feature (1)..(147): Ceres Seq. ID no. 13598078
MGFSGGVKCQRRARVRVSAVAAAPERVTMYDVLAVGNAAGPEEIKAAYRRAARRWHPDACPGGADRFMRAREAYEVLSDPERRRGYDIQLRCGAGAGAAGSRSSPAPRAGFADWEAQLAGLQWRMADTRGETWGSRMRRGAAQPTLF

SEQ ID NO: 11150 - protein, 119 aa, Triticum aestivum
  misc_feature (1)..(119): Ceres Seq. ID no. 13598079
MYDVLAVGNAAGPEEIKAAYRRAARRWHPDACPGGADRFMRAREAYEVLSDPERRRGYDIQLRCGAGAGAAGSRSSPAPRAGFADWEAQLAGLQWRMADTRGETWGSRMRRGAAQPTLF

SEQ ID NO: 11151 - DNA, 704 bp, Triticum aestivum
  misc_feature (1)..(704): Ceres Seq. ID no. 13598089
gtttctataaataccccacacatcaattgctttgatcccagcattctcctcaaaactcaagcattgcatccctcttgatttgtagtttgttttgtgctttagataaaagttctgccaaatcaagaggggttttaagatcatagtgtgtgttttgcaacaatggctaagttctttgctgctatgatcttggcactctttgccatttccatacttcaaacagtggtaatggctgctaatgaacaaggaggccacttgtatgacaacaagagcaaatatggaagtggaagtgtcaagagttaccaatgcccatcacaatgctcgaggagatgtagccagacccaataccacaagccctgcatgtttttctgtcagaagtgctgcaggaaatgcctgtgtgtgcccccggggtattatggtaataaagctgtgtgcccttgctacaacaactggaagaccaaggaaggaggacccaagtgcccttgagcttcaacttgttcaacttcaattgtcgctttcctacatttttattgcttccttccttgtgccaatttaatgcactagctaccaaatgctactagccccttttggtggcactctatgatattatgtttttatgtattttggtgtatcactccttgggccttgtttgcctttaatgagagtggcttattaatatcaatatatcacctaccaaacttattgct

SEQ ID NO: 11152 - protein, 107 aa, Triticum aestivum
  misc_feature (1)..(107): Ceres Seq. ID no. 13598090
MAKFFAAMILALFAISILQTVVMAANEQGGHLYDNKSKYGSGSVKSYQCPSQCSRRCSQTQYHKPCMFFCQKCCRKCLCVPPGYYGNKAVCPCYNNWKTKEGGPKCP

SEQ ID NO: 11153 - protein, 105 aa, Triticum aestivum
  misc_feature (1)..(105): Ceres Seq. ID no. 13598091
MNKEATCMTTRANMEVEVSRVTNAHHNARGDVARPNTTSPACFSVRSAAGNACVCPRGIMVIKLCALATTTGRPRKEDPSALELQLVQLQLSLSYIFIASFLVPI

SEQ ID NO: 11154 - protein, 100 aa, Triticum aestivum
  misc_feature (1)..(100): Ceres Seq. ID no. 13598092
MILALFAISILQTVVMAANEQGGHLYDNKSKYGSGSVKSYQCPSQCSRRCSQTQYHKPCMFFCQKCCRKCLCVPPGYYGNKAVCPCYNNWKTKEGGPKCP

SEQ ID NO: 11155 - DNA, 763 bp, Triticum aestivum
  misc_feature (1)..(763): Ceres Seq. ID no. 13598124
gggatttgctaggcttgcgcaaaagtacaaaaatgttacaagaaattcagagaaggggaaaaagacgaggggaaaatcagcattctgacagcgacttgatcggaccgatcggcacgcgtggcacaccttctttccacacctcccggctgaagctgctgtagaatcctcaaaccaatcaaccaccatccatcaccaaagagcagagcaaggaaatctgtggacgttctgcccgtccaccaaatcccttcagcgcgccgcctccctcgctcgcgaggactctgcggatctctctcagcggcagcaagcagagcggagagagcaatccgccatggccatggtcgcctccacctccatcgcccaccacaagccgcgtttgtcggtgctgtgcaggaagaaggaccgggacagggagctggagcgggagaaggagcacaagtaccccttcaaggtcgtcgagatcacgccgccaccgcgatgcctcggcgtccgctgcttccccacgaacatccactgcggggagagcgtgacgatcgaagggcaggcgtacaccgtgtcggcggtgacgcaccggtaccagctgcgcaaggggcggtacgagccgagcgagaagcgcctcgacgtcctctccaccggcagatacatcctcaacctctacctcgacagcctcctcgacaagtcctagactctctatgctctactctacactactagtacaaatttatttattctactacttcagcaaatttatttatgcctctactgc

SEQ ID NO: 11156 - protein, 117 aa, Triticum aestivum
  misc_feature (1)..(117): Ceres Seq. ID no. 13598125
MAMVASTSIAHHKPRLSVLCRKKDRDRELEREKEHKYPFKVVEITPPPRCLGVRCFPTNIHCGESVTIEGQAYTVSAVTHRYQLRKGRYEPSEKRLDVLSTGRYILNLYLDSLLDKS

SEQ ID NO: 11157 - protein, 115 aa, Triticum aestivum
  misc_feature (1)..(115): Ceres Seq. ID no. 13598126
MVASTSIAHHKPRLSVLCRKKDRDRELEREKEHKYPFKVVEITPPPRCLGVRCFPTNIHCGESVTIEGQAYTVSAVTHRYQLRKGRYEPSEKRLDVLSTGRYILNLYLDSLLDKS

SEQ ID NO: 11158 - protein, 78 aa, Triticum aestivum
  misc_feature (1)..(78): Ceres Seq. ID no. 13598127
MPRRPLLPHEHPLRGERDDRRAGVHRVGGDAPVPAAQGAVRAEREAPRRPLHRQIHPQPLPRQPPRQVLDSLCSTLHY

SEQ ID NO: 11159 - DNA, 1012 bp, Triticum aestivum
  misc_feature (1)..(1012): Ceres Seq. ID no. 13598179
tcgctcgttgtctctcccgtctcaggtcgccatcgaagcaccagtagcaggaactccttaacgccccagcgtgagatcgcgagattgtttgtagcttgatcgaggcagggaagaccggaagaggatgatgcagtcgccgtcgcagcaccagtcctcctactacgccgtgctcggcgtccacccaggcgcgtcctccgccgagatacgcgccgcgtaccaccgcctcgccatgaggtggcacccggataagattgccaatggccgtgtggatccggcgatcgcggaggaagccaagggaaggttccagaagatacacgaggcataccaggtgttgtcggatcagaagcggagggagctctatgacgccgggatgtacgaccccctcgacgacgaccaagaagaggtcgagggcttccatgatttccttcaggagatgctctcgctcatggccaccgttggtagagaggagcccgtatattccctgggcgaactccaatccatgcttgacgggatgatgcaggatttcacctccccccagccgccgccaccaagcagcttcttcagcagcaccagttcgtcgacgcggttcggcgcacccagcggcggagcgcagcagcagcgtcgacccccctcacgcgtacggcctcaggggttcggcagctcggcatgcttcagccagacggctttctccggctgctaagcacctgcgcgatctgcatcgcagttcatgcgtccgtggggatcaccggcgtgaagacgctgagttgcagagactgggagagacagggaacgtcgagcgctctagcgatgcacacggcgggagccggtactgtacatcacccactggatgagcggaataaagaagacggtagatatttctagttgacagcaactcgaaaggatttccattgttagtttttcttagatagatcgtaggtgtacatagatgagaacagaagtgaagacatgatgttttgcactgtggtgtgtatttacttcaaaagcaagcacg

SEQ ID NO: 11160 - protein, 191 aa, Triticum aestivum
  misc_feature (1)..(191): Ceres Seq. ID no. 13598180
MMQSPSQHQSSYYAVLGVHPGASSAEIRAAYHRLAMRWHPDKIANGRVDPAIAEEAKGRFQKIHEAYQVLSDQKRRELYDAGMYDPLDDDQEEVEGFHDFLQEMLSLMATVGREEPVYSLGELQSMLDGMMQDFTSPQPPPPSSFFSSTSSSTRFGAPSGGAQQQRRPPSRVRPQGFGSSACFSQTAFSGC

SEQ ID NO: 11161 - protein, 190 aa, Triticum aestivum
  misc_feature (1)..(190): Ceres Seq. ID no. 13598181
MQSPSQHQSSYYAVLGVHPGASSAEIRAAYHRLAMRWHPDKIANGRVDPAIAEEAKGRFQKIHEAYQVLSDQKRRELYDAGMYDPLDDDQEEVEGFHDFLQEMLSLMATVGREEPVYSLGELQSMLDGMMQDFTSPQPPPPSSFFSSTSSSTRFGAPSGGAQQQRRPPSRVRPQGFGSSACFSQTAFSGC

SEQ ID NO: 11162 - protein, 156 aa, Triticum aestivum
  misc_feature (1)..(156): Ceres Seq. ID no. 13598182
MRWHPDKIANGRVDPAIAEEAKGRFQKIHEAYQVLSDQKRRELYDAGMYDPLDDDQEEVEGFHDFLQEMLSLMATVGREEPVYSLGELQSMLDGMMQDFTSPQPPPPSSFFSSTSSSTRFGAPSGGAQQQRRPPSRVRPQGFGSSACFSQTAFSGC

SEQ ID NO: 11163 - DNA, 514 bp, Triticum aestivum
  misc_feature (1)..(514): Ceres Seq. ID no. 13598191
taggaaggaagttggcaggcaaccttcgatcgagtctcgatcaacacaagaaccagcaaattagcttcggtttcatagtcgtatactgtcatgtctagccttacgaccattagtggcggcgccatggaggagtcgcaggaagtagaggagctcgtcgacacaaggctgtccctcgtgatcggcgccgcgagccgtccgcccccgacggtcctggcgctgctgccggcggcatcaccggagaacgaagcggcggcacgcgggaagaggaagggagtcaagggaccagagaacggtgcgggcggtgccgctgctgcttcaagggagcatagcaagaggtccaagacggtgcacgacagcagcgacgtcgacgatgacgacagaggggacgcggccggcggcgacgggacgaggaagaagctcatgctcacggtggagcaggccgcgctcttggaggaaagcttccgtgcccacaacgtcctctctcacggcgagaagcacgatcttgcgaggcagc

SEQ ID NO: 11164 - protein, 141 aa, Triticum aestivum
  misc_feature (1)..(141): Ceres Seq. ID no. 13598192
MSSLTTISGGAMEESQEVEELVDTRLSLVIGAASRPPPTVLALLPAASPENEAAARGKRKGVKGPENGAGGAAAASREHSKRSKTVHDSSDVDDDDRGDAAGGDGTRKKLMLTVEQAALLEESFRAHNVLSHGEKHDLARQ

SEQ ID NO: 11165 - protein, 130 aa, Triticum aestivum
  misc_feature (1)..(130): Ceres Seq. ID no. 13598193
MEESQEVEELVDTRLSLVIGAASRPPPTVLALLPAASPENEAAARGKRKGVKGPENGAGGAAAASREHSKRSKTVHDSSDVDDDDRGDAAGGDGTRKKLMLTVEQAALLEESFRAHNVLSHGEKHDLARQ

SEQ ID NO: 11166 - DNA, 678 bp, Triticum aestivum
  misc_feature (1)..(678): Ceres Seq. ID no. 13598194
gtttttgagaggcttctggaaatccgtggtgtagtaagcggctaggcggtagccaccgatgcctgcgacgccggcggccagccccgggtgcgctgggctgccggcgcaacctccgacgagctcactccccggatttgaaggcccccctagccggctgggcgttcggaggccggcatgggtcgtccgcaccgagtctaatgttaggagagaaagaccaaaacgacctgatcctccatgcaccatctgcaaaggcactgggacaataaattgccgcaactgtttcggtagaggaagaataaatcatgtcgatctcgccgtgctccccaagggagaatggccgcaatggtgccaaatatgcgggggtagcggcctagattactgccaccggtgccatggaacaggtgaatatcgagaacccatgggctttcacttcacagtcaataggaaatgagtgtcgcacaggcagtgttggaaggccggccaagtcaaatggtcaggaaaaaaaaatgtcccattgaggccataggattaacatttgaatgagctgtgtgaagttactgtgaaaactttgatcttatgctaatgctgcagaattttcttgccagcaaagaaacattagatgtagattatgatcagaggctaagggtcttcagttttatcaaccggctaaatttgtgt

SEQ ID NO: 11167 - protein, 130 aa, Triticum aestivum
  misc_feature (1)..(130): Ceres Seq. ID no. 13598195
MPATPAASPGCAGLPAQPPTSSLPGFEGPPSRLGVRRPAWVVRTESNVRRERPKRPDPPCTICKGTGTINCRNCFGRGRINHVDLAVLPKGEWPQWCQICGGSGLDYCHRCHGTGEYREPMGFHFTVNRK

SEQ ID NO: 11168 - DNA, 641 bp, Triticum aestivum
  misc_feature (1)..(641): Ceres Seq. ID no. 13598209
atcctaatcgaaaaatagtcgcgcagcgcaccccctacagccccgtgctctggcatacatacagtgtggtcatagtggtgaactgagaagagctactgcgaacaaggcacgccggagatcgagatgggctgcgacgacaagtgcgggtgcgccgtgccgtgccccggcggcacgggctgcaggtgcacctcggcgaggagcggcgcggcggcgggggagcacacgacgtgcgggtgcggcgagcactgtggatgcaacccgtgcgcgtgcgggcgcgaggggacgccgtccgggcgggcgaacaggagggccaactgctcctgcggcgcggcctgcaactgcgcttcatgcggctcggcgaccgcctgatcgatggccgacgcgtcgacgcgccactagtcgtgagctgatgcacaagtagtagagctagctaccgagttagccataaataagtgccgctgtgccgtgatcagtcatatgtggacgtgtcgtgtgtatttacctacgtactcgcatcagtgtgtaagaacgaataaatagtttatgtgtgctattttctcctttcctaaatgtacttgaagtcttttggcttgttacaagttttacttgttgcaaaataattatagttctacgattttctt

SEQ ID NO: 11169 - protein, 81 aa, Triticum aestivum
  misc_feature (1)..(81): Ceres Seq. ID no. 15222264
MGCDDKCGCAVPCPGGTGCRCTSARSGAAAGEHTTCGCGEHCGCNPCACGREGTPSGRANRRANCSCGAACNCASCGSATA

SEQ ID NO: 11170 - protein, 52 aa, Triticum aestivum
  misc_feature (1)..(52): Ceres Seq. ID no. 15222265
MQPVRVRARGDAVRAGEQEGQLLLRRGLQLRFMRLGDRLIDGRRVDAPLVVS

SEQ ID NO: 11171 - DNA, 574 bp, Triticum aestivum
  misc_feature (1)..(574): Ceres Seq. ID no. 13598210
cacaactagagaagcagcgcagaaccgaccaggagctgaagaaaagggttctcaaactcgaattctgccttcaagaatcacggtctcaaatccggaaacttcagaggatgggggagaagagggacaagcagctcaaggagctcaaggatcagatggccatgaagcagcccaagggccctcgccgcgacgaaggcaagaagcccttctgggagaatgacacgttcaagttcgtcgccggcatgtcaatgctggtcgtgatggtcctcgcaaagcgctgagaacagcgtcatcttgtgtagagaagttaagttaggtgagcagctagctcgctctgtagtttttagaagccagccatgtactggagtagcgttgtaaaattaggtttaggcctggacatgctgcatggtcaatgttcagagaccagaattcgccgacatccaagtttagtcctctagaccgtagcaatgtagttcatctgctagttcatgtatggtagtaactgtaatcctgtacttatcttatcatgtttagtactccctactaaacgtagtgatctaagctcttatatttcttt

SEQ ID NO: 11172 - protein, 91 aa, Triticum aestivum
  misc_feature (1)..(91): Ceres Seq. ID no. 13598211
QLEKQRRTDQELKKRVLKLEFCLQESRSQIRKLQRMGEKRDKQLKELKDQMAMKQPKGPRRDEGKKPFWENDTFKFVAGMSMLVVMVLAKR

SEQ ID NO: 11173 - protein, 71 aa, Triticum aestivum
  misc_feature (1)..(71): Ceres Seq. ID no. 13598212
TTREAAQNRPGAEEKGSQTRILPSRITVSNPETSEDGGEEGQAAQGAQGSDGHEAAQGPSPRRRQEALLGE

SEQ ID NO: 11174 - protein, 56 aa, Triticum aestivum
  misc_feature (1)..(56): Ceres Seq. ID no. 13598213
MGEKRDKQLKELKDQMAMKQPKGPRRDEGKKPFWENDTFKFVAGMSMLVVMVLAKR

SEQ ID NO: 11175 - DNA, 724 bp, Triticum aestivum
  misc_feature (1)..(724): Ceres Seq. ID no. 13598219
tcccccgggctgcaggaattcgcacgagaccattacatagaacatcctaatcgaaaacagagactaggacctgctggacttgcattgcactatgcaaacactatcatacagatctatggcattgtttctcggtcagggtatgtacccgcaaattcaagagatgccctttaccaaggattgccaccaagggtcaggttggctctaccaaataaattaagaacttcctcaatgcctcgggagctcactattgatcagattagggtaatgatggagagaactctgaaatggcttgttccgatggccatcaataccacctgtgcccgaggcttcttgcggtttagtgaatgggcaaaatcagggaccgagcgagttggaagaggacctggtcgaccggacgtgatcgagacgctctaccacgccgacaaggcaaggacagaggcttacatactcgagttggtcgtgtggcttcaccaccttgtcagcctgagcaaccggacggcaaatgttaaaaaagcccagtccatgtaaccatcatcaggtcatggggtgataacaagcgcattacacacaagtcagggcctgacaagagcagacagaaagccattatgatctgtttcgttttcatcgttgctaggttgtatagaagggggaactgtgtctgttcttaccaggaaggacttgaaacctgatattaggtagggaaataacaagagcttctcctttg

SEQ ID NO: 11176 - protein, 175 aa, Triticum aestivum
  misc_feature (1)..(175): Ceres Seq. ID no. 13598220
SPGLQEFARDHYIEHPNRKQRLGPAGLALHYANTIIQIYGIVSRSGYVPANSRDALYQGLPPRVRLALPNKLRTSSMPRELTIDQIRVMMERTLKWLVPMAINTTCARGFLRFSEWAKSGTERVGRGPGRPDVIETLYHADKARTEAYILELVVWLHHLVSLSNRTANVKKAQSM

SEQ ID NO: 11177 - protein, 99 aa, Triticum aestivum
  misc_feature (1)..(99): Ceres Seq. ID no. 13598221
MPRELTIDQIRVMMERTLKWLVPMAINTTCARGFLRFSEWAKSGTERVGRGPGRPDVIETLYHADKARTEAYILELVVWLHHLVSLSNRTANVKKAQSM

SEQ ID NO: 11178 - protein, 87 aa, Triticum aestivum
  misc_feature (1)..(87): Ceres Seq. ID no. 13598222
MMERTLKWLVPMAINTTCARGFLRFSEWAKSGTERVGRGPGRPDVIETLYHADKARTEAYILELVVWLHHLVSLSNRTANVKKAQSM

SEQ ID NO: 11179 - DNA, 1258 bp, Triticum aestivum
  misc_feature (1)..(1258): Ceres Seq. ID no. 13598249
ctctctggacgagggagaatcttgtactagtcccactcccccctcccgtcgccgtcgccgccggcccaaaccaaaccctagccgcctgcccgccggcgggcgccaggccatggaccgcaagcgcatcaacgacgcgctcgacaggcacctgcgggcggccacggagcggtcgtcgccctccacctcccgcggcgccaagcccaagccgccccccgccgccgcccccaaacccaaagagcagctggattcggacagcagcgaggggggcagcgtcggcgggtcctcggaggcggacgacaccttctggatcaactggttctgcgccatgaggggcaacgagttcttcgccgaggtggatgatgactacatccaggacgacttcaatctctgcggcctcagcgcccaggtcccctactacgaccacgcccttgatctcatcctcgacctcgagcccgtccagggggatgtgtttgccgatgaccagaatgagctgatagtggcgtccgcggagatgctttacgggttgatccacgcccggtacatcttgaccaccaagggcttggctgccatgctggagaagttcaagaactgcgactttggaaggtgcccccgcgtgtcctgctctggtcagccctgtcttccaatgggccagtccgatatccctaggtccagtaccgtcaagatatattgtcccaaatgcgaagatctctactacccaagatccaagcaccaagccaatacagacggcgcatactttgggacgacgtttcctcatattttcatgatgacccactcacaattgaagccacagaagccagcgcagcaatacgttccccggatattcggcttcaaagtccacaagaaaacatgacggtatcgtggtggcgtactgccttgggcttgtttcgcctagtatgtcaccaggaacgatgaggacccgcactatagctgggcatggaaaaatgctttggccggttcaagacgacaaggcaccgaacaactatggcacattctttctctgtatgaagacctgctcttgggaaaagaaatctcgaggaggtctgatcaagctgtcagatccatgtcatgttgggtatttggatgatcccggtgagacggcaatgggtttgtgcctctgctctgttttgattttgaatgttcgtccaaacagggcatatgttgctggatctgttgtgtatcctaatgtatttcgctcttcattctgtggtgccgagaaatcggacggctgagactgctg

SEQ ID NO: 11180 - protein, 289 aa, Triticum aestivum
  misc_feature (1)..(289): Ceres Seq. ID no. 13598250
SLDEGESCTSPTPPSRRRRRRPKPNPSRLPAGGRQAMDRKRINDALDRHLRAATERSSPSTSRGAKPKPPPAAAPKPKEQLDSDSSEGGSVGGSSEADDTFWINWFCAMRGNEFFAEVDDDYIQDDFNLCGLSAQVPYYDHALDLILDLEPVQGDVFADDQNELIVASAEMLYGLIHARYILTTKGLAAMLEKFKNCDFGRCPRVSCSGQPCLPMGQSDIPRSSTVKIYCPKCEDLYYPRSKHQANTDGAYFGTTFPHIFMMTHSQLKPQKPAQQYVPRIFGFKVHKKT

SEQ ID NO: 11181 - protein, 253 aa, Triticum aestivum
  misc_feature (1)..(253): Ceres Seq. ID no. 13598251
MDRKRINDALDRHLRAATERSSPSTSRGAKPKPPPAAAPKPKEQLDSDSSEGGSVGGSSEADDTFWINWFCAMRGNEFFAEVDDDYIQDDFNLCGLSAQVPYYDHALDLILDLEPVQGDVFADDQNELIVASAEMLYGLIHARYILTTKGLAAMLEKFKNCDFGRCPRVSCSGQPCLPMGQSDIPRSSTVKIYCPKCEDLYYPRSKHQANTDGAYFGTTFPHIFMMTHSQLKPQKPAQQYVPRIFGFKVHKKT

SEQ ID NO: 11182 - protein, 181 aa, Triticum aestivum
  misc_feature (1)..(181): Ceres Seq. ID no. 13598252
MRGNEFFAEVDDDYIQDDFNLCGLSAQVPYYDHALDLILDLEPVQGDVFADDQNELIVASAEMLYGLIHARYILTTKGLAAMLEKFKNCDFGRCPRVSCSGQPCLPMGQSDIPRSSTVKIYCPKCEDLYYPRSKHQANTDGAYFGTTFPHIFMMTHSQLKPQKPAQQYVPRIFGFKVHKKT

SEQ ID NO: 11183 - DNA, 1031 bp, Triticum aestivum
  misc_feature (1)..(1031): Ceres Seq. ID no. 13598257
ttttttcaaccagacaccgcccctcttcttgctctctgctctcctctcctctcctcttctctcctctcccacacgcgtcctaaagcaagcaagctcggacgccatgagcaaggactgcggcaaccacggcgaggacgacatccggcgcacgtgccggcgcttcctggccttcctcttcttcctggccctggtggtggccgtcatcgccctcatcgtctacctcgtcctccgccccacgcacccgcgcttctatctccaggacgcctcgctccggcagctggacgtgctcaccgccaacgcctccgccgcggcgggcgtgctctccaccgtgctccaggtcaccgtcgcctcccgcaaccccaacgaccgcgtcggcgtctactacgaccgcctcgacgtctacgcctcctacaagtaccagcagatcacgctggcctccgcgctcccgccggtgtaccagggccacggcgacgtcgaggtgtggtccccggtgctctccggcccgaacgtccccttcgcgccctacctcgccgacgcgctcgccaaggacgtccaggccgggtacctcatcctccaggtgaagatcgacggccgcgtccggtggaaggtgggcagctggatctccggccactaccacatcttcgtgacctgccccgccttcctcatcggcaccggcggcaacggcgcgcccggggccaacgggctcaggttccagaccgccacctactgccacgtcgaggtctagccgtccgtccgtacgtgctctgcttcctcttcttcttcgtcatcttcctctgctccgtcggcggcggcgaggtaggtttcttgcgggtggcgcgcgcgcgtgcgcgtagccaagaagatcatcaaggctgaaggccaagggggtggtacatggtggtaataagtgttagcgtcgaggggtataggtgtaaaaaggaaaagagaatttagtgttggttactcctactaaattgtgttttgctcgtttttaattgttggtaaggtatttattccacgtttaattgtcg

SEQ ID NO: 11184 - protein, 291 aa, Triticum aestivum
  misc_feature (1)..(291): Ceres Seq. ID no. 13598258
FFQPDTAPLLALCSPLLSSSLLSHTRPKASKLGRHEQGLRQPRRGRHPAHVPALPGLPLLPGPGGGRHRPHRLPRPPPHAPALLSPGRLAPAAGRAHRQRLRRGGRALHRAPGHRRLPQPQRPRRRLLRPPRRLRLLQVPADHAGLRAPAGVPGPRRRRGVVPGALRPERPLRALPRRRARQGRPGRVPHPPGEDRRPRPVEGGQLDLRPLPHLRDLPRLPHRHRRQRRARGQRAQVPDRHLLPRRGLAVRPYVLCFLFFFVIFLCSVGGGEVGFLRVARARARSQEDHQG

SEQ ID NO: 11185 - protein, 247 aa, Triticum aestivum
  misc_feature (1)..(247): Ceres Seq. ID no. 13598259
FFNQTPPLFLLSALLSSPLLSSPTRVLKQASSDAMSKDCGNHGEDDIRRTCRRFLAFLFFLALVVAVIALIVYLVLRPTHPRFYLQDASLRQLDVLTANASAAAGVLSTVLQVTVASRNPNDRVGVYYDRLDVYASYKYQQITLASALPPVYQGHGDVEVWSPVLSGPNVPFAPYLADALAKDVQAGYLILQVKIDGRVRWKVGSWISGHYHIFVTCPAFLIGTGGNGAPGANGLRFQTATYCHVEV

SEQ ID NO: 11186 - protein, 213 aa, Triticum aestivum
  misc_feature (1)..(213): Ceres Seq. ID no. 13598260
MSKDCGNHGEDDIRRTCRRFLAFLFFLALVVAVIALIVYLVLRPTHPRFYLQDASLRQLDVLTANASAAAGVLSTVLQVTVASRNPNDRVGVYYDRLDVYASYKYQQITLASALPPVYQGHGDVEVWSPVLSGPNVPFAPYLADALAKDVQAGYLILQVKIDGRVRWKVGSWISGHYHIFVTCPAFLIGTGGNGAPGANGLRFQTATYCHVEV

SEQ ID NO: 11187 - DNA, 1035 bp, Triticum aestivum
  misc_feature (1)..(1035): Ceres Seq. ID no. 13598268
aacatcctaatcgaaaaaaaagcacggttcatcccgatcgaagaggaccaaaaaggcccaaacccactcccatcccctcgtcacgcgtctcccggacccttcctcgtctctctctctctgaacaccccacccagccgaccaaatcgccgcacgagggcgcgccatggagccggcggtggagaggaaggtgcccgagcaggaggagcagctgcagccgtcgcacgcccgggccgaggacgcgccgcccgccgccgtcgaggaggaggacgaggcggaggcggaggagagcgagcgccgcaaccgcgagctcaaggccggcctccatcccctcaggcgcaagctcgtgctctggtacacccgccggacgcccgggacgaggtcgcagtcgtacgaggacaacatcaaaaagatcgtcgatttcagcactgtcgagtcgttctgggtttgctactgccacctcgcacgcccgtcctccctcccgagccccacggacctgcatcttttcaaagagggtgtccgtccactctgggaggatcctgcaaatcggaatggtggcaagtggattatacggttcaagaaggctgtttctgggcgtttctgggaggatttggtgctggttctagcgggtgatcaacttgattatagtgatgatgtttgtggcattgtgctaagttgtcgtttcaatgaagacatcctgagcgtctggaatcggaatgcatcagaccaccaggctgtgatgacattaagagactcgattaagaggcacttgaagctgccacacacctatctgatggagtacaaaccacatgacgcctctctgcgagacaactcgtcctacaggaacacatggctgagaggttaagctttatgtcgtcaaaactagtcatggccctcgttccgaactacagtaaatccttgtggatttccagttctgacgtttcaacccagccatgatgtatgattactctttgtcatgctactatgtactctccaaatttcaaatgctgaagtatcgacttttataaaaaaaaaaaa

SEQ ID NO: 11188 - protein, 232 aa, Triticum aestivum
  misc_feature (1)..(232): Ceres Seq. ID no. 13598269
MEPAVERKVPEQEEQLQPSHARAEDAPPAAVEEEDEAEAEESERRNRELKAGLHPLRRKLVLWYTRRTPGTRSQSYEDNIKKIVDFSTVESFWVCYCHLARPSSLPSPTDLHLFKEGVRPLWEDPANRNGGKWIIRFKKAVSGRFWEDLVLVLAGDQLDYSDDVCGIVLSCRFNEDILSVWNRNASDHQAVMTLRDSIKRHLKLPHTYLMEYKPHDASLRDNSSYRNTWLRG

SEQ ID NO: 11189 - protein, 209 aa, Triticum aestivum
  misc_feature (1)..(209): Ceres Seq. ID no. 13598270
NILIEKKARFIPIEEDQKGPNPLPSPRHASPGPFLVSLSLNTPPSRPNRRTRARHGAGGGEEGARAGGAAAAVARPGRGRAARRRRGGGRGGGGGERAPQPRAQGRPPSPQAQARALVHPPDARDEVAVVRGQHQKDRRFQHCRVVLGLLLPPRTPVLPPEPHGPASFQRGCPSTLGGSCKSEWWQVDYTVQEGCFWAFLGGFGAGSSG

SEQ ID NO: 11190 - protein, 206 aa, Triticum aestivum
  misc_feature (1)..(206): Ceres Seq. ID no. 13598271
HPNRKKSTVHPDRRGPKRPKPTPIPSSRVSRTLPRLSLSEHPTQPTKSPHEGAPWSRRWRGRCPSRRSSCSRRTPGPRTRRPPPSRRRTRRRRRRASAATASSRPASIPSGASSCSGTPAGRPGRGRSRTRTTSKRSSISALSSRSGFATATSHARPPSRAPRTCIFSKRVSVHSGRILQIGMVASGLYGSRRLFLGVSGRIWCWF

SEQ ID NO: 11191 - DNA, 1430 bp, Triticum aestivum
  misc_feature (1)..(1430): Ceres Seq. ID no. 13598272
aaaaaaacctagatgccacaccctatcccagccgcagccgccgccgccgtcgccgccgccgccgctgcaaccgccgccttcgattccgtgaaattggaggggaagacaattggatctgtctgccgcaggaggagtggggagaaatagattgaaggcgcgacagttcctgaatgttgtgatggagaggtatggcactggcggtgccggtggcagcttgtatacggtcagtcgcatcgacgccaaggaacacctcttctaccgatccacggccgaagcacaggcagcagaaaaatcaaggttcgatatggagtgcatctggcgaatgcctacgtccaggctcaggttcgaagcataccgctcggatgacaagaggctcaatttcctgcccttctatggacgacgcagcggcggcgatagcaagatgctctgcatggacgccgctggccacaccgtgctctgtgatgccgctggcctctctgtcatgccggctccctgccttaacgaacccaaggttgacagccctgtttctttctccatcacccgcaccaacgtggaaacccccaatcgcgccgatgctctctacgtcctcgacagatttgtcacgagccgcaactccttcaacttcgaggcactcatgtttggcgagaagacctgggactgggttcggcttccaccgccgccctatgtcaacaacccggcctacaactccacatccatccagtcctacacgctcctggctgatggctccaccatttgcatctcctcccctcggcacagcctcgtcggcacctactgcttcgacacgattagctgtaagtggagcaaggctggccgctgggcgcttcccttgtacggccgggctgagcatgtacctgagctgggcaacctctggttcggcatggccgacaacagcccccacaatttttccgcattggacctctccaacctagacggggctccaaagttgcttcaagactggcaagaccttgacccgcctgaggattgggtgcagatgaggtgcagcctgctgtacctgggcgcgggcaagttttgcataaccaaattcttcaacatcggggacccagacacagaggacaacacaaccgctgctgtgctcaccggagtggaggtgctgtgtggagtttctggtggggaggtggtgcacggaggatcgtccgaactccagatgatcaagcacaagtcttttatcagctatgacggcatccagtgcgtcctctgaaatacgtactagggaagtcgttaaaacgagagcaaatgaattatgagcattttagaagacggccgagtggttgttttcgttgcagctgtttccattggaagccttgttcgttttgtggatctattttccgctgggattgggttgatctccaccatttcttctgctagagaaatatagtcctagcactttt

SEQ ID NO: 11192 - protein, 353 aa, Triticum aestivum
  misc_feature (1)..(353): Ceres Seq. ID no. 13598273
MERYGTGGAGGSLYTVSRIDAKEHLFYRSTAEAQAAEKSRFDMECIWRMPTSRLRFEAYRSDDKRLNFLPFYGRRSGGDSKMLCMDAAGHTVLCDAAGLSVMPAPCLNEPKVDSPVSFSITRTNVETPNRADALYVLDRFVTSRNSFNFEALMFGEKTWDWVRLPPPPYVNNPAYNSTSIQSYTLLADGSTICISSPRHSLVGTYCFDTISCKWSKAGRWALPLYGRAEHVPELGNLWFGMADNSPHNFSALDLSNLDGAPKLLQDWQDLDPPEDWVQMRCSLLYLGAGKFCITKFFNIGDPDTEDNTTAAVLTGVEVLCGVSGGEVVHGGSSELQMIKHKSFISYDGIQCVL

SEQ ID NO: 11193 - protein, 311 aa, Triticum aestivum
  misc_feature (1)..(311): Ceres Seq. ID no. 13598274
MECIWRMPTSRLRFEAYRSDDKRLNFLPFYGRRSGGDSKMLCMDAAGHTVLCDAAGLSVMPAPCLNEPKVDSPVSFSITRTNVETPNRADALYVLDRFVTSRNSFNFEALMFGEKTWDWVRLPPPPYVNNPAYNSTSIQSYTLLADGSTICISSPRHSLVGTYCFDTISCKWSKAGRWALPLYGRAEHVPELGNLWFGMADNSPHNFSALDLSNLDGAPKLLQDWQDLDPPEDWVQMRCSLLYLGAGKFCITKFFNIGDPDTEDNTTAAVLTGVEVLCGVSGGEVVHGGSSELQMIKHKSFISYDGIQCVL

SEQ ID NO: 11194 - protein, 305 aa, Triticum aestivum
  misc_feature (1)..(305): Ceres Seq. ID no. 13598275
MPTSRLRFEAYRSDDKRLNFLPFYGRRSGGDSKMLCMDAAGHTVLCDAAGLSVMPAPCLNEPKVDSPVSFSITRTNVETPNRADALYVLDRFVTSRNSFNFEALMFGEKTWDWVRLPPPPYVNNPAYNSTSIQSYTLLADGSTICISSPRHSLVGTYCFDTISCKWSKAGRWALPLYGRAEHVPELGNLWFGMADNSPHNFSALDLSNLDGAPKLLQDWQDLDPPEDWVQMRCSLLYLGAGKFCITKFFNIGDPDTEDNTTAAVLTGVEVLCGVSGGEVVHGGSSELQMIKHKSFISYDGIQCVL

SEQ ID NO: 11195 - DNA, 1452 bp, Triticum aestivum
  misc_feature (1)..(1452): Ceres Seq. ID no. 13598276
aatttttttcatttcattctcggcggcctagtcctctccctttccctccccatcaccttggtcttcctcctcgattcgatccgaacccatccgattcggaagagaggtggtgatgccgcttgtggaatcgcctcaatggcgccggaaggccaccgatttcttctcttcatctagcttcaagctgaagcaggcagggcaatctgcaggggataatatagctgatgttgccggtaaggttggaacagtggtgaagagtcggtgggctatcttccaggatgctagacagcgaccgccaccaccaggagatactgtgcaggagcgcttcatctctgctgctgccaacactggagtgattctgaggaagggcatttcagagacaaaggagaaggtcgcggtgggaaaggtcaaagttgaagaggctgccaaaaaaactgcggacaaaagcaaaactattttgaacaatattgaacgctggcagaagggagttgcgagcaatgacgtttttggtgttcctgttgaagccactgtacaacgggagcaatctggtaaagctgtgcctctgatactggtgaggtgtgcagaccacttggttatatcaggcttgagtaatgagtacttgttcaaatctgaaggcggcagaaaagttcttcagcaactagtttcactttacaatgaggattcgggtgcatctttgcctgatggtgttagccctattgatgtagctgcactgatcaagtgctaccttgccagcatccccgaaccacttacaacatttgctctttatgatgagcttaaagatgcgagggttagcattgatgatcttaagaacatactgaagaagcttccaaatgtgaactacatgacactagaatttgttacagcattgctactaagagtaagccgtaaatcagcactcaacaagatggactcttgtacccttgctgtggagttcgcacctttgatcatatggcagcaaggggattctggaacagatttgcggaatcatctcagattcacactgaaaccacctccaaaaattgtggacacgacgacaagtaccactacatgggacttgctagatgaggatgatgtggatgcttcgtcgcaaatccccttggacgatggttcgcctccagactatggtgctattgaggtgatccagtgcttgattgagcatcacaatcccatattcacggatgcaaacgagactgtatggagatgacctgacctggccggctcctctttagatttctgtggtatttagctcgtgctatgtacaagttccaggtagtaggatggagtggagtgccgcgaataagtctagtctcggggacaagcattttggtccaaactttttttgtcttgttttgtgggagtaaaagtaggaactgtatatattaattgtccacatggcagagttgtcttgtgggatttgcctcgacatggctcgtc

SEQ ID NO: 11196 - protein, 369 aa, Triticum aestivum
  misc_feature (1)..(369): Ceres Seq. ID no. 15222287
MPLVESPQWRRKATDFFSSSSFKLKQAGQSAGDNIADVAGKVGTVVKSRWAIFQDARQRPPPPGDTVQERFISAAANTGVILRKGISETKEKVAVGKVKVEEAAKKTADKSKTILNNIERWQKGVASNDVFGVPVEATVQREQSGKAVPLILVRCADHLVISGLSNEYLFKSEGGRKVLQQLVSLYNEDSGASLPDGVSPIDVAALIKCYLASIPEPLTTFALYDELKDARVSIDDLKNILKKLPNVNYMTLEFVTALLLRVSRKSALNKMDSCTLAVEFAPLIIWQQGDSGTDLRNHLRFTLKPPPKIVDTTTSTTTWDLLDEDDVDASSQIPLDDGSPPDYGAIEVIQCLIEHHNPIFTDANETVWR

SEQ ID NO: 11197 - DNA, 1427 bp, Triticum aestivum
  misc_feature (1)..(1427): Ceres Seq. ID no. 13598277
ccggacccaaacaaacaaccctagccttccgcgtcgcccacgcgcgcctcgcctccgccgcttttctctccgccccggaaacagactcgccgcctcccatcccattgccgtcctcctcgccggccgatggcgctggagacgcggaagctctacgtcggcggcctcccgccgtcggcgcagcaggaagaactccaggagcacttcagccgctacggcgaggtgctgcgcgtccgtgtcgtccgcgactgggagacgggccagtgccgcggcttcgcgttcgtcgagtttgccgacgacgagggcccgcgcgccgcgcttcaggagaaggagaaggccaaccatgtcttcggcgaccgcacggtggatgttaaacgagctcggaccaggccaatgcgataccaaaatgagcaatcattctaccaatacactttaaatcagagcccaattcagagcccaattcagagcccagttcacaaccagtggtacactcagtcttctagtaacaactcatatgctggtaatggtcatagaacttgtgatccaaacaaggtctttgttggtgggctacgaggtaatgttaccaaggagcacctccagagctattttgagaagtttggtagaataacagatgttgttgtgatacgcgagggggctagtcagagatcaagaggctttggtttcattacatttgattcagaggaggctatggtaaatgtcttggagagtaaattccatgacttgaacggtacaaaggttgaaactaagagagctattcccaagggtcatagctactaccaggataggctacaatataatcctatgatatggaatggcaacaatcctcccattggctttgctggagcatacccacctcacatgcagcatattgttaataatcattatgtgatgcctatgccacaatacatgtgcttaccagagtatgtctacatgatgaatggaggagtccccttgacaaggcaaggttcactctatacaggctacggaacacaaattggatatggttatgatcatgtgaatacaaatcgttttggtgctcaacttggggaagctaaaagtgataacaaattgattgaagacataacagagcaacaagtggacctaccagctaccaggcaagaaactttgggcatggatgaccaggctactgttacaacattgtaatgatggacagcaacttgttatctgggaactcggcaactgtgaagaacttgagatgaaattctttggtgacaatacgtgtgtggaaatcctgcgttactttggaccttgtgtacattgcaaccggcaatagaccctcccgcaccatgtttaaactctatgttactgccgttccattttttttggtgacgaacctgttttgaaattggtctgggttacacatgttacctgtgcgtggttatctgctc

SEQ ID NO: 11198 - protein, 351 aa, Triticum aestivum
  misc_feature (1)..(351): Ceres Seq. ID no. 15222288
MALETRKLYVGGLPPSAQQEELQEHFSRYGEVLRVRVVRDWETGQCRGFAFVEFADDEGPRAALQEKEKANHVFGDRTVDVKRARTRPMRYQNEQSFYQYTLNQSPIQSPIQSPVHNQWYTQSSSNNSYAGNGHRTCDPNKVFVGGLRGNVTKEHLQSYFEKFGRITDVVVIREGASQRSRGFGFITFDSEEAMVNVLESKFHDLNGTKVETKRAIPKGHSYYQDRLQYNPMIWNGNNPPIGFAGAYPPHMQHIVNNHYVMPMPQYMCLPEYVYMMNGGVPLTRQGSLYTGYGTQIGYGYDHVNTNRFGAQLGEAKSDNKLIEDITEQQVDLPATRQETLGMDDQATVTTL

SEQ ID NO: 11199 - protein, 263 aa, Triticum aestivum
  misc_feature (1)..(263): Ceres Seq. ID no. 15222289
MRYQNEQSFYQYTLNQSPIQSPIQSPVHNQWYTQSSSNNSYAGNGHRTCDPNKVFVGGLRGNVTKEHLQSYFEKFGRITDVVVIREGASQRSRGFGFITFDSEEAMVNVLESKFHDLNGTKVETKRAIPKGHSYYQDRLQYNPMIWNGNNPPIGFAGAYPPHMQHIVNNHYVMPMPQYMCLPEYVYMMNGGVPLTRQGSLYTGYGTQIGYGYDHVNTNRFGAQLGEAKSDNKLIEDITEQQVDLPATRQETLGMDDQATVTTL

SEQ ID NO: 11200 - DNA, 670 bp, Triticum aestivum
  misc_feature (1)..(670): Ceres Seq. ID no. 13598286
gaaactacgaatgccttccggggtagcgaacccgccgcatgtctctccgcctcctcctcccacctcgcggcagcctacgcctcctttcccctctccatcgccaccagaccccaaggcctccgccctttcgaacgactgccaccggcgtcccacagagggcctctagtttcttcagtatccctatccgcgccttcaccagtatctccggcatggctgctgggacgcagcagcagaccgtggaggttagggagagcgtggagctgacggaggaggaggagcggatcttcgctaggctgctggacgtcgtccgccacttcggactcggcacccagctccgcgtcgccgggggatgggtccgggacaagctattggggaaaggctctgctgacattgacattgcacttgataatatgacgggccaaaatttctgtgagagagtaaatgagtactcaaaattcatgggtgaagagcagaaaggaatcggcgttatccagtgcaaccctgatcaatccaagcacctggaaactgcaagaatgcttatatatggcatatggattgattttgtcaacttgaggtccgaaaagtacgctgaaaacagtcgtattcctactgtggagattggaacagccaaagaagatgcactcccgcaggactaaaacatcatagctta

SEQ ID NO: 11201 - protein, 205 aa, Triticum aestivum
  misc_feature (1)..(205): Ceres Seq. ID no. 13598287
MSLRLLLPPRGSLRLLSPLHRHQTPRPPPFRTTATGVPQRASSFFSIPIRAFTSISGMAAGTQQQTVEVRESVELTEEEERIFARLLDVVRHFGLGTQLRVAGGWVRDKLLGKGSADIDIALDNMTGQNFCERVNEYSKFMGEEQKGIGVIQCNPDQSKHLETARMLIYGIWIDFVNLRSEKYAENSRIPTVEIGTAKEDALPQD

SEQ ID NO: 11202 - protein, 148 aa, Triticum aestivum
  misc_feature (1)..(148): Ceres Seq. ID no. 13598288
MAAGTQQQTVEVRESVELTEEEERIFARLLDVVRHFGLGTQLRVAGGWVRDKLLGKGSADIDIALDNMTGQNFCERVNEYSKFMGEEQKGIGVIQCNPDQSKHLETARMLIYGIWIDFVNLRSEKYAENSRIPTVEIGTAKEDALPQD

SEQ ID NO: 11203 - DNA, 1288 bp, Triticum aestivum
  misc_feature (1)..(1288): Ceres Seq. ID no. 13598301
cttccccgccccattcgtcactgatcccccttctagaacctcccagaagccgaacgagagagcccgcaggggcggcgcacgggcatggcgatggcgacgcacacgggggtcgccgcctccaaggtcctcatcctcgtcggcgcaggcctgacgggatcgatcgtgcttcggaatggccgcttgtcggatgtattggcggagctccaggagctcatgaagggcgtaaatcaaggagaaggctcgagcgcatatgacatggctcttatccaagctcagattcggcatttagcccaagaagtcagagatttaactttgtcaaagcccattaccatattgagcggcaaatcggactcgggaggcagtttatcgtcctacatactgccagcagctgcagttggagcattaggttattgctatatgtggtgtaagggatggtccttgtcagatgtcatgtttgtcacaaaacgcaatatggccagtgctgtcgatagcatgtcgaagcaattggagcaagtttcatcagcactagcagcaaccaaaagacatctaacaaaacgccttgagaatttggatggcaaaatggacgaacaagtggaggtctccaaacaaatacggaatgaggtcactgatgttaaaactgatctgtcccaaattggctttgacgttgaagcaattcaacagatggtagctggactggaagagaagattgagttgcttgacaataaacaggatgcggctaatgctggtatatggtatctctgccgaatggcaggaggtataaaagagggaataaatgccaagtttttccaagaagcggatgaaaaactcaagctcttggacctggctcatactgaaaagaagccggtgaagggtctggagttatttctggagagcaccaaggaagtcaaggcactcgactccaagcctaagaccatcgtgcagattgatgccaagaaaccgatgaaggcgttcgacgtgcctgtgaagagcgctgcggtgcacaggtcaaacaggttcttaattcgcaaggaaggcctcgcactgtgatggacgccttcccgtgctgcttgcgatgtacattgcgttcttgcttgatttgtttggtagaaaatatagaagaataacctgcatcccgagtggtgattttccaggatagacaggttgatacgtctcaaggcaatttgtatttgttcctttgtattttttgggtcatttcatgttctggtctgaagttgctcgcttgtaaacaagtgaagaaataaataattaaaatacgttttgcattctc

SEQ ID NO: 11204 - protein, 320 aa, Triticum aestivum
  misc_feature (1)..(320): Ceres Seq. ID no. 15222293
MAMATHTGVAASKVLILVGAGLTGSIVLRNGRLSDVLAELQELMKGVNQGEGSSAYDMALIQAQIRHLAQEVRDLTLSKPITILSGKSDSGGSLSSYILPAAAVGALGYCYMWCKGWSLSDVMFVTKRNMASAVDSMSKQLEQVSSALAATKRHLTKRLENLDGKMDEQVEVSKQIRNEVTDVKTDLSQIGFDVEAIQQMVAGLEEKIELLDNKQDAANAGIWYLCRMAGGIKEGINAKFFQEADEKLKLLDLAHTEKKPVKGLELFLESTKEVKALDSKPKTIVQIDAKKPMKAFDVPVKSAAVHRSNRFLIRKEGLAL

SEQ ID NO: 11205 - protein, 318 aa, Triticum aestivum
  misc_feature (1)..(318): Ceres Seq. ID no. 15222294
MATHTGVAASKVLILVGAGLTGSIVLRNGRLSDVLAELQELMKGVNQGEGSSAYDMALIQAQIRHLAQEVRDLTLSKPITILSGKSDSGGSLSSYILPAAAVGALGYCYMWCKGWSLSDVMFVTKRNMASAVDSMSKQLEQVSSALAATKRHLTKRLENLDGKMDEQVEVSKQIRNEVTDVKTDLSQIGFDVEAIQQMVAGLEEKIELLDNKQDAANAGIWYLCRMAGGIKEGINAKFFQEADEKLKLLDLAHTEKKPVKGLELFLESTKEVKALDSKPKTIVQIDAKKPMKAFDVPVKSAAVHRSNRFLIRKEGLAL

SEQ ID NO: 11206 - protein, 277 aa, Triticum aestivum
  misc_feature (1)..(277): Ceres Seq. ID no. 15222295
MKGVNQGEGSSAYDMALIQAQIRHLAQEVRDLTLSKPITILSGKSDSGGSLSSYILPAAAVGALGYCYMWCKGWSLSDVMFVTKRNMASAVDSMSKQLEQVSSALAATKRHLTKRLENLDGKMDEQVEVSKQIRNEVTDVKTDLSQIGFDVEAIQQMVAGLEEKIELLDNKQDAANAGIWYLCRMAGGIKEGINAKFFQEADEKLKLLDLAHTEKKPVKGLELFLESTKEVKALDSKPKTIVQIDAKKPMKAFDVPVKSAAVHRSNRFLIRKEGLAL

SEQ ID NO: 11207 - DNA, 967 bp, Triticum aestivum
  misc_feature (1)..(967): Ceres Seq. ID no. 13598305
ctagaacatcctaatcgaaaaacatcccgccccccacagccatccgtccacagagtcaccacagccgcaccgcagctccatcttcaccaccgtcatcgtcaacgagaagcagcggcgagcagcagcgcccggccaagagacgagacgagacgagagaacaagtgttgccatggccgcgatggagagcaagagccggaggttcgcgctggcgtgcggcgtcctcagccagtacgtcaaggcggagcagaagatgtcctcctccgccgtcgtcgccccgcccccgcgcgccccgccggccaccacgctcagcctcatgcccggcgccgacgtcggccaggaccacgccgcggcggccgctgaggaggcgggcccggccacgccgctcaccatcttctacggcggcagggtagtcgtcttcgaggacttccccgcggacaaggcggccgaggtcatgcgcatggccaccaccgccggcgtcgagcgcgcggccgccacgcccgccccggccccggcgctcgcggacctgcccatcatgcgcaaggcctccctgcagaggttcttcgagaagcgcaaggaccgcctcggcgcgcgcgcgccctacgcccgccccgccgcgccggcagccaacaagggctcggaggacaagtcggcgtcgtcctcctcgtggctcgggctggccagcgccgacggcgccttcgcgctctgatccggacggacggacggacggggcaagacggcttgctcgctcgcctcaagacatcgtttgtagagcactttcaattttaatgtattctttgggtaaaaattcgaatagcgaaagaaagaaagaaagaaacaagattgagttcatagcaagccctctttgttcgttcgtttgatttgatcgacaaattcttttgatttctgcgcggatcatcagccatggttcgcacagaaacccagttcagttcatgaaccgaacaataac

SEQ ID NO: 11208 - protein, 178 aa, Triticum aestivum
  misc_feature (1)..(178): Ceres Seq. ID no. 13598306
MAAMESKSRRFALACGVLSQYVKAEQKMSSSAVVAPPPRAPPATTLSLMPGADVGQDHAAAAAEEAGPATPLTIFYGGRVVVFEDFPADKAAEVMRMATTAGVERAAATPAPAPALADLPIMRKASLQRFFEKRKDRLGARAPYARPAAPAANKGSEDKSASSSSWLGLASADGAFAL

SEQ ID NO: 11209 - protein, 175 aa, Triticum aestivum
  misc_feature (1)..(175): Ceres Seq. ID no. 13598307
MESKSRRFALACGVLSQYVKAEQKMSSSAVVAPPPRAPPATTLSLMPGADVGQDHAAAAAEEAGPATPLTIFYGGRVVVFEDFPADKAAEVMRMATTAGVERAAATPAPAPALADLPIMRKASLQRFFEKRKDRLGARAPYARPAAPAANKGSEDKSASSSSWLGLASADGAFAL

SEQ ID NO: 11210 - protein, 151 aa, Triticum aestivum
  misc_feature (1)..(151): Ceres Seq. ID no. 13598308
MSSSAVVAPPPRAPPATTLSLMPGADVGQDHAAAAAEEAGPATPLTIFYGGRVVVFEDFPADKAAEVMRMATTAGVERAAATPAPAPALADLPIMRKASLQRFFEKRKDRLGARAPYARPAAPAANKGSEDKSASSSSWLGLASADGAFAL

SEQ ID NO: 11211 - DNA, 2074 bp, Triticum aestivum
  misc_feature (1)..(2074): Ceres Seq. ID no. 13598312
aaccgcaaccgcaaccgctccgcccggcatctcgcctcgtcgcacttccctccagccccacacccagccagcacccggagacgagacgtgtacgtgcgcgtagcaccaacccgagcccagcggtgcgccgcagaaacaggcaggcagcggtgcgcggcgggacggaaggccagggtgacgtgcgggcgcgggccgggccagaggcctaagtagcgagcagcgccgatcgacggaccgaccggtcatgccgagcgcgctggggagcggcttcgccgggtcggtgaggctcaagtacgtgaagctggggtaccagtacctggtgaaccacttcctgacgctgctgctggtgccggtcatggcggccacggcgctcgagctggcgcgcctcggccccggcgagctgctcgcgctctggcgcgccctcgacctcgacctcgtgcacatcctctgctccgccttcctcgtcgtcttcgtcgccaccgtctacttcatgtcccgccccaggcccgtcttcctcgtcgactactgctgctacaagccctcccccagcttccgggtgcccttcaccaccttcatggagcacatcaagctcatctccaacaacgacaagagcctgcgcttccagacccgcatcctcgagcgctccgggctcggcgaggagacctgcctcccgccggccaaccactacatcccgcccaaccccagcatggaggcgtcgcgcgccgaggcgcagctcgtcatcttcaacgccatcgacgacctcgtccgccgcacgggcctcaagcccaaggacatcgacatcctcgtcgtcaactgcagcctcttctccccgacgccctccctctccgccatgatcatcaacaagtacaagctccgcagcaacatccgcagcttcaacctctccggcatgggatgcagcgccgggctcatctccatcgacctcgcgcgcgacatgctccaggtgcatcccaactcgaacgctctggtgatctcgacggagatcatcacgcccaacttctaccacgggagccggcgggacatgctgctgcccaactgcctgttccggatgggcgcggcggcgatcctgctgtccaaccggcggcgggaggcgcggcgcgccaagtacaggctggtgcacgtggtgcgcacgcacaagggcgcggacgaccgcgcgtaccggtgcgtgtacgaggaggaggacgacgaggggcactcgggcatctcgctctccaaggagctcatggccatcgccggcgaggcgctcaagtccaacatcaccaccatgggcccgctggtgctgcccatgtcggagcagctgctcttcttcttccgcctggtggggcgcaaggtgatcaacagcaagtggaagccctacatcccggacttcaagctggcgttcgagcacttctgcatccacgccggcggccgcgccgtcatcgacgagctgcagaagaacctggagctgtcgccgcggcacgtggaggcgtcgcgcatgacgctgcaccggttcggcaacacctccagcagctcgctctggtacgagctcgcctacatcgaggccaagggccgcatgcgcaagggcgaccgcgtgtggcagatcggcttcggcagcggcttcaagtgcaacagcgccgtctggaagtgcctccgcaccgtcaagacgcccaccgacgggccctgggacgactgcatccagcgctaccccgtccacatcccggaggtcgtcaagctgtgaggcgtcatcgacgacgagctcggctcgccgccggcggccgtgccctgcatctgcatgtacgtgccccccaaaacctggagctctgtgggggccccgaccaaattaaaccaatctctttctcctttgctctctttcttccttttctttttctagtattttcttcgccataaattaaattacatggatactcgtgggatgcgtcacacaaggaggggatcattcacagggagattaatcggctacccgaatatttatattggacgacgctaacgtgggcgtggttgttaaattgtttgtgtcacgaaattccactgcagtgaaagggataattacattggc

SEQ ID NO: 11212 - protein, 496 aa, Triticum aestivum
  misc_feature (1)..(496): Ceres Seq. ID no. 15222296
MPSALGSGFAGSVRLKYVKLGYQYLVNHFLTLLLVPVMAATALELARLGPGELLALWRALDLDLVHILCSAFLVVFVATVYFMSRPRPVFLVDYCCYKPSPSFRVPFTTFMEHIKLISNNDKSLRFQTRILERSGLGEETCLPPANHYIPPNPSMEASRAEAQLVIFNAIDDLVRRTGLKPKDIDILVVNCSLFSPTPSLSAMIINKYKLRSNIRSFNLSGMGCSAGLISIDLARDMLQVHPNSNALVISTEIITPNFYHGSRRDMLLPNCLFRMGAAAILLSNRRREARRAKYRLVHVVRTHKGADDRAYRCVYEEEDDEGHSGISLSKELMAIAGEALKSNITTMGPLVLPMSEQLLFFFRLVGRKVINSKWKPYIPDFKLAFEHFCIHAGGRAVIDELQKNLELSPRHVEASRMTLHRFGNTSSSSLWYELAYIEAKGRMRKGDRVWQIGFGSGFKCNSAVWKCLRTVKTPTDGPWDDCIQRYPVHIPEVVKL

SEQ ID NO: 11213 - protein, 459 aa, Triticum aestivum
  misc_feature (1)..(459): Ceres Seq. ID no. 15222297
MAATALELARLGPGELLALWRALDLDLVHILCSAFLVVFVATVYFMSRPRPVFLVDYCCYKPSPSFRVPFTTFMEHIKLISNNDKSLRFQTRILERSGLGEETCLPPANHYIPPNPSMEASRAEAQLVIFNAIDDLVRRTGLKPKDIDILVVNCSLFSPTPSLSAMIINKYKLRSNIRSFNLSGMGCSAGLISIDLARDMLQVHPNSNALVISTEIITPNFYHGSRRDMLLPNCLFRMGAAAILLSNRRREARRAKYRLVHVVRTHKGADDRAYRCVYEEEDDEGHSGISLSKELMAIAGEALKSNITTMGPLVLPMSEQLLFFFRLVGRKVINSKWKPYIPDFKLAFEHFCIHAGGRAVIDELQKNLELSPRHVEASRMTLHRFGNTSSSSLWYELAYIEAKGRMRKGDRVWQIGFGSGFKCNSAVWKCLRTVKTPTDGPWDDCIQRYPVHIPEVVKL

SEQ ID NO: 11214 - protein, 414 aa, Triticum aestivum
  misc_feature (1)..(414): Ceres Seq. ID no. 15222298
MSRPRPVFLVDYCCYKPSPSFRVPFTTFMEHIKLISNNDKSLRFQTRILERSGLGEETCLPPANHYIPPNPSMEASRAEAQLVIFNAIDDLVRRTGLKPKDIDILVVNCSLFSPTPSLSAMIINKYKLRSNIRSFNLSGMGCSAGLISIDLARDMLQVHPNSNALVISTEIITPNFYHGSRRDMLLPNCLFRMGAAAILLSNRRREARRAKYRLVHVVRTHKGADDRAYRCVYEEEDDEGHSGISLSKELMAIAGEALKSNITTMGPLVLPMSEQLLFFFRLVGRKVINSKWKPYIPDFKLAFEHFCIHAGGRAVIDELQKNLELSPRHVEASRMTLHRFGNTSSSSLWYELAYIEAKGRMRKGDRVWQIGFGSGFKCNSAVWKCLRTVKTPTDGPWDDCIQRYPVHIPEVVKL

SEQ ID NO: 11215 - DNA, 1379 bp, Triticum aestivum
  misc_feature (1)..(1379): Ceres Seq. ID no. 13598313
ccacaccatcgtcttatctcggggcctaagagccagaggaatcatttccttcttctccatccttccgtccagccttgttggtttcactgtgccgtcgatcggcatggcgaggaaatgctcgagctgcggccacaatggccacaactcgaggacctgcggcgggcaccgaggcgttgagagcggcggcggcggtgggctgaggctgtttggggtgcagctgcaggtgggcgccgcgcctctcaagaagagcttcagcatggagtgcctgtcgtcgaccgcgtcggcctactacgcggcggccgcggccgtgggtgtcgccgcgtccaactcgtcgtcgtccgtgtcgtcgtcgtcgtcgctcgtctcggtggaggagagcccggagaagatgggccacgggtacctctccgacgggctcatgggcagggctcaagagaggaagaaaggggttccatggaccgaggacgagcaccggaggttcctggccggcctggagaagctcgggaaaggcgactggcgaggcatctcccggcacttcgtcaccacacgcacgccgacgcaggtcgccagccacgcccagaagtacttcctccggcaggccggcctcgcgcagaagaagcggcggtccagcctcttcgacgtcgtggagaaaaatggcgacaggggagccaccgagcgtcgtcacaggctgaaacccgatgccaccagctccgtggacgcgatggggttaacgttccctgctctttccctgggcgccagccggccgaggccggacgcggcgctaccgccgtgcctgactctgatgccgagctgctcgccgccgtcgtcgatgatcggcgcaccgtcagcgagccgtgcaccgaagctccctccttccctgggcctggtggcaaatgcgaatcctcctcggcaggcgcctgacctggagctcaagatctcgtccacggccgcccggaagaccgaccagcaggccggtgctgccgccggttcgtcgccatcgccgaggacgccctttttcggaaccatcagggtcacctagagcgagcaaaagaccacccaccggagcgacggcttaaaagagatctttccgtagacgacgacgacgacgaagaagaacagcaacaagaagaaagagcttttgctagtggcgtgctacattaaacagtagtatgtcagtcagtgtgcgtgtgttgctggcatggcattaagaaatgccatcaccgatccatccataaccatcctgtattatcaccatcacaaggcccaactttactggcctaatttagccatgcaaataaacaaggaacgggcctcattggcatcaaaaaaaaaaaaaaaaaagcttatcgataccgtcgacctgtttaaacacaataaag

SEQ ID NO: 11216 - protein, 345 aa, Triticum aestivum
  misc_feature (1)..(345): Ceres Seq. ID no. 15222299
HTIVLSRGLRARGIISFFSILPSSLVGFTVPSIGMARKCSSCGHNGHNSRTCGGHRGVESGGGGGLRLFGVQLQVGAAPLKKSFSMECLSSTASAYYAAAAAVGVAASNSSSSVSSSSSLVSVEESPEKMGHGYLSDGLMGRAQERKKGVPWTEDEHRRFLAGLEKLGKGDWRGISRHFVTTRTPTQVASHAQKYFLRQAGLAQKKRRSSLFDVVEKNGDRGATERRHRLKPDATSSVDAMGLTFPALSLGASRPRPDAALPPCLTLMPSCSPPSSMIGAPSASRAPKLPPSLGLVANANPPRQAPDLELKISSTAARKTDQQAGAAAGSSPSPRTPFFGTIRVT

SEQ ID NO: 11217 - protein, 311 aa, Triticum aestivum
  misc_feature (1)..(311): Ceres Seq. ID no. 15222300
MARKCSSCGHNGHNSRTCGGHRGVESGGGGGLRLFGVQLQVGAAPLKKSFSMECLSSTASAYYAAAAAVGVAASNSSSSVSSSSSLVSVEESPEKMGHGYLSDGLMGRAQERKKGVPWTEDEHRRFLAGLEKLGKGDWRGISRHFVTTRTPTQVASHAQKYFLRQAGLAQKKRRSSLFDVVEKNGDRGATERRHRLKPDATSSVDAMGLTFPALSLGASRPRPDAALPPCLTLMPSCSPPSSMIGAPSASRAPKLPPSLGLVANANPPRQAPDLELKISSTAARKTDQQAGAAAGSSPSPRTPFFGTIRVT

SEQ ID NO: 11218 - protein, 260 aa, Triticum aestivum
  misc_feature (1)..(260): Ceres Seq. ID no. 15222301
MECLSSTASAYYAAAAAVGVAASNSSSSVSSSSSLVSVEESPEKMGHGYLSDGLMGRAQERKKGVPWTEDEHRRFLAGLEKLGKGDWRGISRHFVTTRTPTQVASHAQKYFLRQAGLAQKKRRSSLFDVVEKNGDRGATERRHRLKPDATSSVDAMGLTFPALSLGASRPRPDAALPPCLTLMPSCSPPSSMIGAPSASRAPKLPPSLGLVANANPPRQAPDLELKISSTAARKTDQQAGAAAGSSPSPRTPFFGTIRVT

SEQ ID NO: 11219 - DNA, 1344 bp, Triticum aestivum
  misc_feature (1)..(1344): Ceres Seq. ID no. 13598319
aaaaactcaccaagcaaacacttgagctaaccatatctagtccatatcctctcccaagctagctcgaagcagcaatggcgaaatctttcaccttattagcgctacttagcgcactggttgtcctctcacttcttgtgagccccattgcttgttcccgcaagctccccaggcctgcaaccaaggcccacaagaaccacaccgctgctaccccttcgtcgtctgccgcttatggctccggcggctggttagccggcggcgcgacgtattacggcgcccccaacggcgacggaagcgacggtggcgcgtgtggctaccagagcgctgtcggcaaccggccgttctcgtcgatgatcgccgccggcaacccgtcgctctacagagatggcaagggctgcggagcgtgctacgaggttaaatgcacaggcaaccaggcatgctccggccagccggcgaccgtcgtcatcaccgacgagtgccccgccggggccgcttgcctcggtgaggccgcccacttcgacatgagcggcacctccatgggcgccatggcgaagcctggcatggccgacaaactccgggccggcggtatcatcaagatccagtacaagagggtgccatgcaagtaccctggcatgaacattgccttcaaggtggaccagggctccaacccctactacctggaggtcctgatcgaattcgaggacgacgacggcgacctcaacgccgtggacctcatggaggccaactgcggcacctggacgcccatggcgcagaactggggcgcgctgtaccgcctcaactccaacaccggcaagccgctgcgcgggcccttctcgctccggctcacctccgactccggcaggaagctcgtcgtcaacaacgtcatccccgccagctggaaggccggagccacctaccgctccttggttaactacccctaagttacagcctcatcaactttttttcactgcgccgtacgtgcttggctagtaaccaagaagtgcagtgcagagtgtggtcgtggtaatttagaaccgcgggttaatttctaccgcggggattgtatttatacgaatatgcgtccgggaacggcaggaggctgtgtcagaggaggaggagcaggccatgcaaagattgtgccagctcttccctccatggtctctcggcgctcccctagtgatgcgtgtcgtcgatttgtatgtattttgtttctcttcctctgttttgtcgatgaggagaaaagcttgtagtgcagtgcaaactaaagttgcacgccgatgtatcaagttgtgtgagtgtgtttttggagcccaatccttgagagaaatgaacttttaccatcagatc

SEQ ID NO: 11220 - protein, 287 aa, Triticum aestivum
  misc_feature (1)..(287): Ceres Seq. ID no. 13598320
MAKSFTLLALLSALVVLSLLVSPIACSRKLPRPATKAHKNHTAATPSSSAAYGSGGWLAGGATYYGAPNGDGSDGGACGYQSAVGNRPFSSMIAAGNPSLYRDGKGCGACYEVKCTGNQACSGQPATVVITDECPAGAACLGEAAHFDMSGTSMGAMAKPGMADKLRAGGIIKIQYKRVPCKYPGMNIAFKVDQGSNPYYLEVLIEFEDDDGDLNAVDLMEANCGTWTPMAQNWGALYRLNSNTGKPLRGPFSLRLTSDSGRKLVVNNVIPASWKAGATYRSLVNYP

SEQ ID NO: 11221 - protein, 196 aa, Triticum aestivum
  misc_feature (1)..(196): Ceres Seq. ID no. 13598321
MIAAGNPSLYRDGKGCGACYEVKCTGNQACSGQPATVVITDECPAGAACLGEAAHFDMSGTSMGAMAKPGMADKLRAGGIIKIQYKRVPCKYPGMNIAFKVDQGSNPYYLEVLIEFEDDDGDLNAVDLMEANCGTWTPMAQNWGALYRLNSNTGKPLRGPFSLRLTSDSGRKLVVNNVIPASWKAGATYRSLVNYP

SEQ ID NO: 11222 - DNA, 1245 bp, Triticum aestivum
  misc_feature (1)..(1245): Ceres Seq. ID no. 13598327
acacacaggcagaatatggagaccaagcagagcacagaagggaaatggtcgcacgggaagaccatgccggtgaagaacgtccaggcgctggccgcggacgcggcggagctgacggaggaggccatcaagcggtacatcaggccggcgagggccgacgatgtcgtcgttgctgctcacggcgataatagcagccagagcattcctgtgatcgaccttggtaggctccttgatccccggagctatcagctggaggcggccaggctcaggtccgcatgtgaggagtggggcttcttccaggtgaaaaaccatgaaattcctgacacagttcttgaaaacatgaggaacgacctcgagcacttcttcaggcttcccctcgatgagaagaacagatttggccagttgcctggagacctccaaggctatggccaagcatttgttgagtccgaacatcaaacgctcgactggtgtgacaggctttacctagtgacccagccacctcacgatcgtgaaatgagaccatggcctacaactcctgtcagcttcagggaatccattgagtcgtactcctctgagctgatgagggtgactggctcgctcatggcaatcatcgctagaaacctaggcgttgatctccccagtgatacatacgtgagtcaggcattgaggatgacctactaccctgcatgccccgtggctcatgataaggttttggggatttcaccacattccgacatttctatgctaacgctggtatgggagttgaatatggtgggagggctccagatcaagagacaagatgcatgggtgccggtaaaaccccacccccaaggcattggtggtgaatgttggtgactttcttgagataatgacaaacggaaagtaccaaagcattgagcacagggtcaccgttaatcctcacaaggagaggatgtccatttctgcttttcacctcccaaagtttgatatgagcgtgggcccattatctgaaatagttggggccgagctcaagaaatacaagaccctgagggtggacgaggttgctaaggttgttttctcgagcaaacttgacggcaagaaaaccaaggactatgccatgcttagagtctgagtctacaagagcagaaacttggagcagaaatttcgacagccgtatataggcctgaaacatttgcgctgctccattttggtcatggttaattggccgatgtatatgaatgtgaactaataaatgtatccagatgtgag

SEQ ID NO: 11223 - protein, 283 aa, Triticum aestivum
  misc_feature (1)..(283): Ceres Seq. ID no. 15222308
THRQNMETKQSTEGKWSHGKTMPVKNVQALAADAAELTEEAIKRYIRPARADDVVVAAHGDNSSQSIPVIDLGRLLDPRSYQLEAARLRSACEEWGFFQVKNHEIPDTVLENMRNDLEHFFRLPLDEKNRFGQLPGDLQGYGQAFVESEHQTLDWCDRLYLVTQPPHDREMRPWPTTPVSFRESIESYSSELMRVTGSLMAIIARNLGVDLPSDTYVSQALRMTYYPACPVAHDKVLGISPHSDISMLTLVWELNMVGGLQIKRQDAWVPVKPHPQGIGGECW

SEQ ID NO: 11224 - protein, 278 aa, Triticum aestivum
  misc_feature (1)..(278): Ceres Seq. ID no. 15222309
METKQSTEGKWSHGKTMPVKNVQALAADAAELTEEAIKRYIRPARADDVVVAAHGDNSSQSIPVIDLGRLLDPRSYQLEAARLRSACEEWGFFQVKNHEIPDTVLENMRNDLEHFFRLPLDEKNRFGQLPGDLQGYGQAFVESEHQTLDWCDRLYLVTQPPHDREMRPWPTTPVSFRESIESYSSELMRVTGSLMAIIARNLGVDLPSDTYVSQALRMTYYPACPVAHDKVLGISPHSDISMLTLVWELNMVGGLQIKRQDAWVPVKPHPQGIGGECW

SEQ ID NO: 11225 - protein, 262 aa, Triticum aestivum
  misc_feature (1)..(262): Ceres Seq. ID no. 15222310
MPVKNVQALAADAAELTEEAIKRYIRPARADDVVVAAHGDNSSQSIPVIDLGRLLDPRSYQLEAARLRSACEEWGFFQVKNHEIPDTVLENMRNDLEHFFRLPLDEKNRFGQLPGDLQGYGQAFVESEHQTLDWCDRLYLVTQPPHDREMRPWPTTPVSFRESIESYSSELMRVTGSLMAIIARNLGVDLPSDTYVSQALRMTYYPACPVAHDKVLGISPHSDISMLTLVWELNMVGGLQIKRQDAWVPVKPHPQGIGGECW

SEQ ID NO: 11226 - DNA, 925 bp, Triticum aestivum
  misc_feature (1)..(925): Ceres Seq. ID no. 13598336
ctaatcgaaaaaatggatggcatggaagtgaagcctagagggaaggtgcaaactggtaagagaaaaaccagcagatgtcaagcgggtgataaagcagcaaaatttccttgtgatatagaagggtgtgacatgagcttcaactcacagcaggatttgttgttgcacaagcgtgatatttgtcctgttaaaggatgcaagaaaaagttcttctgccataaatacctgctccagcaccgcaaagtgcacatggatgaaagaccactcaattgtgaatggaagggctgcaagaagacattcaagtggccatgggctaggacagaacacatgagggtccatacgggggtgcgaccttacgaatgcatggtacctggctgtggtcagacattcagatttgtgtcggatttcagccgccacaagagaaagactggccattccagtggtaagaaaaataaggagagtacataacttctaatccctgtgcaggagtgcaggttctttctctgaagggtatgctgattgaataactgcatcagattccatttgtcgttggattaacctgcattaggagtctaattcattccattgtttactgactccgcataatgagtcaatttttccagtgccttgggtccaactggcctgttgttgactggggttattccaagtcaattgtatgtgctttagtttatcgccaacgcttggggaagttccttttgtcatcatggttaaattgacatacttatcttgctgtctggtggcattcagttagttgttcgttattattttcctatttattattacaaattgcagcgtaggtaataataatgtgcacgcttattactatgctacatctttgttttttctttttcaaaatattgtcagatagatctcactttcgataaagggtatttttatcgggtttgct

SEQ ID NO: 11227 - protein, 154 aa, Triticum aestivum
  misc_feature (1)..(154): Ceres Seq. ID no. 13598337
LIEKMDGMEVKPRGKVQTGKRKTSRCQAGDKAAKFPCDIEGCDMSFNSQQDLLLHKRDICPVKGCKKKFFCHKYLLQHRKVHMDERPLNCEWKGCKKTFKWPWARTEHMRVHTGVRPYECMVPGCGQTFRFVSDFSRHKRKTGHSSGKKNKEST

SEQ ID NO: 11228 - protein, 150 aa, Triticum aestivum
  misc_feature (1)..(150): Ceres Seq. ID no. 13598338
MDGMEVKPRGKVQTGKRKTSRCQAGDKAAKFPCDIEGCDMSFNSQQDLLLHKRDICPVKGCKKKFFCHKYLLQHRKVHMDERPLNCEWKGCKKTFKWPWARTEHMRVHTGVRPYECMVPGCGQTFRFVSDFSRHKRKTGHSSGKKNKEST

SEQ ID NO: 11229 - protein, 147 aa, Triticum aestivum
  misc_feature (1)..(147): Ceres Seq. ID no. 13598339
MEVKPRGKVQTGKRKTSRCQAGDKAAKFPCDIEGCDMSFNSQQDLLLHKRDICPVKGCKKKFFCHKYLLQHRKVHMDERPLNCEWKGCKKTFKWPWARTEHMRVHTGVRPYECMVPGCGQTFRFVSDFSRHKRKTGHSSGKKNKEST

SEQ ID NO: 11230 - DNA, 1367 bp, Triticum aestivum
  misc_feature (1)..(1367): Ceres Seq. ID no. 13598340
cctaatcgaaaaattcaccaaacaatccttgaaatcgacccaagccgctctccctgtcaggtgagccgcgccgccagtctccggcgaccccgagccccaacaatcccatctccggccacaggagctccagggttcctctctccatctggtcctccgctacgccccgaatcgatggagattagggccccgccgacgagcctcaggctcgcgacgccgccttcaaccgccagcttccgcccggtcgccctccggacctccttcctcagcggcagcgtttctcttcgagctgtgcaagtacgtcaatcaaatgtcaacagatttaagtgcaacgccatacggagtaacctcttcgatagactaactagggttgtcaggtcctatgcaaatgcaattctgagttcatttgaagaccctgagaagatcctagatcaagcggtcttggagatgaatgatgatttaataaagatgcggcaagccactgcacaggtcttggcatctcaaaagaggcttgagaacaagtacaaagctgccgaacaagctgatgctgattggtatcggagggctcaacttgctcttcaaaagggtgaagaggatcttgctcgtgaagcccttaaacggcgtaaatcatatgctgaaaatgcaagctcgttaaaggcccagcttgatcagcagaagagtgtcgtcgaaaatcttgtttcaaataccaggcttcttgagagcaagatagcagaggccaagcagaaaaaggataccctaaaagcctgtgctcaatcagcaaagaccgcaacaaaagtgagtgaaatgctggggaatgtgaatacaagtggtgccttgtcagcgtttgagaagatggaggagaaagttatgactatggaatcccaagctgaggcacttggtcaattaggagctgatgatctagaaggaaagtttgcaatgcttgagactacatcggttgacgatgatcttgcacaaatgagaaaagaactgtccgggagatctttgaagggcgaactccctccgggcagagccgcagccagcaaatcaggtagccccttccgagacacagagattgagaaggagctaaatgagctgcggaagaaggccaaagagtattagattttatttacaggccatgtccgtgtcccggggcttgatgaaacctcctacccgaagaaccccagaagttatataggcttgcagatttcagcaatgtgcatctgaaacctccggtgtacttttttttgggggtaaaggtatatgggtgcgtgaagagttctcttgcaattttcctgtgtatgtcattgtactttgtacagttaatcttgtcaccataatgcaaatcattacacccccttttgagcttagct

SEQ ID NO: 11231 - protein, 371 aa, Triticum aestivum
  misc_feature (1)..(371): Ceres Seq. ID no. 13598341
PNRKIHQTILEIDPSRSPCQVSRAASLRRPRAPTIPSPATGAPGFLSPSGPPLRPESMEIRAPPTSLRLATPPSTASFRPVALRTSFLSGSVSLRAVQVRQSNVNRFKCNAIRSNLFDRLTRVVRSYANAILSSFEDPEKILDQAVLEMNDDLIKMRQATAQVLASQKRLENKYKAAEQADADWYRRAQLALQKGEEDLAREALKRRKSYAENASSLKAQLDQQKSVVENLVSNTRLLESKIAEAKQKKDTLKACAQSAKTATKVSEMLGNVNTSGALSAFEKMEEKVMTMESQAEALGQLGADDLEGKFAMLETTSVDDDLAQMRKELSGRSLKGELPPGRAAASKSGSPFRDTEIEKELNELRKKAKEY

SEQ ID NO: 11232 - protein, 314 aa, Triticum aestivum
  misc_feature (1)..(314): Ceres Seq. ID no. 13598342
MEIRAPPTSLRLATPPSTASFRPVALRTSFLSGSVSLRAVQVRQSNVNRFKCNAIRSNLFDRLTRVVRSYANAILSSFEDPEKILDQAVLEMNDDLIKMRQATAQVLASQKRLENKYKAAEQADADWYRRAQLALQKGEEDLAREALKRRKSYAENASSLKAQLDQQKSVVENLVSNTRLLESKIAEAKQKKDTLKACAQSAKTATKVSEMLGNVNTSGALSAFEKMEEKVMTMESQAEALGQLGADDLEGKFAMLETTSVDDDLAQMRKELSGRSLKGELPPGRAAASKSGSPFRDTEIEKELNELRKKAKEY

SEQ ID NO: 11233 - protein, 223 aa, Triticum aestivum
  misc_feature (1)..(223): Ceres Seq. ID no. 13598343
MNDDLIKMRQATAQVLASQKRLENKYKAAEQADADWYRRAQLALQKGEEDLAREALKRRKSYAENASSLKAQLDQQKSVVENLVSNTRLLESKIAEAKQKKDTLKACAQSAKTATKVSEMLGNVNTSGALSAFEKMEEKVMTMESQAEALGQLGADDLEGKFAMLETTSVDDDLAQMRKELSGRSLKGELPPGRAAASKSGSPFRDTEIEKELNELRKKAKEY

SEQ ID NO: 11234 - DNA, 709 bp, Triticum aestivum
  misc_feature (1)..(709): Ceres Seq. ID no. 13598351
aacgccccgagaacgagaactcctgtgctgtgctgcccctctctctctccccccactgagtctcctgtgctgcccccgctgacctgcggccaccgacggcgagtggaggcggacgacgggttcccgccgcgggctcttcggcggcgccgcgtcagggctcgcgcgggctggtgctgatttgagggagattcggggccggggccggagccggcgcggcctctggggatggggtggctttcctgctgcaagcggtcgaacggggcccaacccggcaggaagaagaagaaggacacgacatggcggatcttctcactcaaggagcttcagttggcgaccaacaatttcaactacgataacaagcttggtgaaggtggattcggcagtgtctactggggccagctctgggacggatcacagattgcggtgaaaaggctcaagagttggagcaacaaggctgaaaaggagtctgctgtcgaggtcgaggttttggcacgagtgcggcataagagcctcttgagcttacgtggatattgcgctgaaggccaggagcgcctgatagtctacgactatatgcagaacctgagcttgcactctcacctgcacggacagcatgcagctgaatgccatcttggttgggagcgaagaatgaacatcgccattgattcggcnnnaggcatcgcttatcttcatcaccatgcgatcccacata

SEQ ID NO: 11235 - protein, 161 aa, Triticum aestivum
  misc_feature (1)..(161): Ceres Seq. ID no. 13598352
  misc_feature (148)..(148): Xaa is any aa, unknown or other
  misc_feature (149)..(149): Xaa is any aa, unknown or other
MGWLSCCKRSNGAQPGRKKKKDTTWRIFSLKELQLATNNFNYDNKLGEGGFGSVYWGQLWDGSQIAVKRLKSWSNKAEKESAVEVEVLARVRHKSLLSLRGYCAEGQERLIVYDYMQNLSLHSHLHGQHAAECHLGWERRMNIAIDSXXGIAYLHHHAIPH

SEQ ID NO: 11236 - DNA, 1573 bp, Triticum aestivum
  misc_feature (1)..(1573): Ceres Seq. ID no. 13598368
cacaatactagcaagagtgtagccaacagagccaaactcaccggtacgcagccgatcgatcgataaggtcccccgaatttaacacccgctcgccatgtcgttcctcccgattccgctgccaatcgttggagacatagccagcaggctgaacggccaagagaaaccgcgcggcgacgacacgacgtcgtcggcgccggcgcctgtcctcggaaccgtggccagcaggtggcgcgagctccacggcgagaactcgtggaagggcctcctggaccctctggacccgcacctccgctccagcatcatctcctacggcgagatggtgcaggccgcctacgacgccttcaacaccgagaggcgctccccgcactgcggcgcgtgcttctacggctacgaggacctgctggcgggcgtcggggtgccgcaccacggcaacaactacgaggtcaccaagttcatctacgccacctcgtcgctgccactcccgagctccttcctcctgctgccgctgccgtcgctgccggacgtctggagccgagagtccaactggatggggtacgtggccgtggccacggacgagggcgccgccgcgctcgggaggcgggacatcgttgtggcgtggcgcggcaccgtccagaacatggagtgggtcaacgacctcgacttcgcgccggtgcccgccgcgcccgtgctgggctccgcggcgagccagcaccgcctcgccgtcgtgcaccatgggttcctctccatgtacacgtcaagcaacaagagctccgagttcaccaagaccagcgccagagatcaggttgtcaaggaggtcaggaggctcgtggagctgtacaaggatgaggaggtcagcatcaccatctgtggccacagccttggtgcgtcagtcgccaccctgaacgccgttgacctggtgtctagcggcatcaacaaacccgagggctccactaagtcgttccctgtgactgctatcgtgtttgcgagccctcacgtcgggtgccgcttctttaggtcggcgttcaactcatttccagacctgaaggcactacatgtgcagaacgctggcgacgtcgtgcccatgtacccacctctgggatacgtggacgtggccgtggagcttaccataagaacaatccgatctccgtacatgcgtaagccggccacagtgggaacactccacaatctcgagtgctacctacacggagtggccggggagcagggaagtgccggagggttcaagctagaggtggatcgtgacatagcgctggtgaacaagggtgccgacgctctcacggacgagcacccggtgccggcgtgttggtgggtccctagacacaagttcatggtcaagggggaagatgggcgatggacgctccaggatttcaagcacatctgagttactcacatcggccattgaaaggtaaattaggccttgatgtgattcacgacattgtactcgttaccaagtttctaaataacggctacggtttgtcaaccgtaccgagtatctttccctttttatgcaatataagtgaatgtttcacgacattgtactcgttaccaagggtct

SEQ ID NO: 11237 - protein, 434 aa, Triticum aestivum
  misc_feature (1)..(434): Ceres Seq. ID no. 15222329
MSFLPIPLPIVGDIASRLNGQEKPRGDDTTSSAPAPVLGTVASRWRELHGENSWKGLLDPLDPHLRSSIISYGEMVQAAYDAFNTERRSPHCGACFYGYEDLLAGVGVPHHGNNYEVTKFIYATSSLPLPSSFLLLPLPSLPDVWSRESNWMGYVAVATDEGAAALGRRDIVVAWRGTVQNMEWVNDLDFAPVPAAPVLGSAASQHRLAVVHHGFLSMYTSSNKSSEFTKTSARDQVVKEVRRLVELYKDEEVSITICGHSLGASVATLNAVDLVSSGINKPEGSTKSFPVTAIVFASPHVGCRFFRSAFNSFPDLKALHVQNAGDVVPMYPPLGYVDVAVELTIRTIRSPYMRKPATVGTLHNLECYLHGVAGEQGSAGGFKLEVDRDIALVNKGADALTDEHPVPACWWVPRHKFMVKGEDGRWTLQDFKHI

SEQ ID NO: 11238 - protein, 360 aa, Triticum aestivum
  misc_feature (1)..(360): Ceres Seq. ID no. 15222330
MVQAAYDAFNTERRSPHCGACFYGYEDLLAGVGVPHHGNNYEVTKFIYATSSLPLPSSFLLLPLPSLPDVWSRESNWMGYVAVATDEGAAALGRRDIVVAWRGTVQNMEWVNDLDFAPVPAAPVLGSAASQHRLAVVHHGFLSMYTSSNKSSEFTKTSARDQVVKEVRRLVELYKDEEVSITICGHSLGASVATLNAVDLVSSGINKPEGSTKSFPVTAIVFASPHVGCRFFRSAFNSFPDLKALHVQNAGDVVPMYPPLGYVDVAVELTIRTIRSPYMRKPATVGTLHNLECYLHGVAGEQGSAGGFKLEVDRDIALVNKGADALTDEHPVPACWWVPRHKFMVKGEDGRWTLQDFKHI

SEQ ID NO: 11239 - protein, 283 aa, Triticum aestivum
  misc_feature (1)..(283): Ceres Seq. ID no. 15222331
MGYVAVATDEGAAALGRRDIVVAWRGTVQNMEWVNDLDFAPVPAAPVLGSAASQHRLAVVHHGFLSMYTSSNKSSEFTKTSARDQVVKEVRRLVELYKDEEVSITICGHSLGASVATLNAVDLVSSGINKPEGSTKSFPVTAIVFASPHVGCRFFRSAFNSFPDLKALHVQNAGDVVPMYPPLGYVDVAVELTIRTIRSPYMRKPATVGTLHNLECYLHGVAGEQGSAGGFKLEVDRDIALVNKGADALTDEHPVPACWWVPRHKFMVKGEDGRWTLQDFKHI

SEQ ID NO: 11240 - DNA, 1419 bp, Triticum aestivum
  misc_feature (1)..(1419): Ceres Seq. ID no. 13598369
ataagtttgtaagttcgacgacataaggttgcgcatcgaaaaggacccaggttctcttctccaacggtttggttgtgcgccatggacgctggaatgagacaatcgagggtccggttttctggtgtagggcaggaagatcagggcagcggccaggctatggcaatgccaccacagcgacagcgaggcacaccttttggaagaggtgaagaatacgatgccgcgtacgcagcaacggtggcagcagtggcatatgctattgctgcaatggaggaagagaagttgccatcccaacagaagcctatcccagaaaaagcagcatctcggcagaagcgcgtaacagttcatgagcccacagctgccccacccccgagatcaccacccaggagaggtggaagcatgaaaaggccgactgaaggaagcaaaatctcaagattgtttagcggtaacaaagaaatagttgaagttggcgacgaagacgaacgagcaaatgtgtcggtgaggaggccggtgaaaccggcgccaaagaagccaggagatctaactccaggccagaacgtggtagggaaggtggttgactccgtcccgaacctgaaggacgatccaagtttcacgaggaaaacaccggacaagaagaggagcagaaactttgagcaggaggaggcaaatcagagggcgaaacccggggttaacccgacgacctcgtttccaggagagaggaaacagagctggaagcacgagcaggaaccagcgaatcagagggcaccaccggcagccaggcctccaggaatggtttattccagcgaggcggagaggatggcggctgcgtgggagaaggagaagctggctaagatcaaggagcagtataacgagacgatggaaaccatagccgaatgggagactgaaaagaaggccaaggccaggcgccagaaggagcccaaagagggggattcagagaggaagcgagcaaaggcgctggaggagtacaacgacgagatgaagcggatcagcaaggtggccgccgcgtcgaggatgtcggcagaggacaagaaaaggaacgccgagggcaaagtctgggagaaggcggccaaaatccggtcgacggggaagctcccacggtcctgtggctgcttctgaaaccatggacacacataatgtgggccaagaatctggttgtgttgctgctttactgtgtatacttgtttatgtatcgcctaaatgaagtacattgcgccaaccagtgcaaactccaacaacaacaacaacaaagcctttagtcccaagcaagttgaggtaggctagaggtgaaacccataagatctcgcaaccaactcatggctctggcacatggatagcaagcttccatgcatccctgtccatagctagctcttcggtgataccccaatccttcaggtctctctt

SEQ ID NO: 11241 - protein, 350 aa, Triticum aestivum
  misc_feature (1)..(350): Ceres Seq. ID no. 13598370
MDAGMRQSRVRFSGVGQEDQGSGQAMAMPPQRQRGTPFGRGEEYDAAYAATVAAVAYAIAAMEEEKLPSQQKPIPEKAASRQKRVTVHEPTAAPPPRSPPRRGGSMKRPTEGSKISRLFSGNKEIVEVGDEDERANVSVRRPVKPAPKKPGDLTPGQNVVGKVVDSVPNLKDDPSFTRKTPDKKRSRNFEQEEANQRAKPGVNPTTSFPGERKQSWKHEQEPANQRAPPAARPPGMVYSSEAERMAAAWEKEKLAKIKEQYNETMETIAEWETEKKAKARRQKEPKEGDSERKRAKALEEYNDEMKRISKVAAASRMSAEDKKRNAEGKVWEKAAKIRSTGKLPRSCGCF

SEQ ID NO: 11242 - protein, 346 aa, Triticum aestivum
  misc_feature (1)..(346): Ceres Seq. ID no. 13598371
MRQSRVRFSGVGQEDQGSGQAMAMPPQRQRGTPFGRGEEYDAAYAATVAAVAYAIAAMEEEKLPSQQKPIPEKAASRQKRVTVHEPTAAPPPRSPPRRGGSMKRPTEGSKISRLFSGNKEIVEVGDEDERANVSVRRPVKPAPKKPGDLTPGQNVVGKVVDSVPNLKDDPSFTRKTPDKKRSRNFEQEEANQRAKPGVNPTTSFPGERKQSWKHEQEPANQRAPPAARPPGMVYSSEAERMAAAWEKEKLAKIKEQYNETMETIAEWETEKKAKARRQKEPKEGDSERKRAKALEEYNDEMKRISKVAAASRMSAEDKKRNAEGKVWEKAAKIRSTGKLPRSCGCF

SEQ ID NO: 11243 - protein, 325 aa, Triticum aestivum
  misc_feature (1)..(325): Ceres Seq. ID no. 13598372
MAMPPQRQRGTPFGRGEEYDAAYAATVAAVAYAIAAMEEEKLPSQQKPIPEKAASRQKRVTVHEPTAAPPPRSPPRRGGSMKRPTEGSKISRLFSGNKEIVEVGDEDERANVSVRRPVKPAPKKPGDLTPGQNVVGKVVDSVPNLKDDPSFTRKTPDKKRSRNFEQEEANQRAKPGVNPTTSFPGERKQSWKHEQEPANQRAPPAARPPGMVYSSEAERMAAAWEKEKLAKIKEQYNETMETIAEWETEKKAKARRQKEPKEGDSERKRAKALEEYNDEMKRISKVAAASRMSAEDKKRNAEGKVWEKAAKIRSTGKLPRSCGCF

SEQ ID NO: 11244 - DNA, 751 bp, Triticum aestivum
  misc_feature (1)..(751): Ceres Seq. ID no. 13598378
acaaaacggcccggactcgcctcctcctcctccccctcacaactcgccaacgccaaatccgcctccgccaccggccagccagagagcgagcgagcgattcgccgccgccgtcaagcctgcagggagcgagcccctctcgcctccaaacagcctcaccctcgcggcccccgtcccctcaaagtccccgcgtctcccgcgagaatcgcgcccgcccgcctagggtttccgccgccgccggagaggaggggagtgggaggaggggacgagatggccggacggctcctcgggcagctcctcgtcatgggcggcgccgtcgtcggcagggccgtggtccaggcctaccgccaggccatcgtcaatgcacagagaaccggagctgcccaggaagctgtgaatggtattcgaagggctagcaaggctatgaccgaacaagaagcccggcaaatattaggtatcagtgaaaagacgagttgggaagagattgtcaagaagtatgatacgatgtttgagaagaatgccaagagcggaagcttctatctccagtcgaaagtacaccgggccaaagaatgtctggagtccatataccatgataagcccgacataatgaactgaactgagatgggcagcgtttcgtctaatcgatcgattttgtcagtcgatgttctgtctgagctatgctgggctgctgcatcaggtcaaatttggttgtaacaggatgtttgttctgcttgactcgaataatatattcaac

SEQ ID NO: 11245 - protein, 203 aa, Triticum aestivum
  misc_feature (1)..(203): Ceres Seq. ID no. 13598379
TKRPGLASSSSPSQLANAKSASATGQPESERAIRRRRQACRERAPLASKQPHPRGPRPLKVPASPARIAPARLGFPPPPERRGVGGGDEMAGRLLGQLLVMGGAVVGRAVVQAYRQAIVNAQRTGAAQEAVNGIRRASKAMTEQEARQILGISEKTSWEEIVKKYDTMFEKNAKSGSFYLQSKVHRAKECLESIYHDKPDIMN

SEQ ID NO: 11246 - protein, 136 aa, Triticum aestivum
  misc_feature (1)..(136): Ceres Seq. ID no. 13598380
KTARTRLLLLPLTTRQRQIRLRHRPARERASDSPPPSSLQGASPSRLQTASPSRPPSPQSPRVSRENRARPPRVSAAAGEEGSGRRGRDGRTAPRAAPRHGRRRRRQGRGPGLPPGHRQCTENRSCPGSCEWYSKG

SEQ ID NO: 11247 - protein, 114 aa, Triticum aestivum
  misc_feature (1)..(114): Ceres Seq. ID no. 13598381
MAGRLLGQLLVMGGAVVGRAVVQAYRQAIVNAQRTGAAQEAVNGIRRASKAMTEQEARQILGISEKTSWEEIVKKYDTMFEKNAKSGSFYLQSKVHRAKECLESIYHDKPDIMN

SEQ ID NO: 11248 - DNA, 1092 bp, Triticum aestivum
  misc_feature (1)..(1092): Ceres Seq. ID no. 13598386
aaaaatagcatctcaccccacccatggacaccgacctcgacctggacgccctcctcgcctccttcgccggcgagtccgccgcagtctccgagctcctcgccccgcctccgctcgatgcggcggaggcggggtcgccggagtcggtgacctcccggtccagccacgccggcgaggaggtgctgtcggagatcgagaggtttctgatgcaggaggacgaggcggcgggggcggagccggtggacgggatcagcgtggatgagttcttcgacgcgctgttcgatggtggggaggaggggggcgagaaggggaacgggagtgaggctgaggctgggggcagcaccgatggggactctaggagggaggaagaaggggtggaggtggtgacgccggagacagaggcggaggtggtgacgcccgaaacggaggtcgatggcgatgatcccatcagcaagaagaagaggaggcaaatgaggaatagggattctgccatgaaatcaagggrgaggaagaagtcatatgtgaaggrcttggagacgaagagcaagtatcttgaggcggagtgtcgccgcctcagctacgcacttcagtgctgcgcagctgagaacatggcactgcgccagaacatgttgaaggataggcctattggtgctcacacagccatgcaggagtctgccgtactttcggaaaccctgccgctggtttccctgctttggctagtgagcatcgtgtgcctattcctaacgcccggtctacccaaccgaagcctggcggctccaaggagagccgaaagaggtctcgcaatggtagccggaaagccaagcagtgatcaaccagagaccttggagcttctaccccatggaaggcgctggaggggcacaagggagaggatcaagctagatgctccgccattgcgtgcagctgccgcttgctagactagtgccagcttattcgcaagtttccagtatgtagtgtagttagcaatgaatgtctaaatatgtgttctcttgctgccaccgtggctttatccatgactatcttctgctctctctgttcgcgtkgttttgatgatcttctaatcagatgctagttttg

SEQ ID NO: 11249 - protein, 302 aa, Triticum aestivum
  misc_feature (1)..(302): Ceres Seq. ID no. 15222334
  misc_feature (160)..(160): Xaa is any aa, unknown or other
  misc_feature (168)..(168): Xaa is any aa, unknown or other
MDTDLDLDALLASFAGESAAVSELLAPPPLDAAEAGSPESVTSRSSHAGEEVLSEIERFLMQEDEAAGAEPVDGISVDEFFDALFDGGEEGGEKGNGSEAEAGGSTDGDSRREEEGVEVVTPETEAEVVTPETEVDGDDPISKKKRRQMRNRDSAMKSRXRKKSYVKXLETKSKYLEAECRRLSYALQCCAAENMALRQNMLKDRPIGAHTAMQESAVLSETLPLVSLLWLVSIVCLFLTPGLPNRSLAAPRRAERGLAMVAGKPSSDQPETLELLPHGRRWRGTRERIKLDAPPLRAAAAC

SEQ ID NO: 11250 - protein, 242 aa, Triticum aestivum
  misc_feature (1)..(242): Ceres Seq. ID no. 15222335
  misc_feature (100)..(100): Xaa is any aa, unknown or other
  misc_feature (108)..(108): Xaa is any aa, unknown or other
MQEDEAAGAEPVDGISVDEFFDALFDGGEEGGEKGNGSEAEAGGSTDGDSRREEEGVEVVTPETEAEVVTPETEVDGDDPISKKKRRQMRNRDSAMKSRXRKKSYVKXLETKSKYLEAECRRLSYALQCCAAENMALRQNMLKDRPIGAHTAMQESAVLSETLPLVSLLWLVSIVCLFLTPGLPNRSLAAPRRAERGLAMVAGKPSSDQPETLELLPHGRRWRGTRERIKLDAPPLRAAAAC

SEQ ID NO: 11251 - protein, 154 aa, Triticum aestivum
  misc_feature (1)..(154): Ceres Seq. ID no. 15222336
  misc_feature (12)..(12): Xaa is any aa, unknown or other
  misc_feature (20)..(20): Xaa is any aa, unknown or other
MRNRDSAMKSRXRKKSYVKXLETKSKYLEAECRRLSYALQCCAAENMALRQNMLKDRPIGAHTAMQESAVLSETLPLVSLLWLVSIVCLFLTPGLPNRSLAAPRRAERGLAMVAGKPSSDQPETLELLPHGRRWRGTRERIKLDAPPLRAAAAC

SEQ ID NO: 11252 - DNA, 1154 bp, Triticum aestivum
  misc_feature (1)..(1154): Ceres Seq. ID no. 13598387
agcctctccgagaggccaagcagaaatggcggcttcctgcacgctcaccgtccccgcccccttcgccgccgcctcctcctcctcctccacttcagcccgtcgctacaggcgattcggggtggttgccatggcgagcgcggggcagaaggtgtacgctcccggcgtggccgtctccgagggcaacggcggcctgcccaagatcagcctcaaatccccgcacgggagtgaggctgagatttatctgtttggagcatgcgtcacgtcttggaaggttcccaatggaaaggatctgctctttgtcagaccagatgctgtgttcaacggccagaaacccatcagcggtggaattccacattgttttccccagtttggccctggccccatgcagcagcatggattcgcaaggaatgtgaattggtctattactgattcagaagtcacagaaggagatccaactgtaactttggaactaaaagacgactcatacagccgttcaatgtgggattttagtttccaagctttatacaaggttgtgctgcactctacaagcctgtcaacgaccctcaaaataataaatacagacgataaacctttctcattcacctcagccctccacacttatttcagtgcttccattgctggtgtttcagtgaaaggtctcaaaggtagcaagactctcaataaggatcctgaccctaaaaatcctctggagggcaaagaagaaagggacgaggtgacctttccaggatttgtggactgtgtttaccttggcgcaccgagtgagcttaccctcgacaatggattgggtgacaaaattgtaatctcaaacacaaactggtcagatgcagtgttgtggaatcctcatttgcagatggaggcatgctacaaagattttgtttgtgttgaaaatgcaaagattgaaacagtacaactgggtccaaaagaatcttgggtggcagagcagaaaattgaacttatctgaagctaatgggttgagaacagtacagtgcggcgagtatgttgtcaaaggacctttttatgtgtctgccaatgtaaacatgtgccattccccaatgtacttcaacttatgccctcacatgagatgtacatcttataactattttatgttttatgagtaaataagtatttcagtc

SEQ ID NO: 11253 - protein, 326 aa, Triticum aestivum
  misc_feature (1)..(326): Ceres Seq. ID no. 13598388
ASPRGQAEMAASCTLTVPAPFAAASSSSSTSARRYRRFGVVAMASAGQKVYAPGVAVSEGNGGLPKISLKSPHGSEAEIYLFGACVTSWKVPNGKDLLFVRPDAVFNGQKPISGGIPHCFPQFGPGPMQQHGFARNVNWSITDSEVTEGDPTVTLELKDDSYSRSMWDFSFQALYKVVLHSTSLSTTLKIINTDDKPFSFTSALHTYFSASIAGVSVKGLKGSKTLNKDPDPKNPLEGKEERDEVTFPGFVDCVYLGAPSELTLDNGLGDKIVISNTNWSDAVLWNPHLQMEACYKDFVCVENAKIETVQLGPKESWVAEQKIELI

SEQ ID NO: 11254 - protein, 318 aa, Triticum aestivum
  misc_feature (1)..(318): Ceres Seq. ID no. 13598389
MAASCTLTVPAPFAAASSSSSTSARRYRRFGVVAMASAGQKVYAPGVAVSEGNGGLPKISLKSPHGSEAEIYLFGACVTSWKVPNGKDLLFVRPDAVFNGQKPISGGIPHCFPQFGPGPMQQHGFARNVNWSITDSEVTEGDPTVTLELKDDSYSRSMWDFSFQALYKVVLHSTSLSTTLKIINTDDKPFSFTSALHTYFSASIAGVSVKGLKGSKTLNKDPDPKNPLEGKEERDEVTFPGFVDCVYLGAPSELTLDNGLGDKIVISNTNWSDAVLWNPHLQMEACYKDFVCVENAKIETVQLGPKESWVAEQKIELI

SEQ ID NO: 11255 - protein, 284 aa, Triticum aestivum
  misc_feature (1)..(284): Ceres Seq. ID no. 13598390
MASAGQKVYAPGVAVSEGNGGLPKISLKSPHGSEAEIYLFGACVTSWKVPNGKDLLFVRPDAVFNGQKPISGGIPHCFPQFGPGPMQQHGFARNVNWSITDSEVTEGDPTVTLELKDDSYSRSMWDFSFQALYKVVLHSTSLSTTLKIINTDDKPFSFTSALHTYFSASIAGVSVKGLKGSKTLNKDPDPKNPLEGKEERDEVTFPGFVDCVYLGAPSELTLDNGLGDKIVISNTNWSDAVLWNPHLQMEACYKDFVCVENAKIETVQLGPKESWVAEQKIELI

SEQ ID NO: 11256 - DNA, 1815 bp, Triticum aestivum
  misc_feature (1)..(1815): Ceres Seq. ID no. 13598401
accaagcaaagcatccaaccatcagatatgcatatgaccagacctgaccaattgtgcgagatgtttctttgttcagataactataacaggaatggttctacctctagggccatacgaaaacccctctaaactggatatcacatccagccaaccactacaacagagctccaattaaacacccacgggctgtgcacacacagacgtcgcatatcagaatttcaaccacttcttctccttctccttcctggcgaccgcgttggtggccgaggcgtgcgtcgcctcggcgtcggcgagcgccttccgcgtctgctccagcttcctcgacgccgcatcatgcaccgccttgtccttgcggttgcgctgcaccatctcctccagccgcccgacctggctccgcagctccttcacctcgtcgtcgtacgcgagcagagaccttctgttgtcttctttcttgggatgcccattggcctgacccgatggcgactctttcctggccttggcggccgaggagccttctgacgtgtcctggctcaccagctggctgttcatgaagctaaagacggacctctccgcctcctcggccttggcggccctggtcagctccgcaaacttccggtcgcgcttcctttgcccgccccggctgcgcttcttgtctttctcacggtgtatgcttcggccgtcctcgcctgtggttgcagcgaccgcgtggtcgagtgattgcttggccggtagtaccttgactgggattggatcgagcatgccttggccggacacgcctagccccatgccctcccggtaacccatttttgccatcattttggaggcgacgcccctggtgtgctgttcccattttgcaaagatcacggtctcagactgaacaccagttaaatttgtggtttccaaacggccaagaccctgatggatggattcatcctcttgatcgccatcttcacttaactcagattcatcctcacttgagcctctttcatcatcttccccgctcacatcagcatattctgggatagaaagggaatcacccggaagcgttgcagtgctcccatcatcttgaaagaccacctgaccacgcttcaactcatcatcccacgactcaagttcagctctcctccaaaggccagaatggtgcccagaagctgccagtatgctggatcctgccaaggactgtcgccatgcagttggagtgaaccgtttcaaggatgaagtaggaatcacaacaccatgggacaagcggcagttattagcaaaccgacaccgttgctgcagaaagaacttgcacatcgacattttttctgatgtgggtgtcagaaatgagacccgtgcattgcctgaaccttcaagtcccagaatgcatccattataccaacgcccatcattgtgcctgaatctacactttgatccgactgaaaattcctgtggctccaatggttgtggctcaacatcatgtggatctaatggctcaatagcagcttcagttgatagcgatgctgactcctgatttggaaagatctcatcgatttgcttcactagcctagaacgcttcaaatgcagaagcccttcctctgcatccttaatcgcagacagaagttccccgtgcacctcgaggaggtccgcgttggaggcgtcggcggcgagggcctcgtcgacggcggcgagggaggaccgctgctcctccaggtgctgttccagctgcagctcgatctccgccgcctcgtcctcctccccctcgcccgccatggctcaccggtccaggcagcggtcggtcgggagaagagagaagggccgacgatttcgatgggt

SEQ ID NO: 11257 - protein, 117 aa, Triticum aestivum
  misc_feature (1)..(117): Ceres Seq. ID no. 13598402
MLDPAKDCRHAVGVNRFKDEVGITTPWDKRQLLANRHRCCRKNLHIDIFSDVGVRNETRALPEPSSPRMHPLYQRPSLCLNLHFDPTENSCGSNGCGSTSCGSNGSIAASVDSDADS

SEQ ID NO: 11258 - protein, 85 aa, Triticum aestivum
  misc_feature (1)..(85): Ceres Seq. ID no. 13598403
MQKPFLCILNRRQKFPVHLEEVRVGGVGGEGLVDGGEGGPLLLQVLFQLQLDLRRLVLLPLARHGSPVQAAVGREKREGPTISMG

SEQ ID NO: 11259 - protein, 83 aa, Triticum aestivum
  misc_feature (1)..(83): Ceres Seq. ID no. 13598404
MKLKTDLSASSALAALVSSANFRSRFLCPPRLRFLSFSRCMLRPSSPVVAATAWSSDCLAGSTLTGIGSSMPWPDTPSPMPSR

SEQ ID NO: 11260 - DNA, 1002 bp, Triticum aestivum
  misc_feature (1)..(1002): Ceres Seq. ID no. 13598416
actttattctacttctccgcccacgcccagcgagcacgagactgacgacgagacccgagagaggccgagacctggaagatccgaatccatcgccgctcccccacgcgacgagatgtcttcacccgcagagtactacaattcacttccaccagtaagcaaggcatatgggacattgtgtttctttaccacagtgctggttcagctccagatactagacccaggccttctttatttatcttatccccatgtgttcaagagttttcagatatggaggctatttacaagcttctttttcctcggcaagttctccatcaactttggtattcgccttctgatgatagcaagatatggtgtgcagttggagaagggttcatttgagaagcggacagcagatttcttgtggatgatgatatttggtgcaatctcgttactggtactgtctgctattccctatctcgagacttatttgttgggtattcctatggttagcatgcttctttatgtctggagccgagagtacccaaactctcagataagcatgtatggcctcgtccaattgaggtcattttatctaccatgggctatgcttggattggatgtgatatttggctctccaatattgcctggccttttgggcattatggttggacatctgtactacttctttacagtgttgtatccgctagctagcggaaagaactacctcaagactcctatgtgggtacacaagattgttgctcgattcaggttgggcgtgcaggcaaactctccagtccggccagctaacacaggccctactgccttcagaggaagaggctatagactcaatcagtagactgctgcgacgcctggcgatgtacaagaggcatgaacaggttaacatggattcgatctaaactctgtggcagctctaggaatctgggttgggatttttcccattgaatctgtaatgtcctcatcgaataactacagatgtgcacttgcattgtacctgcgaagtgc

SEQ ID NO: 11261 - protein, 277 aa, Triticum aestivum
  misc_feature (1)..(277): Ceres Seq. ID no. 15222337
LYSTSPPTPSEHETDDETRERPRPGRSESIAAPPRDEMSSPAEYYNSLPPVSKAYGTLCFFTTVLVQLQILDPGLLYLSYPHVFKSFQIWRLFTSFFFLGKFSINFGIRLLMIARYGVQLEKGSFEKRTADFLWMMIFGAISLLVLSAIPYLETYLLGIPMVSMLLYVWSREYPNSQISMYGLVQLRSFYLPWAMLGLDVIFGSPILPGLLGIMVGHLYYFFTVLYPLASGKNYLKTPMWVHKIVARFRLGVQANSPVRPANTGPTAFRGRGYRLNQ

SEQ ID NO: 11262 - protein, 240 aa, Triticum aestivum
  misc_feature (1)..(240): Ceres Seq. ID no. 15222338
MSSPAEYYNSLPPVSKAYGTLCFFTTVLVQLQILDPGLLYLSYPHVFKSFQIWRLFTSFFFLGKFSINFGIRLLMIARYGVQLEKGSFEKRTADFLWMMIFGAISLLVLSAIPYLETYLLGIPMVSMLLYVWSREYPNSQISMYGLVQLRSFYLPWAMLGLDVIFGSPILPGLLGIMVGHLYYFFTVLYPLASGKNYLKTPMWVHKIVARFRLGVQANSPVRPANTGPTAFRGRGYRLNQ

SEQ ID NO: 11263 - protein, 166 aa, Triticum aestivum
  misc_feature (1)..(166): Ceres Seq. ID no. 15222339
MIARYGVQLEKGSFEKRTADFLWMMIFGAISLLVLSAIPYLETYLLGIPMVSMLLYVWSREYPNSQISMYGLVQLRSFYLPWAMLGLDVIFGSPILPGLLGIMVGHLYYFFTVLYPLASGKNYLKTPMWVHKIVARFRLGVQANSPVRPANTGPTAFRGRGYRLNQ

SEQ ID NO: 11264 - DNA, 736 bp, Triticum aestivum
  misc_feature (1)..(736): Ceres Seq. ID no. 13598417
aaaggacaagagcgcaaaaccccaccacggaccctcgccgtcgctgtctccgtctcccatctcgccggcgctagctagggcaccggtcgccctccccctccgacgatgtcgacgccctctgatccagcggcgtccgcccagcccccctccaccgcggccacctccagcagcggcctcaccttcaagctccaccccctcgtcatcgtgaacgtctccgaccactacacccgcgtcaaggcccaggcctccttccccgccgaggccccgtcgccgggcaaggcgcaggcctcctgctccgccgaaggctccccgccccccgcggagccgccgagagtcttcgggtgcgtgatcggggtgcagcgcggccggacggtcgagatcttcaacagcttcgagctcgtcctcgaccccgtcaccggcacgctcgagcgcgccttcctggagaagaagctcgagctctataagaaggtgttccctgagttctatgtgttgggctggtactctactgggagcgatgtgcaggatactgacatcctaatccacaaggctctgatggacattaatgaaagccctgtttatcttctcttggatcctgcaatcaaccactcccagaaggatctacctgtgacaatttatgagagtgagttgcatgttatcgatgggggcccccagctcatctttgtcaaatcaaattacacaattgagactgtagaagcagagaggatatctgtagatc

SEQ ID NO: 11265 - protein, 210 aa, Triticum aestivum
  misc_feature (1)..(210): Ceres Seq. ID no. 13598418
MSTPSDPAASAQPPSTAATSSSGLTFKLHPLVIVNVSDHYTRVKAQASFPAEAPSPGKAQASCSAEGSPPPAEPPRVFGCVIGVQRGRTVEIFNSFELVLDPVTGTLERAFLEKKLELYKKVFPEFYVLGWYSTGSDVQDTDILIHKALMDINESPVYLLLDPAINHSQKDLPVTIYESELHVIDGGPQLIFVKSNYTIETVEAERISVD

SEQ ID NO: 11266 - DNA, 1381 bp, Triticum aestivum
  misc_feature (1)..(1381): Ceres Seq. ID no. 13598443
agagcaaaatcgcactctcgctttccaacacaactccctcggcagtatcgcctagtgtagcagcgcctccgttccggccagctctgctcgccgagccggccatgatgctgctgctcgcgcgcagcctccgctcccgcgtccggccccccctcgcctccgccgttagcgccgctcccttctcatcggtatcggcggccgcggcggaggcagagcgggcggtgcgggacgggcccaggaacgactggacccgtcccgagatccaggccatctacgactccccgctcctcgacctcctcttccacggggctcaggtccataggaatgtccataaatttagagaagtgcagcaatgcacacttctttcaataaagactggtgggtgcagcgaagattgttcatactgcccacagtcttcaagatacagtactggattgaaggccgagaaattaatgaagaaagatgctgtcctagaagcagcaaaaaaggcaaagcaggctgggagcacccggttttgcatgggagccgcatggagagagacaattggcaggaaaacaaatttcaaccagattcttgaatatgtcaaggacataagaggtatgggcatggaggtctgttgcaccctgggtatgctagagaaacaacaagctgaagaactcaagaaggctggacttacagcttataatcataacctagatacatcaagggaatattaccccaacattatttctacaagatcgtacgatgatagattacagactcttcagcacgtccgtgaagctggaataagcgtctgctcaggtggaattattggtcttggagaggcggaggaagaccgtgtagggctgttgcatacactggccactttgccaacacacccagagagcgttcctatcaatgcattgattgctgtcaaaggcacgcctcttcaggatcagaagcctgtagagatatgggaaatgatccgcatgattgccagcgctcggattgtgatgccaaaggcaatggtgagactttcggcagggcgagtacggttctccatgccagaacaagctctctgctttctcgctggggccaactcgatcttcgccggtgaaaagctcctgacaactgcgaacaatgactttgatgcggaccaggcaatgttcaagatccttggcctgattcccaaggctccaaactttggcgatgaagaggccacggtagcagcacccacggagagatgtgagcaagccgcttcgatgtaaaatgccgctatagattctcaagaccatatccggtgcaaaactggcaccattatctccagctagagctttgtactgtagagatcatgatattttgtagtaacttcagattcatcgaaataaaatagggggttctctgc

SEQ ID NO: 11267 - protein, 413 aa, Triticum aestivum
  misc_feature (1)..(413): Ceres Seq. ID no. 15222344
SKIALSLSNTTPSAVSPSVAAPPFRPALLAEPAMMLLLARSLRSRVRPPLASAVSAAPFSSVSAAAAEAERAVRDGPRNDWTRPEIQAIYDSPLLDLLFHGAQVHRNVHKFREVQQCTLLSIKTGGCSEDCSYCPQSSRYSTGLKAEKLMKKDAVLEAAKKAKQAGSTRFCMGAAWRETIGRKTNFNQILEYVKDIRGMGMEVCCTLGMLEKQQAEELKKAGLTAYNHNLDTSREYYPNIISTRSYDDRLQTLQHVREAGISVCSGGIIGLGEAEEDRVGLLHTLATLPTHPESVPINALIAVKGTPLQDQKPVEIWEMIRMIASARIVMPKAMVRLSAGRVRFSMPEQALCFLAGANSIFAGEKLLTTANNDFDADQAMFKILGLIPKAPNFGDEEATVAAPTERCEQAASM

SEQ ID NO: 11268 - protein, 380 aa, Triticum aestivum
  misc_feature (1)..(380): Ceres Seq. ID no. 15222345
MMLLLARSLRSRVRPPLASAVSAAPFSSVSAAAAEAERAVRDGPRNDWTRPEIQAIYDSPLLDLLFHGAQVHRNVHKFREVQQCTLLSIKTGGCSEDCSYCPQSSRYSTGLKAEKLMKKDAVLEAAKKAKQAGSTRFCMGAAWRETIGRKTNFNQILEYVKDIRGMGMEVCCTLGMLEKQQAEELKKAGLTAYNHNLDTSREYYPNIISTRSYDDRLQTLQHVREAGISVCSGGIIGLGEAEEDRVGLLHTLATLPTHPESVPINALIAVKGTPLQDQKPVEIWEMIRMIASARIVMPKAMVRLSAGRVRFSMPEQALCFLAGANSIFAGEKLLTTANNDFDADQAMFKILGLIPKAPNFGDEEATVAAPTERCEQAASM

SEQ ID NO: 11269 - protein, 379 aa, Triticum aestivum
  misc_feature (1)..(379): Ceres Seq. ID no. 15222346
MLLLARSLRSRVRPPLASAVSAAPFSSVSAAAAEAERAVRDGPRNDWTRPEIQAIYDSPLLDLLFHGAQVHRNVHKFREVQQCTLLSIKTGGCSEDCSYCPQSSRYSTGLKAEKLMKKDAVLEAAKKAKQAGSTRFCMGAAWRETIGRKTNFNQILEYVKDIRGMGMEVCCTLGMLEKQQAEELKKAGLTAYNHNLDTSREYYPNIISTRSYDDRLQTLQHVREAGISVCSGGIIGLGEAEEDRVGLLHTLATLPTHPESVPINALIAVKGTPLQDQKPVEIWEMIRMIASARIVMPKAMVRLSAGRVRFSMPEQALCFLAGANSIFAGEKLLTTANNDFDADQAMFKILGLIPKAPNFGDEEATVAAPTERCEQAASM

SEQ ID NO: 11270 - DNA, 1569 bp, Triticum aestivum
  misc_feature (1)..(1569): Ceres Seq. ID no. 13598460
caggtccgtttacgcgtgtgctgggtttgggcacctctgctccatagcgcgaagagcgaaaggcacggccgccgccacgcaccaccccccctgccgccaacacgctgtaggtccgccgccggcaacattgaaggggcaccacagcacacaaagcagagagtaatggcgtcaacaaccatatcgtcctgcgcatatcaggcagtgcaaggcgcccaccgattgaagatctgtcagtttagtcacggtattgttggcatggacgtcaatgctgatggtttcatccgctccagcaccttcagggttgggggattcgactgggctatcttgtactacccagagggttatggcgacgacagtgagggattcatatcagtttttgttgagttcatgagcaagtatgggaaggcgccagcggtcgtcgacataagactgattgatcaagtcactggaaagcccaaatcgttattgtcaagtgtattctttgaagaggatgaggagccatttcgattcaaatctgacagcttcgcagaggctacctggggtaaggagaggtgtataagaagggaggcgttggaggattcagtgtatgtccgagatgactgccttgtgatcgaatgtgtcatcactgttttaggccaattaagggtgtctgaaactaaaccattgtgtgaaattgatgtgccaccccctaacgcactacagcattttcgcaagatgttagaggatacgtccgcagcagatgtgaccttcgacgttcaacaagaaacatttgctgcccacagggcggtgcttgctgcgcggtcacctgtcttccggaagcagttcagcgaacccatgaaggagaagatgagccgcataaccatcaactctgtggaaccagcggttttcaaggctctcctccatttcatttacaccgattccttgcctgtgatggatgatttcactagagctgaaagcaatgctgttttccagcatctacttgcagctgcggatcaatatggtttagagaggttgaagcttatgtgtgcaggcaccttggttatgaaccttaatgtggagaatgtggctagtgcactatggctagctgataagtacaattgccagaagcttaaagaagcttgtgtcaattttatggccccttccaacagagtcgatgctgtggtggcaagccaagggtaccagcttctgaaaagaggttctccttctccattagcagatgtgtgggagaagaggagccgtgctcgccaaagctttctttagagcagatccaaaagctacaatgctagattatgagtgcttctgtcagcagaatgactggtatgatgaaagcagttccaccaaaatttattgtgcgtatctagatcctgtgctttgaaaaatcatctaagcagtccctggtaactctttagctttttgcgagaaactattaatgtcatgttggtcatgtatgtgtagctgtgaaatgttgatctttagatgcattcctgggtcaatttagcggatatgctccagcaagtatgttccgaatgatgtgtgatctgttgatttgcagcttgttttgatttgggc

SEQ ID NO: 11271 - protein, 419 aa, Triticum aestivum
  misc_feature (1)..(419): Ceres Seq. ID no. 13598461
QVRLRVCWVWAPLLHSAKSERHGRRHAPPPLPPTRCRSAAGNIEGAPQHTKQRVMASTTISSCAYQAVQGAHRLKICQFSHGIVGMDVNADGFIRSSTFRVGGFDWAILYYPEGYGDDSEGFISVFVEFMSKYGKAPAVVDIRLIDQVTGKPKSLLSSVFFEEDEEPFRFKSDSFAEATWGKERCIRREALEDSVYVRDDCLVIECVITVLGQLRVSETKPLCEIDVPPPNALQHFRKMLEDTSAADVTFDVQQETFAAHRAVLAARSPVFRKQFSEPMKEKMSRITINSVEPAVFKALLHFIYTDSLPVMDDFTRAESNAVFQHLLAAADQYGLERLKLMCAGTLVMNLNVENVASALWLADKYNCQKLKEACVNFMAPSNRVDAVVASQGYQLLKRGSPSPLADVWEKRSRARQSFL

SEQ ID NO: 11272 - protein, 365 aa, Triticum aestivum
  misc_feature (1)..(365): Ceres Seq. ID no. 13598462
MASTTISSCAYQAVQGAHRLKICQFSHGIVGMDVNADGFIRSSTFRVGGFDWAILYYPEGYGDDSEGFISVFVEFMSKYGKAPAVVDIRLIDQVTGKPKSLLSSVFFEEDEEPFRFKSDSFAEATWGKERCIRREALEDSVYVRDDCLVIECVITVLGQLRVSETKPLCEIDVPPPNALQHFRKMLEDTSAADVTFDVQQETFAAHRAVLAARSPVFRKQFSEPMKEKMSRITINSVEPAVFKALLHFIYTDSLPVMDDFTRAESNAVFQHLLAAADQYGLERLKLMCAGTLVMNLNVENVASALWLADKYNCQKLKEACVNFMAPSNRVDAVVASQGYQLLKRGSPSPLADVWEKRSRARQSFL

SEQ ID NO: 11273 - protein, 334 aa, Triticum aestivum
  misc_feature (1)..(334): Ceres Seq. ID no. 13598463
MDVNADGFIRSSTFRVGGFDWAILYYPEGYGDDSEGFISVFVEFMSKYGKAPAVVDIRLIDQVTGKPKSLLSSVFFEEDEEPFRFKSDSFAEATWGKERCIRREALEDSVYVRDDCLVIECVITVLGQLRVSETKPLCEIDVPPPNALQHFRKMLEDTSAADVTFDVQQETFAAHRAVLAARSPVFRKQFSEPMKEKMSRITINSVEPAVFKALLHFIYTDSLPVMDDFTRAESNAVFQHLLAAADQYGLERLKLMCAGTLVMNLNVENVASALWLADKYNCQKLKEACVNFMAPSNRVDAVVASQGYQLLKRGSPSPLADVWEKRSRARQSFL

SEQ ID NO: 11274 - DNA, 1162 bp, Triticum aestivum
  misc_feature (1)..(1162): Ceres Seq. ID no. 13598468
aacacaaaaacgaaatgccactgctgcagctgccgaccgcgtgtggcgccgctgcggcgtcggcgtcggcgccgggccccttcttgctctcacggccgccgccctcgcggctgcgcgcgtcgcacgtcctcttcgccttccctcgcctgaggaaatacggccgccggagccgcgagccggtacccaccaccctcgacgacgacgacgaggaggaggcggatgaggacgacgacgacgacatggaggaggcggttgacgaggacatcttcctcaagaaccggcccaagccggccggtttcggcgtggggaagacctacaccaccgacgtcgaagagcagcttctccgggagatgggcatcggcggcgccgggcgcaagagcaaatcggctccgcccaagagcagcaaaaccaacggctcggccacagaaaccgccgcagattgcagtaatgatggcgttcatgttcgtatttggaacctcccgaaaaagaagaacatacataaggacctgaacctagctttcaaagggtttcctggcctggtaactataaacccagcaaactctggaactaagaagacccgtgatcctatttgtaagggttttgcatttgtcaaactggagtcagtggacgctgcgacgaggtttgttgaactgtactctcgtaaagctgtgtcgttcggcaaggttgagaagccaatcaagtgctgtattgttgaagggcacatctctacggatccttcaggtccagcatccagcagtcagccaccagggtcgaacccacaacggttggtagccgtaagatgagcagcacagttgatctgtcatcaatccagttgccactcggtacttcaacagacggagaattccgggaagaaggttcgctacatagatatcggcatgcttcgctcaagattgcgaagacacggaccgtttggtcggaattcccgattttgtagatgatatcaagcattgacattagcaggaaaccctttctccaatgggtttatttagaagataggcagggattagactcaggtatgcagtggttttttttagttaaattcacgtgaatgtattgtgtctaaattaggtccactgtttcggagaaggatttgaatctaaatccgcggcgtcgttataaatccccagattaaagttgctgc

SEQ ID NO: 11275 - protein, 266 aa, Triticum aestivum
  misc_feature (1)..(266): Ceres Seq. ID no. 13598469
HKNEMPLLQLPTACGAAAASASAPGPFLLSRPPPSRLRASHVLFAFPRLRKYGRRSREPVPTTLDDDDEEEADEDDDDDMEEAVDEDIFLKNRPKPAGFGVGKTYTTDVEEQLLREMGIGGAGRKSKSAPPKSSKTNGSATETAADCSNDGVHVRIWNLPKKKNIHKDLNLAFKGFPGLVTINPANSGTKKTRDPICKGFAFVKLESVDAATRFVELYSRKAVSFGKVEKPIKCCIVEGHISTDPSGPASSSQPPGSNPQRLVAVR

SEQ ID NO: 11276 - protein, 262 aa, Triticum aestivum
  misc_feature (1)..(262): Ceres Seq. ID no. 13598470
MPLLQLPTACGAAAASASAPGPFLLSRPPPSRLRASHVLFAFPRLRKYGRRSREPVPTTLDDDDEEEADEDDDDDMEEAVDEDIFLKNRPKPAGFGVGKTYTTDVEEQLLREMGIGGAGRKSKSAPPKSSKTNGSATETAADCSNDGVHVRIWNLPKKKNIHKDLNLAFKGFPGLVTINPANSGTKKTRDPICKGFAFVKLESVDAATRFVELYSRKAVSFGKVEKPIKCCIVEGHISTDPSGPASSSQPPGSNPQRLVAVR

SEQ ID NO: 11277 - protein, 187 aa, Triticum aestivum
  misc_feature (1)..(187): Ceres Seq. ID no. 13598471
MEEAVDEDIFLKNRPKPAGFGVGKTYTTDVEEQLLREMGIGGAGRKSKSAPPKSSKTNGSATETAADCSNDGVHVRIWNLPKKKNIHKDLNLAFKGFPGLVTINPANSGTKKTRDPICKGFAFVKLESVDAATRFVELYSRKAVSFGKVEKPIKCCIVEGHISTDPSGPASSSQPPGSNPQRLVAVR

SEQ ID NO: 11278 - DNA, 1571 bp, Triticum aestivum
  misc_feature (1)..(1571): Ceres Seq. ID no. 13598488
caccctaatcgaaaaaacttttgcttcgccgtggaagggatcgtcgtagctggcttagcttgctgctttgcttccaagtgttgctgctggtggtgctgtggtagtgtggtgtgaggtgtgatggagctgcaggggctggggaggtactggggcgtgggcggcaggaggtgcgggtcgtgccgggggtcgccggcggcggtgcactgccggacgtgcgatgggggcagtggggacggggcgtacctgtgcgcgggctgtggcgaggggcacgcgcgggcggggcacgagagggtgtgggtctgcgaggtgtgcgagctcgcgccggccgcggtcacctgcaaggccgacgccgccgcgctctgcgccgcctgcgacgccgacatccaccacgccaacccgctcgcgcgccgccacgagcgcgtccccgtgcagcccatcgggtcctcgtcacccgaggggcaggagcaggagcaggatgcgttcgtgatgtcgttcggcggctcggtcgacggggagaagcagcagaaccccgtggtgaacctgaacgacgctctggaggccggcgccggcgggaaggagaacgtgaagctggacttcctgttcgcggacatgatggaccctttcttcggctccgagctcccgcgcttcccgcacgccgacagcgttgtccccagcggcggcgcggtggagctggacttcggtggcgtcgccgcccccgtcgtcgtctccaacccgtcctacagctcctacacggcggcgtcgctcggtggaagtggctcgtcgtcggaggtcggcttggtgccggacgcgatctgtggccgaggcggcggcatcatcgagctggacttcgcacagtccaaggccgcgtacctgccctacacccccacaccaagccacagtaccgtctcctcggtggatgttgggtcggtgccggagcggagcgacagcgccgtcgcggcggcgacgccggcgacgggggaggggagggaggcgcgtctgatgcggtaccgcgagaagcgcaagaaccggcggttcgagaagaccatccggtacgcgtcccggaaggcctacgccgagagcaggccgcgcgtcaagggccgcttcgccaagcgcgccgacgacgcggacaccgacgccgtcgcggcggccacgatcaccacgccggggccatgcgtgctcgacttcggcagctacggcgtcgtgcccaccttctgaggcggcgcctgatttcgtgtccatttcctccggcgagcgtgccggctgggtgcctaattaaatccggcaccgccatggccggcacgagcgcgccgacgtgcatgcgtcgtgttccctcttgtataattgcatgtaatgtttttcgagctggctgatcgctggctggcgtgtagtatactgtaatcaacatgcacgcacgcacgcacgcatgttttgctagaactagaataatacagatagttctagttgactagtctactaccctgtaccctttccctgggctagcttgatgccaaattaggctagggcaatgtaacgtgtttgctggaacagcttagttctagttttggatccgc

SEQ ID NO: 11279 - protein, 364 aa, Triticum aestivum
  misc_feature (1)..(364): Ceres Seq. ID no. 13598489
MELQGLGRYWGVGGRRCGSCRGSPAAVHCRTCDGGSGDGAYLCAGCGEGHARAGHERVWVCEVCELAPAAVTCKADAAALCAACDADIHHANPLARRHERVPVQPIGSSSPEGQEQEQDAFVMSFGGSVDGEKQQNPVVNLNDALEAGAGGKENVKLDFLFADMMDPFFGSELPRFPHADSVVPSGGAVELDFGGVAAPVVVSNPSYSSYTAASLGGSGSSSEVGLVPDAICGRGGGIIELDFAQSKAAYLPYTPTPSHSTVSSVDVGSVPERSDSAVAAATPATGEGREARLMRYREKRKNRRFEKTIRYASRKAYAESRPRVKGRFAKRADDADTDAVAAATITTPGPCVLDFGSYGVVPTF

SEQ ID NO: 11280 - protein, 242 aa, Triticum aestivum
  misc_feature (1)..(242): Ceres Seq. ID no. 13598490
MSFGGSVDGEKQQNPVVNLNDALEAGAGGKENVKLDFLFADMMDPFFGSELPRFPHADSVVPSGGAVELDFGGVAAPVVVSNPSYSSYTAASLGGSGSSSEVGLVPDAICGRGGGIIELDFAQSKAAYLPYTPTPSHSTVSSVDVGSVPERSDSAVAAATPATGEGREARLMRYREKRKNRRFEKTIRYASRKAYAESRPRVKGRFAKRADDADTDAVAAATITTPGPCVLDFGSYGVVPTF

SEQ ID NO: 11281 - protein, 201 aa, Triticum aestivum
  misc_feature (1)..(201): Ceres Seq. ID no. 13598491
MMDPFFGSELPRFPHADSVVPSGGAVELDFGGVAAPVVVSNPSYSSYTAASLGGSGSSSEVGLVPDAICGRGGGIIELDFAQSKAAYLPYTPTPSHSTVSSVDVGSVPERSDSAVAAATPATGEGREARLMRYREKRKNRRFEKTIRYASRKAYAESRPRVKGRFAKRADDADTDAVAAATITTPGPCVLDFGSYGVVPTF

SEQ ID NO: 11282 - DNA, 1108 bp, Triticum aestivum
  misc_feature (1)..(1108): Ceres Seq. ID no. 13598492
aatcgaaaaatcgaccccagccacagccagatccgagagcagcagctactagctagtgagcatggcgtccaacaccgcacccgacgacaacgaggtggcgcacgactacggcctcgtccgcgtctacaagagcggccgcgtcgagcgccccctggtggctccgccagcggcggccggcctcgatcccgccaccggcgtcgagtccaaggacgtccagctcggcgactactccgcccgcctctacctgcccccggccgcgtccacggccacagacaagttccctgtcatcgtctacgtccacgggggcggcttcgtggccgagtccgtcgcgtcccccaacggccaccgcttcctcaacagcctcaccgccgcctgccctgccctcgccgtctccgtcgagtaccgcctcgccccggagcacccgctccccgcggcctacgaggactgcgtcgctgccctcacgtgggtgctctcggccgccgacccgtgggtcgccgagcacggcgacctgggccgcgtcttcgtggccggggacagcgccggggccaacgcctgccaccacctcgtcattcagccgggcgccgtgcgcctcaagggcgcggtgctgatccacccctggttctggggttccgaggccgtcggcgaggagacgcgcaaccccgcgtggcgcgccatgggcgggcggctgtgggagttcgcgtgccccggctcgagcggcgtcgacgacgcgcggatgaacccgatggcgcccggcgcgccggggctggaaacgctcgcgtgcgagagggtcatggtgtgcgtcgcggagggcgacttcctcaggtggcgcggccgcgcgtacgcggaggccgtggccgcggcgaggggcggcgaggggcagggcgtcgagctgctggagacggagggggtggggcacgtcttccacctcttcaagcccgactgcgacaaagccaaggagatgttcgacaggatagtcgccttcgttaacgcgccgtgatgctcgtgtggatgtgcccgcttattatcaggccggcagctttgtgtgtcgcgggggcgccacctactgaaataaatggattgcgataaatgatgaaataaatttggttgg

SEQ ID NO: 11283 - protein, 328 aa, Triticum aestivum
  misc_feature (1)..(328): Ceres Seq. ID no. 13598493
NRKIDPSHSQIREQQLLASEHGVQHRTRRQRGGARLRPRPRLQERPRRAPPGGSASGGRPRSRHRRRVQGRPARRLLRPPLPAPGRVHGHRQVPCHRLRPRGRLRGRVRRVPQRPPLPQQPHRRLPCPRRLRRVPPRPGAPAPRGLRGLRRCPHVGALGRRPVGRRARRPGPRLRGRGQRRGQRLPPPRHSAGRRAPQGRGADPPLVLGFRGRRRGDAQPRVARHGRAAVGVRVPRLERRRRRADEPDGARRAGAGNARVREGHGVRRGGRLPQVARPRVRGGRGRGEGRRGAGRRAAGDGGGGARLPPLQARLRQSQGDVRQDSRLR

SEQ ID NO: 11284 - protein, 311 aa, Triticum aestivum
  misc_feature (1)..(311): Ceres Seq. ID no. 13598494
MASNTAPDDNEVAHDYGLVRVYKSGRVERPLVAPPAAAGLDPATGVESKDVQLGDYSARLYLPPAASTATDKFPVIVYVHGGGFVAESVASPNGHRFLNSLTAACPALAVSVEYRLAPEHPLPAAYEDCVAALTWVLSAADPWVAEHGDLGRVFVAGDSAGANACHHLVIQPGAVRLKGAVLIHPWFWGSEAVGEETRNPAWRAMGGRLWEFACPGSSGVDDARMNPMAPGAPGLETLACERVMVCVAEGDFLRWRGRAYAEAVAAARGGEGQGVELLETEGVGHVFHLFKPDCDKAKEMFDRIVAFVNAP

SEQ ID NO: 11285 - DNA, 1291 bp, Triticum aestivum
  misc_feature (1)..(1291): Ceres Seq. ID no. 13598499
gaagcttctacatggaacacctcaacctagggccggcagccgcaggagaagaagacaagccgcggtagacatcgagatcagccggagagaaaaatcgaggggacacgatacgagagcaggaagccatggccttcctcctccccaagctcaccacgcctccctgcagatcgccgccgcccagtcccctcaagccccagctcggcctgcccagccacggaggcggcaggctccacggggccggctcggcgcaggccgcggcgccgacccacctcaacctcccgctcctcctcagcgcctcgcagcaagaagcccccacggccaagtccgccgagaccaggaacagggctgcgagcggcggcggcggcggcggcggggacccgcgaaggtcggatttttacctcaaccttggggcggcggtgcgcgcgctgcgggacgacctgccggccgtgtttctccgggaacccaactacgacatctaccgcgaagacatcacatttgttgatccgctgaacactttccatgggattgacaactacaaaacaatcttctgggctctcagattccacggacgtctactattcagtgaaattgggctcgacgtatcacgcatttggcaactaacagaaacctcgatagttgtccggtgggaactgtggggcacaccgcgtgtcccgtgggaatcatatggctgcttcagtggcacatccaggtacaaagtcgacaggaacgggaaaatttacgagcataaagtcgacaacctggcattggacttcccccggccggctgtcaaagtgagcagcattactaacttagtagttgctgcatacccaccgagccccaatccaactttctgggatgtagttgggacaggcgatggatgctcatggacaaagctttaccgagcggtgctggagacagtagagcgggaaggtgacattcccgcaggcatttgcatggaaggtctactcacttgttcatagatggaatcaacttcaggactagctgcttcggtagtgagttttgctagaaaaaatgtatagaatgtggatacatattaatcacatcactgtcagttctctgtttgtataatgtagctcagcactagaacaactttagatcaaattcatggtagatgactatacctcatcatcattgttgtgtattttaggatattactgccacttgcttacatcttatgagatatgaatacaaagttgtagattttctcatgggttaggaaaactctgttccctaaattatttaggaaaatggaagatcttgaagactcaat

SEQ ID NO: 11286 - protein, 284 aa, Triticum aestivum
  misc_feature (1)..(284): Ceres Seq. ID no. 15222352
MAFLLPKLTTPPCRSPPPSPLKPQLGLPSHGGGRLHGAGSAQAAAPTHLNLPLLLSASQQEAPTAKSAETRNRAASGGGGGGGDPRRSDFYLNLGAAVRALRDDLPAVFLREPNYDIYREDITFVDPLNTFHGIDNYKTIFWALRFHGRLLFSEIGLDVSRIWQLTETSIVVRWELWGTPRVPWESYGCFSGTSRYKVDRNGKIYEHKVDNLALDFPRPAVKVSSITNLVVAAYPPSPNPTFWDVVGTGDGCSWTKLYRAVLETVEREGDIPAGICMEGLLTCS

SEQ ID NO: 11287 - protein, 166 aa, Triticum aestivum
  misc_feature (1)..(166): Ceres Seq. ID no. 15222353
KLLHGTPQPRAGSRRRRRQAAVDIEISRREKSRGHDTRAGSHGLPPPQAHHASLQIAAAQSPQAPARPAQPRRRQAPRGRLGAGRGADPPQPPAPPQRLAARSPHGQVRRDQEQGCERRRRRRRGPAKVGFLPQPWGGGARAAGRPAGRVSPGTQLRHLPRRHHIC

SEQ ID NO: 11288 - DNA, 1400 bp, Triticum aestivum
  misc_feature (1)..(1400): Ceres Seq. ID no. 13598511
gttgccactcgctccagaagctgctcctgcccgggccagccgccgccactgagagtgagctcggctaccccagctcttccactctcgaagctaccctgctctctgtagcttcgctccctttctccttctttcgatggcgtcaggggaagcagagccgctgcagtacacgaccaccgtgctgcgggtgtccatccactgcgagggctgcaagaagaaggtcaagaaggtgctccacagcatcgaaggtgtgtacaaggtgacgatcgacgcgacgcagcacaaggtgacggtcaccggcagcgtggccgccgacgcactcgtcagacggctgctcaagtccggcaagcacgccgcgctctggccgatgccgccggcgccgcccgccacagaggccaagaagcccggggaggccccgtctgccgggaagggcgggaagggcgcggagaaggtggacgccaagcccaaaaaggtggccgacgaggcagagtcggagggctcggagaagccagccaaggacgaaggttcagagaagaaaccagagaaagcagcggcgaagaaacccaaggacgaggccaaggaggagggagaggttcctgagaagaaggagaagggctcgccggagccgccagccaaagaagctgcggtcggcgacgaggccccggaagcgggcggagaggagacggggggcaagaaggggaagaagaagaagaacaagcagcagaaggaargccggcgacggggacgccgctacggagaagccgccgccgccgccgccgcagcagcagcagcagcagcagccaaagacgaagcagccacagccacagcaggcgatgccgcccgtgccagcgccggggacggggccagagcgcgcgcacggccacggcggcccgttcccgtactacgcgccgcaaccggtgatgagctacaacatggcgcagccgagcgcgagcgtgtcgtactacgcgcccacgccggtggcgtccatgcagccaatgccgcctccgccgccgtacggcgggtactcgccttacccgccgatgatgatgccgccgccgccgccggagtacatgtacggcccgccaggcatgcggtcgtccccgccgcaggaaccgtacaacagcatgttcaacgaggagaaccccagttcctgtagcgtcatgtgacgccgccgccgcgccgccgccggcacgggatcgagtctgtagttaaaagtgggggtggggtgggagaggaggcttcgtaatagaagctttgtctaggctgagtggagtacgtaccctcttaattaggtggtcaaagctcttattgaccacactttttttctcttcaaattttcgacttgattagcttgtcatgtagtgacatgagtattttatttcactaatatggttatttttgcc

SEQ ID NO: 11289 - protein, 339 aa, Triticum aestivum
  misc_feature (1)..(339): Ceres Seq. ID no. 15222354
  misc_feature (199)..(199): Xaa is any aa, unknown or other
MASGEAEPLQYTTTVLRVSIHCEGCKKKVKKVLHSIEGVYKVTIDATQHKVTVTGSVAADALVRRLLKSGKHAALWPMPPAPPATEAKKPGEAPSAGKGGKGAEKVDAKPKKVADEAESEGSEKPAKDEGSEKKPEKAAAKKPKDEAKEEGEVPEKKEKGSPEPPAKEAAVGDEAPEAGGEETGGKKGKKKKNKQQKEXRRRGRRYGEAAAAAAAAAAAAAAKDEAATATAGDAARASAGDGARARARPRRPVPVLRAATGDELQHGAAERERVVLRAHAGGVHAANAASAAVRRVLALPADDDAAAAAGVHVRPARHAVVPAAGTVQQHVQRGEPQFL

SEQ ID NO: 11290 - protein, 262 aa, Triticum aestivum
  misc_feature (1)..(262): Ceres Seq. ID no. 15222355
  misc_feature (122)..(122): Xaa is any aa, unknown or other
MPPAPPATEAKKPGEAPSAGKGGKGAEKVDAKPKKVADEAESEGSEKPAKDEGSEKKPEKAAAKKPKDEAKEEGEVPEKKEKGSPEPPAKEAAVGDEAPEAGGEETGGKKGKKKKNKQQKEXRRRGRRYGEAAAAAAAAAAAAAAKDEAATATAGDAARASAGDGARARARPRRPVPVLRAATGDELQHGAAERERVVLRAHAGGVHAANAASAAVRRVLALPADDDAAAAAGVHVRPARHAVVPAAGTVQQHVQRGEPQFL

SEQ ID NO: 11291 - DNA, 1412 bp, Triticum aestivum
  misc_feature (1)..(1412): Ceres Seq. ID no. 13598513
atgtacctaaccttgcaacaaagttcagttgaaaaccaccactagtctgtgcccatggcgaccttctccaacgaggagcttctgcaggcgcacaccgagctctgggacctcaccttcggctacctcaaatccatggcgctcgagtgcgccatcaagctcggcctcccaaacgccatccaccgccgcggcggcgacgccacgctgccggacttgctcgacgcagtttccgtcccggagagcaagaaggcgcacctgcctcgcctcatgaggtttctcggcgcgttcggcatcttcaccgccgacgcacccgctgcaggggagcgcgcgaatggggaggaggcgggcgccgtctacggcctcacgccggtgtcccgcctcctcgtggacgactccggcgccaacgggtcgtgcgggagcctctcgccgttcgtgctctcccagacgaccaagtaccacgtgaaggcggccatgcacctgccggagtggttcacgagcgacgacggcgcggccgcggcggagatgccgttccggacggcgcacggcgcagacctgtggggcgtcatggaccgcgaccccaagatgaaccaggtcttcaacgccggcatggggtccgacacccagctcgcgatggacttcgtcatcggcaactacggcgacgtgttcgacggggtgacctcgctggtcgacgtcggcggcgggacaggctccgcggcgagggccatagccaaggccttcccgcacgtcaagtgctccgtgctcgacctccccaacgtggtcaattccgtcccgcccgacggcgtggtcgagtacatctcaggcgacatgatgagctccattccggcgaccgatgcggtcttcctcaagtacatcatgcatgactggaacgacgaggactgcgtgaagatcctgaagcagtgcaagaaggcgatccccgaatcaggcgggaaagtgataatcgtggacatagtggtgggatctcctttgaaagccatgctggaagcccaggtctcgtttgatctgctgatgatggtgatcacgggaggcaaggagcgcgacgagcatgagtggcgcaagattttcatggacgcggggttcagccatcacaagacaagacctgttttgggatttatggccatcaccgagctgtatgcttagccctgcatgcctgattgcagcagatatctgctgtaacgtgtgtgtaagcgttggtcctgcgatgttcgtcgtggttgtgcagccccaaagtgtctttctgcagcaacgatttgttcctacgcctttaaaggctcccatatttgtatgatctgttgctagggtatatgcacttaataaactagatgacaccccgcccgttgctgcgggaattgtagcaattaaaaaattggaaattggacaaatgaaaagataattcg

SEQ ID NO: 11292 - protein, 366 aa, Triticum aestivum
  misc_feature (1)..(366): Ceres Seq. ID no. 13598514
MATFSNEELLQAHTELWDLTFGYLKSMALECAIKLGLPNAIHRRGGDATLPDLLDAVSVPESKKAHLPRLMRFLGAFGIFTADAPAAGERANGEEAGAVYGLTPVSRLLVDDSGANGSCGSLSPFVLSQTTKYHVKAAMHLPEWFTSDDGAAAAEMPFRTAHGADLWGVMDRDPKMNQVFNAGMGSDTQLAMDFVIGNYGDVFDGVTSLVDVGGGTGSAARAIAKAFPHVKCSVLDLPNVVNSVPPDGVVEYISGDMMSSIPATDAVFLKYIMHDWNDEDCVKILKQCKKAIPESGGKVIIVDIVVGSPLKAMLEAQVSFDLLMMVITGGKERDEHEWRKIFMDAGFSHHKTRPVLGFMAITELYA

SEQ ID NO: 11293 - protein, 340 aa, Triticum aestivum
  misc_feature (1)..(340): Ceres Seq. ID no. 13598515
MALECAIKLGLPNAIHRRGGDATLPDLLDAVSVPESKKAHLPRLMRFLGAFGIFTADAPAAGERANGEEAGAVYGLTPVSRLLVDDSGANGSCGSLSPFVLSQTTKYHVKAAMHLPEWFTSDDGAAAAEMPFRTAHGADLWGVMDRDPKMNQVFNAGMGSDTQLAMDFVIGNYGDVFDGVTSLVDVGGGTGSAARAIAKAFPHVKCSVLDLPNVVNSVPPDGVVEYISGDMMSSIPATDAVFLKYIMHDWNDEDCVKILKQCKKAIPESGGKVIIVDIVVGSPLKAMLEAQVSFDLLMMVITGGKERDEHEWRKIFMDAGFSHHKTRPVLGFMAITELYA

SEQ ID NO: 11294 - protein, 296 aa, Triticum aestivum
  misc_feature (1)..(296): Ceres Seq. ID no. 13598516
MRFLGAFGIFTADAPAAGERANGEEAGAVYGLTPVSRLLVDDSGANGSCGSLSPFVLSQTTKYHVKAAMHLPEWFTSDDGAAAAEMPFRTAHGADLWGVMDRDPKMNQVFNAGMGSDTQLAMDFVIGNYGDVFDGVTSLVDVGGGTGSAARAIAKAFPHVKCSVLDLPNVVNSVPPDGVVEYISGDMMSSIPATDAVFLKYIMHDWNDEDCVKILKQCKKAIPESGGKVIIVDIVVGSPLKAMLEAQVSFDLLMMVITGGKERDEHEWRKIFMDAGFSHHKTRPVLGFMAITELYA

SEQ ID NO: 11295 - DNA, 1379 bp, Triticum aestivum
  misc_feature (1)..(1379): Ceres Seq. ID no. 13598527
actcacctcacctcatctcacctgccatcgatatcgctcccttatcccgaaccccaaatccccctctccggtccggcgcctccgtctctctcgccgaacaccatgggctccgacttcaaggccatccctctgatcgatatcagcccgctcgtcgagaagatcgacgaccctgccatggccggcgacgagggtctcctcgacgtcgtccggatgctggacgacgcttgcagggaggccgggttcttctatgtgaaaggccatgggatttcggagtcgctaatgacggaagtcagggatgtcacacgcaagttctttcagctccctcgcgaggaaaaactgaagatcaaaatgacacctcagagtggatatagaggatatcagagagtgggagaaaatgttaccaagggtaaacctgatatgcatgaagcaattgattgctacacgcctatcgaaccaggcagatatggagatcttgctaaaccaatggaaggatctaatttgtggccagattatccatcaaattttgatgcgctgctggaaaactatataagccttctacgagatctttcaaggaagatcatgagaggcatagccttggcactgggtgcgccgttggattctttcgaaggcggagtggcgggagatgctttctgggttctcaggttaattggctatccagtctcagatgacatcccacaagaggaacgcactgatattggatgtggagctcatacagattatggtcttctgacattggtgaatcaggatgatgatatatgtgctcttgaggtcagaaaccagtccggtgagtggatatacgccaagccggtccctggaaccttcgtttgcaacatcggcgacatgctgaaggtttggtcgaatgggatataccagcccacgctccacagagtcgtcaataactcccctcgctaccgtgtatctgtcgccttcttctacgagtcgaacttcgacgctgcggtggaacctgtagagttctgccgggagaaaacgggcggcgttgccaagtatgagaaggtggtgtatggggagcacctagtgcagaaagtcctcaccaacttcgtcatgtaacagtttgggggaggggaggtgaaagcctgaaagggaacaaatttctgtagctgtactgaaaatgatccatcaataaaacccttcgacaaatcagcctcctttctggtcggacaaagtaactgtcccggtgtatcgtgaccaggcaaggcagcacatgaggatttcctctcatctggctttctcgctttgcttgcgttctgcggatcgaaccctcacaactggttcacaatccgttgtaatttcgtgacgacaatgtaaatgcaaccaccaatatgtcttgttgttacttc

SEQ ID NO: 11296 - protein, 362 aa, Triticum aestivum
  misc_feature (1)..(362): Ceres Seq. ID no. 15222359
THLTSSHLPSISLPYPEPQIPLSGPAPPSLSPNTMGSDFKAIPLIDISPLVEKIDDPAMAGDEGLLDVVRMLDDACREAGFFYVKGHGISESLMTEVRDVTRKFFQLPREEKLKIKMTPQSGYRGYQRVGENVTKGKPDMHEAIDCYTPIEPGRYGDLAKPMEGSNLWPDYPSNFDALLENYISLLRDLSRKIMRGIALALGAPLDSFEGGVAGDAFWVLRLIGYPVSDDIPQEERTDIGCGAHTDYGLLTLVNQDDDICALEVRNQSGEWIYAKPVPGTFVCNIGDMLKVWSNGIYQPTLHRVVNNSPRYRVSVAFFYESNFDAAVEPVEFCREKTGGVAKYEKVVYGEHLVQKVLTNFVM

SEQ ID NO: 11297 - protein, 328 aa, Triticum aestivum
  misc_feature (1)..(328): Ceres Seq. ID no. 15222360
MGSDFKAIPLIDISPLVEKIDDPAMAGDEGLLDVVRMLDDACREAGFFYVKGHGISESLMTEVRDVTRKFFQLPREEKLKIKMTPQSGYRGYQRVGENVTKGKPDMHEAIDCYTPIEPGRYGDLAKPMEGSNLWPDYPSNFDALLENYISLLRDLSRKIMRGIALALGAPLDSFEGGVAGDAFWVLRLIGYPVSDDIPQEERTDIGCGAHTDYGLLTLVNQDDDICALEVRNQSGEWIYAKPVPGTFVCNIGDMLKVWSNGIYQPTLHRVVNNSPRYRVSVAFFYESNFDAAVEPVEFCREKTGGVAKYEKVVYGEHLVQKVLTNFVM

SEQ ID NO: 11298 - protein, 304 aa, Triticum aestivum
  misc_feature (1)..(304): Ceres Seq. ID no. 15222361
MAGDEGLLDVVRMLDDACREAGFFYVKGHGISESLMTEVRDVTRKFFQLPREEKLKIKMTPQSGYRGYQRVGENVTKGKPDMHEAIDCYTPIEPGRYGDLAKPMEGSNLWPDYPSNFDALLENYISLLRDLSRKIMRGIALALGAPLDSFEGGVAGDAFWVLRLIGYPVSDDIPQEERTDIGCGAHTDYGLLTLVNQDDDICALEVRNQSGEWIYAKPVPGTFVCNIGDMLKVWSNGIYQPTLHRVVNNSPRYRVSVAFFYESNFDAAVEPVEFCREKTGGVAKYEKVVYGEHLVQKVLTNFVM

SEQ ID NO: 11299 - DNA, 1483 bp, Triticum aestivum
  misc_feature (1)..(1483): Ceres Seq. ID no. 13598532
atttcaaaacttccagatccacctagggtttgcgcctcttccctccgcccccatcacacaagccgcatcgagggggacgacgccgacctcggaccgtcggaagcaccatggagaagtacgagaagttggagaaggtcggggagggcacctacggcaaggtgtacaaggcgcaggacaaggcgacgggccaggtggtggcgctcaagaagacccgcctggagatggacgacgaagggatcccgcccaccgcgctccgtgagatctccctcctccgcctcctctccagctccctctacgtcgtccgcctccttgccgtcgagcaggccaccaagggcgggggcgccggcggtggagggaagcccgtcctctacctcgtcttcgagttccttgacactgacctcaagaagttcgtcgacgcctaccgccgtggacccgcccctaagccgctcccaacgcaggtcgtcaagagctttttgtatcagttatgcaaaggaattgcacactgccatggccatggtgttcttcatcgggatttaaagccccaaaatctcttggttgacaaggagaagatgatactgaaaattgcagatcttgggttaagtagagcttttactgttcctatgaaaagctacacccatgagatcgtgacgctttggtatagagctcctgaagtactgcttggagcaacacattactcaaccagtgttgatatttggtccatcggatgcatctttgccgagatggtcagaaaacaggctcttttccctggtgactctgagttacagcaactgcttcacattttcaagctgttgggaactcctaccgaggaggattggcctggagtaactgctctgagggactggcacgagtttcctcagtggaaagcacaaagattgacgcgtgcagtccctacactggaaccagaaggaattgacctgttatcgaaaatgctccagttcgacccggcgaacaggatctcagccaaagctgcgctagagcatccctatttcaacagcctcgacaagtctcagttctagctgttctagctaccgtgtgatttttctcaacttggtgtgtgtgctctgctcgccaacttgttccgccatgagatcgatgctgaaaacgcacgaaaccatgtttcatctacctacaatcagcaacggcgtgttgctggtagttggctcccatgagcgcccgtctcctagacctccagcacttgatttgccttgagaattattgactgaagatacttgttcagatcatgtaggagttttatttgctctgtacggaattgtttgatgagatgggtttgcggacaatagacatttgtgtagcataataaggtagtactggtatttgttaagaaaatgttgcttcatgacaagtgaagttatttggagctgcgaagtggtgagaggcgtgtgtccgtggaaggagctaatagttagcatttgatgtggacattgaaaaaaaaaaaaaaaaa

SEQ ID NO: 11300 - protein, 309 aa, Triticum aestivum
  misc_feature (1)..(309): Ceres Seq. ID no. 13598533
MEKYEKLEKVGEGTYGKVYKAQDKATGQVVALKKTRLEMDDEGIPPTALREISLLRLLSSSLYVVRLLAVEQATKGGGAGGGGKPVLYLVFEFLDTDLKKFVDAYRRGPAPKPLPTQVVKSFLYQLCKGIAHCHGHGVLHRDLKPQNLLVDKEKMILKIADLGLSRAFTVPMKSYTHEIVTLWYRAPEVLLGATHYSTSVDIWSIGCIFAEMVRKQALFPGDSELQQLLHIFKLLGTPTEEDWPGVTALRDWHEFPQWKAQRLTRAVPTLEPEGIDLLSKMLQFDPANRISAKAALEHPYFNSLDKSQF

SEQ ID NO: 11301 - protein, 271 aa, Triticum aestivum
  misc_feature (1)..(271): Ceres Seq. ID no. 13598534
MDDEGIPPTALREISLLRLLSSSLYVVRLLAVEQATKGGGAGGGGKPVLYLVFEFLDTDLKKFVDAYRRGPAPKPLPTQVVKSFLYQLCKGIAHCHGHGVLHRDLKPQNLLVDKEKMILKIADLGLSRAFTVPMKSYTHEIVTLWYRAPEVLLGATHYSTSVDIWSIGCIFAEMVRKQALFPGDSELQQLLHIFKLLGTPTEEDWPGVTALRDWHEFPQWKAQRLTRAVPTLEPEGIDLLSKMLQFDPANRISAKAALEHPYFNSLDKSQF

SEQ ID NO: 11302 - protein, 178 aa, Triticum aestivum
  misc_feature (1)..(178): Ceres Seq. ID no. 13598535
ISKLPDPPRVCASSLRPHHTSRIEGDDADLGPSEAPWRSTRSWRRSGRAPTARCTRRRTRRRARWWRSRRPAWRWTTKGSRPPRSVRSPSSASSPAPSTSSASLPSSRPPRAGAPAVEGSPSSTSSSSSLTLTSRSSSTPTAVDPPLSRSQRRSSRAFCISYAKELHTAMAMVFFIGI

SEQ ID NO: 11303 - DNA, 1382 bp, Triticum aestivum
  misc_feature (1)..(1382): Ceres Seq. ID no. 13598538
aaaccaagatcccagaagcatcccacacaagccaagccaagacgacggctcccagcagcaggcagcagctgatggagatcaccaaggtcgacctccgcggactagagtccggcggggcgggctgggtggaagcccgggacgcggtgacggcgtccatggtggcgcacggcttcgtcgtggtggcgcacgacgcgctcggcccggagctccggcaggcgctgttcggccgcgccatgccggagatcttcgcgctcccgccggaggccaagcagcggaacgtctccacggtgggccccttccgcggctacatctccaacgtccccggcaccaactgggagagcgtgcgcctctccgaagtcaccgacgccggccgcgtccgcgacttcgccgacctcctctggccgcagggaaaccccgccttctggtaactaagcagtgcccaccatttttctctaagtccgtcgcgcagccgtcgtgcatccattttggcatggtatgcccatggtgactgtgtccgtgcacgtgcagcgacacgattatgtccgcggtcaagaacgtgtgggagctacagcgcacggtggagacgatgatcctgrgagggcctcggcgtcggggaggagcacatcggcgcgcatctggacacgctcgcccacgtcgtccggctgtcgcgctacgggcccccgccggacgcggagacgagcatgtccctgcaggcgcaccgcgacgacagcatcatgacggcgatcgtgcagcacggcgtggagggcctcgaggtgcaggctcaggacgggatctggctcgcggtgccgcctgagccggacttgttcaccttcgtcgccggcgagctgttcacggtcgtgactaacgggagggtgccgggttgtttccaccgcgtgaggacgccgagcaaccgcgagcgcctgtcggcgctgtttggctgcccggggaaggacggcgtccttctgagcgccatggacgagctcgtcgacgatgagcaccctctgctgtaccgtctctgcaccaacgacggctacacgacgttccggcactcggatgaagggcgcaaggccagtgatccattgaaggccttctgtggggtggagaaggacgatcaccgttcgtaagtcaagctcacttcacctcaccattctgaagtcgtcaagctctgttatccacaccattctgaagccgcaaatgctagattacccatgtaataatcgcgacaccattctgaagtcctactgctactgaactttactcaaatcgctgtcagttatctcttcgattaagcactttgtggatgataattactagtacgacattaccggctgatcttattcagtttactgttgtgcacacgttgacttgctgatggcaagcgc

SEQ ID NO: 11304 - protein, 168 aa, Triticum aestivum
  misc_feature (1)..(168): Ceres Seq. ID no. 15222362
NQDPRSIPHKPSQDDGSQQQAAADGDHQGRPPRTRVRRGGLGGSPGRGDGVHGGARLRRGGARRARPGAPAGAVRPRHAGDLRAPAGGQAAERLHGGPLPRLHLQRPRHQLGERAPLRSHRRRPRPRLRRPPLAAGKPRLLVTKQCPPFFSKSVAQPSCIHFGMVCPW

SEQ ID NO: 11305 - protein, 141 aa, Triticum aestivum
  misc_feature (1)..(141): Ceres Seq. ID no. 15222363
TKIPEASHTSQAKTTAPSSRQQLMEITKVDLRGLESGGAGWVEARDAVTASMVAHGFVVVAHDALGPELRQALFGRAMPEIFALPPEAKQRNVSTVGPFRGYISNVPGTNWESVRLSEVTDAGRVRDFADLLWPQGNPAFW

SEQ ID NO: 11306 - protein, 140 aa, Triticum aestivum
  misc_feature (1)..(140): Ceres Seq. ID no. 15222364
MSLQAHRDDSIMTAIVQHGVEGLEVQAQDGIWLAVPPEPDLFTFVAGELFTVVTNGRVPGCFHRVRTPSNRERLSALFGCPGKDGVLLSAMDELVDDEHPLLYRLCTNDGYTTFRHSDEGRKASDPLKAFCGVEKDDHRS

SEQ ID NO: 11307 - protein, 118 aa, Triticum aestivum
  misc_feature (1)..(118): Ceres Seq. ID no. 15222365
MEITKVDLRGLESGGAGWVEARDAVTASMVAHGFVVVAHDALGPELRQALFGRAMPEIFALPPEAKQRNVSTVGPFRGYISNVPGTNWESVRLSEVTDAGRVRDFADLLWPQGNPAFW

SEQ ID NO: 11308 - DNA, 1152 bp, Triticum aestivum
  misc_feature (1)..(1152): Ceres Seq. ID no. 13598539
aacgccaatatttttggtggggcgcctgcttgctgccatccaaacagcccccaaatccgcgcgcctctcacatcccagaccgctgctgagcctggccgacatggccaccgcctcgatcgccgtccgctcggccttcggtgtcgccctggccgccttgatcgcggcgcgtgccgtccggcggcgctcgctggatgcctggggcggagctgccgggttcgccgtgatggcgctccaccttgcctgcggctataggtacggtgcgctgctgctggctttcttcttcacctcgtccaaggtgaccaagatcggcgaggaccgcaagcggcgcgttgaggaggatttcaaggagggtggccagcgcaactggatccaagttcttgcgaatagtgcaatagcaactgtattggttatcctattggcgataatgactgggggtcaggatcaatgcttggactcaaatggttcaaaggttataactggtataataggtgctattattggccattattgctgctgcaatggagacacttggtcatctgaaatcggtgtgcttagtgatgaacaaccaaggcttgtcactaccctgaaggtggtcagtaaacggggacctactgtcaccaagatttctggaatgactatcctggataatgatgctgttaatgcagtgtctgtgctgctaacatcggtgattacagcttatgcctgcattgtcttcttctagaagcaagggtttggttggctttttcacctgtccctaatgcgcagtgatgtgtaatgtgaatattccaaggacagaatgactgatgtttacttcaagcaagatgaacaatgaagtgttggaaatctttggctatttgctgggcacaattgacgagcctgatgacgtttgctccaggcagctagtttggtaatagtgcaagttgggaaattctaaattgttttaagcaagaaaaggccgtggtataatgcggaattgacaattatggtttttcgaaacctatctgtgtcgaagaaagtatctagttcgctgttttagaccacaatccaacaattatccccttgccaaattatagttaagttttgtctgaagtcaaattttgtgaactctgaccaattttatattatagagaaaaatatgaacatttacaatat

SEQ ID NO: 11309 - protein, 239 aa, Triticum aestivum
  misc_feature (1)..(239): Ceres Seq. ID no. 13598540
TPIFLVGRLLAAIQTAPKSARLSHPRPLLSLADMATASIAVRSAFGVALAALIAARAVRRRSLDAWGGAAGFAVMALHLACGYRYGALLLAFFFTSSKVTKIGEDRKRRVEEDFKEGGQRNWIQVLANSAIATVLVILLAIMTGGQDQCLDSNGSKVITGIIGAIIGHYCCCNGDTWSSEIGVLSDEQPRLVTTLKVVSKRGPTVTKISGMTILDNDAVNAVSVLLTSVITAYACIVFF

SEQ ID NO: 11310 - protein, 206 aa, Triticum aestivum
  misc_feature (1)..(206): Ceres Seq. ID no. 13598541
MATASIAVRSAFGVALAALIAARAVRRRSLDAWGGAAGFAVMALHLACGYRYGALLLAFFFTSSKVTKIGEDRKRRVEEDFKEGGQRNWIQVLANSAIATVLVILLAIMTGGQDQCLDSNGSKVITGIIGAIIGHYCCCNGDTWSSEIGVLSDEQPRLVTTLKVVSKRGPTVTKISGMTILDNDAVNAVSVLLTSVITAYACIVFF

SEQ ID NO: 11311 - protein, 165 aa, Triticum aestivum
  misc_feature (1)..(165): Ceres Seq. ID no. 13598542
MALHLACGYRYGALLLAFFFTSSKVTKIGEDRKRRVEEDFKEGGQRNWIQVLANSAIATVLVILLAIMTGGQDQCLDSNGSKVITGIIGAIIGHYCCCNGDTWSSEIGVLSDEQPRLVTTLKVVSKRGPTVTKISGMTILDNDAVNAVSVLLTSVITAYACIVFF

SEQ ID NO: 11312 - DNA, 1469 bp, Triticum aestivum
  misc_feature (1)..(1469): Ceres Seq. ID no. 13598543
aaaacccccgaaacccccaaacgcacggcaggccatggagctgtcgatgagcggcggcgcgctgcggaccttctcccgcttcgtcacctgcctcgcccgcatcggctccgacctcgtcttccaggcctaccccgacaagctggagctgcacacgctcaacagctcgcggtcggcgttcgcgtccgtctccctcacgcgcgacttcttcgaccacttccacctccccgccgccgccgcgccgtcgtccacgccgctccagtgcagcgtcctcctcaagtccgtcctcgctgtgctccgcacgcccacctccgcggtcgaccgcctcaacgcttctctcccaaacccccaagcgtccaagctcgagttcgtcatccactgcatcagcgggcgtaagaagacgcaccggatctcgtgcagcgccgagtccgacgtgcagactctggcgctcgaccgcaacggcttccccagccgcctcgccatacggccacgggatctcacgcgcctgctttccaatttccagtcctcgctgcaggagctcacctttattgccacccagcctgctgcacggttgcctggcgtcgatgatgccactggggggaaggcagtcgagctcctaagctacatcgacccgaccaaagatgactacgacagtaggctgcacacacaactgtggatcgatccagcagaggagttcttggagtatgagcatgctggtgatcccgtagatgtcacatttggggtgaaagaattgaaggcatttttaacattttgtgaaggatgtgaggttgatattctcctattctatcagaaggctggcgaacctgtcctgttggctccaagatttggaatcgatgatggttcaagttctaatttcgatgtaactctagttctagccactatgcttgtatcacaactaaatgatggcagtgtgcctcagcagccacctacgtcagcacatcatgcagaagaaccaagggctgccgctgctgcaccatcaccagttcccgaaaatgtctcaaaccatacaagaatatggtcagagctttcaggtgttactcccaaaagctttgaagctaacgcagaaaatcgtgcccagatggagagaaatggaagagctaacgtgctgaatgacacatcagtgcttcccaataccaatgctccctgcaagctaccagtgacagataacgcaaactatatagagcagcctgtgcaaatggatcacttggaagagcctcctgaagttgtggttgataaccctcgttcgcagcatcacccaagcaactgggtaggtgccgacgaagacgatgatgatgaagaagatgaggagctttttgtccaaacaacacctcactacatggactaaggaccgatgctgattctgaatattgcaggtgtacagatcatgtgagtgtttctactgggcatcacggagttcctggcaggggtagggtggcgagaacaattattgt

SEQ ID NO: 11313 - protein, 453 aa, Triticum aestivum
  misc_feature (1)..(453): Ceres Seq. ID no. 13598544
KPPKPPNARQAMELSMSGGALRTFSRFVTCLARIGSDLVFQAYPDKLELHTLNSSRSAFASVSLTRDFFDHFHLPAAAAPSSTPLQCSVLLKSVLAVLRTPTSAVDRLNASLPNPQASKLEFVIHCISGRKKTHRISCSAESDVQTLALDRNGFPSRLAIRPRDLTRLLSNFQSSLQELTFIATQPAARLPGVDDATGGKAVELLSYIDPTKDDYDSRLHTQLWIDPAEEFLEYEHAGDPVDVTFGVKELKAFLTFCEGCEVDILLFYQKAGEPVLLAPRFGIDDGSSSNFDVTLVLATMLVSQLNDGSVPQQPPTSAHHAEEPRAAAAAPSPVPENVSNHTRIWSELSGVTPKSFEANAENRAQMERNGRANVLNDTSVLPNTNAPCKLPVTDNANYIEQPVQMDHLEEPPEVVVDNPRSQHHPSNWVGADEDDDDEEDEELFVQTTPHYMD

SEQ ID NO: 11314 - protein, 442 aa, Triticum aestivum
  misc_feature (1)..(442): Ceres Seq. ID no. 13598545
MELSMSGGALRTFSRFVTCLARIGSDLVFQAYPDKLELHTLNSSRSAFASVSLTRDFFDHFHLPAAAAPSSTPLQCSVLLKSVLAVLRTPTSAVDRLNASLPNPQASKLEFVIHCISGRKKTHRISCSAESDVQTLALDRNGFPSRLAIRPRDLTRLLSNFQSSLQELTFIATQPAARLPGVDDATGGKAVELLSYIDPTKDDYDSRLHTQLWIDPAEEFLEYEHAGDPVDVTFGVKELKAFLTFCEGCEVDILLFYQKAGEPVLLAPRFGIDDGSSSNFDVTLVLATMLVSQLNDGSVPQQPPTSAHHAEEPRAAAAAPSPVPENVSNHTRIWSELSGVTPKSFEANAENRAQMERNGRANVLNDTSVLPNTNAPCKLPVTDNANYIEQPVQMDHLEEPPEVVVDNPRSQHHPSNWVGADEDDDDEEDEELFVQTTPHYMD

SEQ ID NO: 11315 - protein, 438 aa, Triticum aestivum
  misc_feature (1)..(438): Ceres Seq. ID no. 13598546
MSGGALRTFSRFVTCLARIGSDLVFQAYPDKLELHTLNSSRSAFASVSLTRDFFDHFHLPAAAAPSSTPLQCSVLLKSVLAVLRTPTSAVDRLNASLPNPQASKLEFVIHCISGRKKTHRISCSAESDVQTLALDRNGFPSRLAIRPRDLTRLLSNFQSSLQELTFIATQPAARLPGVDDATGGKAVELLSYIDPTKDDYDSRLHTQLWIDPAEEFLEYEHAGDPVDVTFGVKELKAFLTFCEGCEVDILLFYQKAGEPVLLAPRFGIDDGSSSNFDVTLVLATMLVSQLNDGSVPQQPPTSAHHAEEPRAAAAAPSPVPENVSNHTRIWSELSGVTPKSFEANAENRAQMERNGRANVLNDTSVLPNTNAPCKLPVTDNANYIEQPVQMDHLEEPPEVVVDNPRSQHHPSNWVGADEDDDDEEDEELFVQTTPHYMD

SEQ ID NO: 11316 - DNA, 1513 bp, Triticum aestivum
  misc_feature (1)..(1513): Ceres Seq. ID no. 13598548
atagagcgagtcttcttcttcctccctgctctgaccgagatccgctccagtggactcgattagggttagggtttgcctctccgatcgtgaggcgggttgctacatctgccttgttcgtcggattccggtagaatcaaccactcgatcgacttaatttcccccgccggtgctgcctctgttttgccgaagatgctgggcggactttacggcgacctcccgccgcccacctcggcggccggcgacgacgacaagccgaccgcctccgtctggtcgagcgccaccaagatggcaccgcccaccctccgcaagccctccgcgaccttcgcccctcccacgtccctcctcaggaaccagcacccccgccccgccgccgctcccaaggccagcgccgtccaccagcagcagcagcagcagccgccgcaccccctccccctcgcctccgccgtcaccaccaccaccgcagcgtccttccaccccgccctcgtcgccgtgcagtccaccgtgctcgaggagtacgaccccgccaggcccaacgactacgaggactaccgcaaggagaagctcaagcgggccaaggacgccgagatgaagaaggagctcgaccggaggcgccgcgaggaccaggagcgggagagggagcgcgagctgagggaggccgaggcacgcctgcgggaggagcagtccagggcctcctccctcaacatatccggcgaggaagcctggaagaggagggccgccatgagcggcgctggcggcggcgctactcctcagagggtctcgtctccgccccacggcgatgccagtggcttctccatcccaggctcctcctcctctggcttgggcgtgggcgccggcggccagatgaccgctgcccagagaatgatggccaagatggggtggaaggaaggccaggggctcggcaagcaagagcagggaatcacagcgcctctggttgctaggaagactgatcggagggcaggggttattgtcgatgagagcagttccaggaggcccagatcagccaactttgaaggccagcccaccagagtagtgctgctgcgtaacatgattggtccgggcgaggttgacgacgagctggaagacgagattgcctcggagtgctccaagtttggggctgtgttgcgcgtgctgatattcgagatcacccaggcaaacttccccgcagacgaagcagtgaggatcttcgtgctgttcgagaggacagaagattcaaccaaggcgttggtcgaactggaagggcgctactttggcggacgcatagtgcacgccaccttcttcgatgagggaaggttcgagaggaacgagctcgctccgatgcccggcgaagtaccagggttcgactaaaccttcataagcagactaaagaactggacgttggtgtctcgggtgtaatttaatctagagcatgaacgctgtttttctcttttcttttgaggacagtttacggcatgttgacctattgccgttttattattgcagagttgttattgtt

SEQ ID NO: 11317 - protein, 391 aa, Triticum aestivum
  misc_feature (1)..(391): Ceres Seq. ID no. 13598549
MLGGLYGDLPPPTSAAGDDDKPTASVWSSATKMAPPTLRKPSATFAPPTSLLRNQHPRPAAAPKASAVHQQQQQQPPHPLPLASAVTTTTAASFHPALVAVQSTVLEEYDPARPNDYEDYRKEKLKRAKDAEMKKELDRRRREDQERERERELREAEARLREEQSRASSLNISGEEAWKRRAAMSGAGGGATPQRVSSPPHGDASGFSIPGSSSSGLGVGAGGQMTAAQRMMAKMGWKEGQGLGKQEQGITAPLVARKTDRRAGVIVDESSSRRPRSANFEGQPTRVVLLRNMIGPGEVDDELEDEIASECSKFGAVLRVLIFEITQANFPADEAVRIFVLFERTEDSTKALVELEGRYFGGRIVHATFFDEGRFERNELAPMPGEVPGFD

SEQ ID NO: 11318 - protein, 359 aa, Triticum aestivum
  misc_feature (1)..(359): Ceres Seq. ID no. 13598550
MAPPTLRKPSATFAPPTSLLRNQHPRPAAAPKASAVHQQQQQQPPHPLPLASAVTTTTAASFHPALVAVQSTVLEEYDPARPNDYEDYRKEKLKRAKDAEMKKELDRRRREDQERERERELREAEARLREEQSRASSLNISGEEAWKRRAAMSGAGGGATPQRVSSPPHGDASGFSIPGSSSSGLGVGAGGQMTAAQRMMAKMGWKEGQGLGKQEQGITAPLVARKTDRRAGVIVDESSSRRPRSANFEGQPTRVVLLRNMIGPGEVDDELEDEIASECSKFGAVLRVLIFEITQANFPADEAVRIFVLFERTEDSTKALVELEGRYFGGRIVHATFFDEGRFERNELAPMPGEVPGFD

SEQ ID NO: 11319 - protein, 259 aa, Triticum aestivum
  misc_feature (1)..(259): Ceres Seq. ID no. 13598551
MKKELDRRRREDQERERERELREAEARLREEQSRASSLNISGEEAWKRRAAMSGAGGGATPQRVSSPPHGDASGFSIPGSSSSGLGVGAGGQMTAAQRMMAKMGWKEGQGLGKQEQGITAPLVARKTDRRAGVIVDESSSRRPRSANFEGQPTRVVLLRNMIGPGEVDDELEDEIASECSKFGAVLRVLIFEITQANFPADEAVRIFVLFERTEDSTKALVELEGRYFGGRIVHATFFDEGRFERNELAPMPGEVPGFD

SEQ ID NO: 11320 - DNA, 863 bp, Triticum aestivum
  misc_feature (1)..(863): Ceres Seq. ID no. 13598552
aatttcgttaggacaaacaaacaaaggggaaggggtagctatccttcgaactcgccgcgtgtaggaatcttgtacagagttcgattcccggcggtgcagttcccatggacgagcagttcatcctccgcgtgtccccatccgtggcggagcagatcgagcgtcttatgaacgaatctgccgctggctcatcctccaaccccgacgacgcctcccttgacctctccttctcagaggatggaaggagtggcacatttatgattggtaaccagaggtttcctgcatctctcttggatctcccaaccgttgtggagtcatataagacatatgatgattcctttttagttaaaactgctgatattggtcagatggtaatggtaagagaagaagatgatcctgctccagaaggagctgaatacgagcatggacttactcctccaatgagggatgcacgcaggcgacgttttcgcagagagcctgacttgaatgcagagcttgttcaccgagttgagaaggatcttataagtattatgcaaggagtgcctgtcaaccagaatgctagtgtagctggaggcggtgaaggtggtgatcgcaagaaagctgcaccagctcctgcacccaagcctgacgttcaagagcctgctgcaaatggtgaagaagctgaggctgatcggagcgactctgacgagtcagacagctgaagtggaccagaatagacagtgctgcttcagtaggccgagcaaacccagtgtatgtattaggtaattcagatcaaagaacgcacacttttaccaagcaagcacgcttgttgtcttctactgtaccaattatcatctcatcagtaataataagagtgactttccatt

SEQ ID NO: 11321 - protein, 197 aa, Triticum aestivum
  misc_feature (1)..(197): Ceres Seq. ID no. 15222369
MDEQFILRVSPSVAEQIERLMNESAAGSSSNPDDASLDLSFSEDGRSGTFMIGNQRFPASLLDLPTVVESYKTYDDSFLVKTADIGQMVMVREEDDPAPEGAEYEHGLTPPMRDARRRRFRREPDLNAELVHRVEKDLISIMQGVPVNQNASVAGGGEGGDRKKAAPAPAPKPDVQEPAANGEEAEADRSDSDESDS

SEQ ID NO: 11322 - protein, 177 aa, Triticum aestivum
  misc_feature (1)..(177): Ceres Seq. ID no. 15222370
MNESAAGSSSNPDDASLDLSFSEDGRSGTFMIGNQRFPASLLDLPTVVESYKTYDDSFLVKTADIGQMVMVREEDDPAPEGAEYEHGLTPPMRDARRRRFRREPDLNAELVHRVEKDLISIMQGVPVNQNASVAGGGEGGDRKKAAPAPAPKPDVQEPAANGEEAEADRSDSDESDS

SEQ ID NO: 11323 - protein, 147 aa, Triticum aestivum
  misc_feature (1)..(147): Ceres Seq. ID no. 15222371
MIGNQRFPASLLDLPTVVESYKTYDDSFLVKTADIGQMVMVREEDDPAPEGAEYEHGLTPPMRDARRRRFRREPDLNAELVHRVEKDLISIMQGVPVNQNASVAGGGEGGDRKKAAPAPAPKPDVQEPAANGEEAEADRSDSDESDS

SEQ ID NO: 11324 - DNA, 1166 bp, Triticum aestivum
  misc_feature (1)..(1166): Ceres Seq. ID no. 13598553
aagttttcaaccaagtgagcggtaggtgggcggcggctgcacgcggccgctctgttgttccttccttcctcatcctcttttccccgccttgtcgcccgtccacgccgtggagagaccgcagaccagagccgttcgcaccgccattgcagcttgcccaggcaggtgctcgtgcgctcctgctcgcccgcggcccctgcccctccccctccccagcgatggcgacggcgttctcaaccaagcagcccctgcgggtcgctacgcctgcaagcaaatggcgtccaaggttgccactggttaaagtgcaatattcgtccaacaaacaagctagtgcttccatttcattgacgtccagtgcggaggatgcggagagaaacgagcccatagtcaaaatgtgcggcatcacatctgccagagatgcagaattcgccgcaaaggctggagctaaacttatcgggatgattctttggcctaagtccaaacgatctgtccaactgtcagaagcgaaggaaatatccagagtagcaaagtcatatggggctgaagctgttggtgtgtttgtcgatgatgatgaagagaccatcttaagagtgtctgattcatgcgaccttgaacttatccagcttcatggagatagttctcgagcactagttcctgctcttgccaagaacaaccggattgtatatgttcttaatgctgacgcggatggaaaacttatcaattctcctcctagtgaagaatatgacgttgactggtttttggtggacagtgcagagggtggaagtggcaaaggattcaactgggagaatttccgaatgccatcggtgaaaagcaagaacggctggctgttagcaggaggacttcatgcagacaatgtttgtcaagccgctaccgctctaaaaccaaatggtgtggatgttagcagcggaatatgctctcctgacggtataagcaaggacccgaagagaatatcatccttcatgagaagcgtacagtccttaagttcccgatgaggtctctatttagactccccaggcttattatagcttcttgcttcagtttgtgaagacatttgcaaataagctgtcctgaatgatagcagtaaataaacaactttgaagctgagttccaactatgcttgtctaatggtagcattagaccagtttctg

SEQ ID NO: 11325 - protein, 335 aa, Triticum aestivum
  misc_feature (1)..(335): Ceres Seq. ID no. 13598554
VFNQVSGRWAAAARGRSVVPSFLILFSPPCRPSTPWRDRRPEPFAPPLQLAQAGARALLLARGPCPSPSPAMATAFSTKQPLRVATPASKWRPRLPLVKVQYSSNKQASASISLTSSAEDAERNEPIVKMCGITSARDAEFAAKAGAKLIGMILWPKSKRSVQLSEAKEISRVAKSYGAEAVGVFVDDDEETILRVSDSCDLELIQLHGDSSRALVPALAKNNRIVYVLNADADGKLINSPPSEEYDVDWFLVDSAEGGSGKGFNWENFRMPSVKSKNGWLLAGGLHADNVCQAATALKPNGVDVSSGICSPDGISKDPKRISSFMRSVQSLSSR

SEQ ID NO: 11326 - protein, 264 aa, Triticum aestivum
  misc_feature (1)..(264): Ceres Seq. ID no. 13598555
MATAFSTKQPLRVATPASKWRPRLPLVKVQYSSNKQASASISLTSSAEDAERNEPIVKMCGITSARDAEFAAKAGAKLIGMILWPKSKRSVQLSEAKEISRVAKSYGAEAVGVFVDDDEETILRVSDSCDLELIQLHGDSSRALVPALAKNNRIVYVLNADADGKLINSPPSEEYDVDWFLVDSAEGGSGKGFNWENFRMPSVKSKNGWLLAGGLHADNVCQAATALKPNGVDVSSGICSPDGISKDPKRISSFMRSVQSLSSR

SEQ ID NO: 11327 - protein, 206 aa, Triticum aestivum
  misc_feature (1)..(206): Ceres Seq. ID no. 13598556
MCGITSARDAEFAAKAGAKLIGMILWPKSKRSVQLSEAKEISRVAKSYGAEAVGVFVDDDEETILRVSDSCDLELIQLHGDSSRALVPALAKNNRIVYVLNADADGKLINSPPSEEYDVDWFLVDSAEGGSGKGFNWENFRMPSVKSKNGWLLAGGLHADNVCQAATALKPNGVDVSSGICSPDGISKDPKRISSFMRSVQSLSSR

SEQ ID NO: 11328 - DNA, 958 bp, Triticum aestivum
  misc_feature (1)..(958): Ceres Seq. ID no. 13598557
aaccatttcacctcacaacacttctcatcttggagctcagcagcacagcatccaagcttcttcttcggcaagatgaacaggaagccaggcgactgggactgcaggtcgtgccagcacctcaacttcagtcgccgggacctatgccagcgctgcggcgagccacgcagtgccgctgaccgtggcagcgtcggtggcgctcttggtggtgactacgccaactttggcggccgtggcgggggtggttcctcctttggtaccggctttggtgccggctctgacgtccgcccgggcgactggtactgcacctgcggggcgcacaacttcgccagccgctccagctgcttcaagtgtgctgccttcaaggaggaagctgccgtcaatggtggcgctggtggctttgatggtgacatgtcacgctcaaggggcttcggcttcggcgctgtcggtggcatgggtggcggcatgggagccggcgcggccggtggtcgtgccagccgccctggctggaagtctggcgactggatttgcaccaggtctggatgcaacgagcacaacttcgccagcaggcaggagtgcttcaggtgcaacgcaccgagggactccggtagcgccacgccatacgaaaatttcttgcactgaggtgtaggaaggccgcggcgatgagcagaagcagcaaagggtgtccgtgtcccgcagtcgacatcatcatcataagaagaagaagaagaaagtagaatgcaaagaaatcctcctcgagtgcatgcttactagttttgtctcttcccgttttagatttggttgtcatttcccatttgggaccgtccgtctgtccgtctgatcgatgatgactagctatgtttaccgttttattatttccgttcctttcatcaagtttgcagttcgagttatgtaacccaaagacgtatgctttgcttcagaagtattattgactagtagt

SEQ ID NO: 11329 - protein, 212 aa, Triticum aestivum
  misc_feature (1)..(212): Ceres Seq. ID no. 13598558
NHFTSQHFSSWSSAAQHPSFFFGKMNRKPGDWDCRSCQHLNFSRRDLCQRCGEPRSAADRGSVGGALGGDYANFGGRGGGGSSFGTGFGAGSDVRPGDWYCTCGAHNFASRSSCFKCAAFKEEAAVNGGAGGFDGDMSRSRGFGFGAVGGMGGGMGAGAAGGRASRPGWKSGDWICTRSGCNEHNFASRQECFRCNAPRDSGSATPYENFLH

SEQ ID NO: 11330 - protein, 188 aa, Triticum aestivum
  misc_feature (1)..(188): Ceres Seq. ID no. 13598559
MNRKPGDWDCRSCQHLNFSRRDLCQRCGEPRSAADRGSVGGALGGDYANFGGRGGGGSSFGTGFGAGSDVRPGDWYCTCGAHNFASRSSCFKCAAFKEEAAVNGGAGGFDGDMSRSRGFGFGAVGGMGGGMGAGAAGGRASRPGWKSGDWICTRSGCNEHNFASRQECFRCNAPRDSGSATPYENFLH

SEQ ID NO: 11331 - DNA, 1355 bp, Triticum aestivum
  misc_feature (1)..(1355): Ceres Seq. ID no. 13598574
aacaagaaaggtctcctccccaccaccccaccaagaaaccgaagtcgtcacactcgcagtcactggctcactccactccgcgcaccctcactctcgctcgctccgtccgtctccgtccggcgagcccgcccgcgcctgcggcgatggccgtgagcaacaacatcacggcgtgcctcaacttcctggccctaatctgcaccatcccggtggtggccacgggcctctggttcgcctccaagcagggcgccgagtgcgcgcggctggcgcgctggcccgtggccatcctcggcgtgctcctcctcctcgtcgccctcgcgggcttcgtcggcgcctactggaaccgccagggcctgctggccgcctacctcttcgccatggcggccctcatcacgctcctcctggcgctcctcgtcttcgccttcgccgtcacccacggctccggggcgtacgacgtgcccggccgcgcctaccgcgagtaccgcctcgagggcttctctggctggctgcgcgggtatgttgctggggatccccggcggtgggaggggatcagggcgtgcctcgtcgcgtcggacacctgcaagaagctcaccatggagaccgccttcttcatcgcccccgagcagttctaccagtccgacctctccccgctccagtccggctgctgcaagccgccgacggcgtgcgggtacgcgtacgtgtccccgacggtgtgggccagcccggcaaacccggcggcggacgcggactgcggcgcctggagcaacgacccgcggcagctctgctactggtgcgaatcctgcaaggccggcatgctgggcaccctgcgcgaccagtggcgccgggccaacgtggcgctcgtcgccgccaccgtcgcgctcctcgtcgtntacgtcatcggctgcagcgccttcaagaacgcccagaccgaggacctcttccgccgctacaagtggagcaacaacacctgacgctgatagatgtaccaatcccgaacgaaggaaggagttctctggtggcagtaccagtgctagtatgctgacattgtgcactagtatgattatcggacgaaccagtgtagattatgtagtgggaagtactaaggttgaaagaagtttcactctcgtgagttgtatttggccactagacctggtgcattcgctagtgccatggtttatggctagagctatagtgtggtgagatttctcggttttcaggtcggttaatggagacattttcacccaaaattctcgatgaaatgcagtgtacgttcagatttgtgattgtttcaaggcaaaaataaataaatcatgattgtgataaaaaaaaaaaaaaaaaagcttatcgataccgtcgac

SEQ ID NO: 11332 - protein, 345 aa, Triticum aestivum
  misc_feature (1)..(345): Ceres Seq. ID no. 15222375
  misc_feature (296)..(296): Xaa is any aa, unknown or other
TRKVSSPPPHQETEVVTLAVTGSLHSAHPHSRSLRPSPSGEPARACGDGREQQHHGVPQLPGPNLHHPGGGHGPLVRLQAGRRVRAAGALARGHPRRAPPPRRPRGLRRRLLEPPGPAGRLPLRHGGPHHAPPGAPRLRLRRHPRLRGVRRARPRLPRVPPRGLLWLAARVCCWGSPAVGGDQGVPRRVGHLQEAHHGDRLLHRPRAVLPVRPLPAPVRLLQAADGVRVRVRVPDGVGQPGKPGGGRGLRRLEQRPAAALLLVRILQGRHAGHPARPVAPGQRGARRRHRRAPRRXRHRLQRLQERPDRGPLPPLQVEQQHLTLIDVPIPNEGRSSLVAVPVLVC

SEQ ID NO: 11333 - protein, 321 aa, Triticum aestivum
  misc_feature (1)..(321): Ceres Seq. ID no. 15222376
  misc_feature (295)..(295): Xaa is any aa, unknown or other
QERSPPHHPTKKPKSSHSQSLAHSTPRTLTLARSVRLRPASPPAPAAMAVSNNITACLNFLALICTIPVVATGLWFASKQGAECARLARWPVAILGVLLLLVALAGFVGAYWNRQGLLAAYLFAMAALITLLLALLVFAFAVTHGSGAYDVPGRAYREYRLEGFSGWLRGYVAGDPRRWEGIRACLVASDTCKKLTMETAFFIAPEQFYQSDLSPLQSGCCKPPTACGYAYVSPTVWASPANPAADADCGAWSNDPRQLCYWCESCKAGMLGTLRDQWRRANVALVAATVALLVXYVIGCSAFKNAQTEDLFRRYKWSNNT

SEQ ID NO: 11334 - protein, 274 aa, Triticum aestivum
  misc_feature (1)..(274): Ceres Seq. ID no. 15222377
  misc_feature (248)..(248): Xaa is any aa, unknown or other
MAVSNNITACLNFLALICTIPVVATGLWFASKQGAECARLARWPVAILGVLLLLVALAGFVGAYWNRQGLLAAYLFAMAALITLLLALLVFAFAVTHGSGAYDVPGRAYREYRLEGFSGWLRGYVAGDPRRWEGIRACLVASDTCKKLTMETAFFIAPEQFYQSDLSPLQSGCCKPPTACGYAYVSPTVWASPANPAADADCGAWSNDPRQLCYWCESCKAGMLGTLRDQWRRANVALVAATVALLVXYVIGCSAFKNAQTEDLFRRYKWSNNT

SEQ ID NO: 11335 - DNA, 825 bp, Triticum aestivum
  misc_feature (1)..(825): Ceres Seq. ID no. 13598575
atagggtttcgcctgaaccgccgtcgccgtcgccgtggtcgtcgccgccatgtacaacggcatcgggctgcagacggcgcgcgggtccggcacgaatgggcacgtccagaccaacaagttcttcatccagccccggaccggcggcccgccgcccaaggcgccgctccacagccacgacgacggcgccgccgggacgcggaagccgaacaaggagatcctggagcacgaccggaggcggcaggtggagctgcggctggtcgagctgagggacaccctcgaggagcagggctacacggaaggcgagatcgaggagcgcgtcgaggaggcgcgcaagaaagccgagctggaggctgcccgcggcggcgccgggggtgcagcaccgcgtccgggcgaagggttcatgggtatgcagagccaccatgtcgcagcacgcaaggagaagaagctcgaggcgatgagggctgctcttgggctagatgctgaggttggacagaagaggaacgctcaagtagacagtggggagcttgtacctgggaaggatgggttctgaagaagaatgttggacatcgatgttcagagcaacaggagggctttcaattatggtaacaggcgtagagtaaggggaaaaaagggaatggcaacagcacaagttctaagaagggtaagcatgggtatgattcagaagatgattctgagactgaccatgatgatgagaaaagggggaaagaaacacctgaggaaatccttcttagatagagatgttgattctgagattgttcataagaaggcaactatgtaagctatgtatatctaacctgtgctttt

SEQ ID NO: 11336 - protein, 166 aa, Triticum aestivum
  misc_feature (1)..(166): Ceres Seq. ID no. 13598576
MYNGIGLQTARGSGTNGHVQTNKFFIQPRTGGPPPKAPLHSHDDGAAGTRKPNKEILEHDRRRQVELRLVELRDTLEEQGYTEGEIEERVEEARKKAELEAARGGAGGAAPRPGEGFMGMQSHHVAARKEKKLEAMRAALGLDAEVGQKRNAQVDSGELVPGKDGF

SEQ ID NO: 11337 - protein, 160 aa, Triticum aestivum
  misc_feature (1)..(160): Ceres Seq. ID no. 13598577
IGFRLNRRRRRRGRRRHVQRHRAADGARVRHEWARPDQQVLHPAPDRRPAAQGAAPQPRRRRRRDAEAEQGDPGARPEAAGGAAAGRAEGHPRGAGLHGRRDRGARRGGAQESRAGGCPRRRRGCSTASGRRVHGYAEPPCRSTQGEEARGDEGCSWARC

SEQ ID NO: 11338 - protein, 87 aa, Triticum aestivum
  misc_feature (1)..(87): Ceres Seq. ID no. 13598578
RVSPEPPSPSPWSSPPCTTASGCRRRAGPARMGTSRPTSSSSSPGPAARRPRRRSTATTTAPPGRGSRTRRSWSTTGGGRWSCGWSS

SEQ ID NO: 11339 - DNA, 1436 bp, Triticum aestivum
  misc_feature (1)..(1436): Ceres Seq. ID no. 13598582
tccgccgcgcacgcacacaacctccatctcttccccccttccgcagaaccctagctgtccacaagtctcttcgtcggcgatggcggcggcggagaacgccggggacgtggcggcgggggagagccgcaagctgttcgtgggtggcatcccgtcctcagcgcaggagacggagctgcggggtcactttgcccgcttcggtgcggtgcgctcaatcgtcgtgatgcgggacaaggagtcgggccacggccgcgggttcgggttcgtcgagttcgaggacgaagaagcggccgccaaggcgctcggcgatggggagaggcccaagcacttcatctgcggccgactggtggacgttaagagggcgcgtgctagacctcctcggaacttgggcgagcaacctgtgcatcaacatcagcatcagcatcagctggaacagggtccagttcagggtcaccaagacgctggggacagtaccgaggccagtagtgacagtatgagctatgcttcaaagaaggtattcattggtggtttgcgtgacaacatcacagaggaggagttcagagcttactttgaggcgtttggcactgtaacagatgttgttgtgatatacgacagcctgacaagcaggtcaaggggttttggttttgtcacctttgattccgaggaagctgtgagaaaggtgatggggcaaagctttcatgacttgaaagggacaagggtggaagcaaagatcgctatccccaaggatgctcagtattaccgtaatggccgaggtcgtggctcaagaacctttggcggaaggggtcctgttggctttgatggttcaacataccaaccgtacaataaccgacatggtttctacaatggctatatgccacaacctgttcccacacatccctactatcatggcctctattttggtatgggaggcaatccctatgcaaatgcatatccaaaccatgcagtcatggcaaatgttccaaacatggtggcaaggcgtccagtatatagcccatatcccccaatgtatcctggctatggttttgcatacagaagtggttatgcgggtgctgcaccttctgttcagtatggcgttaatggtggcagggattacatgaatgaccaagactctatggatgtacaagaacttgacagcactgctaccattgctacaaagtttgaatacatgaagctaggttcacaatgacgttctgggcaattatttctacactgatgacagcggaagtcgcaactgtgaagacatgagctgagattctttggttgacaagtacatcattggaaattatcaacttacccccattccttgtttcaactgcatgtagactgaaaacattcaagttccaactggctgttgagctcacatgccttgtaccaatgcttaaatccttttaatgtatcagaatcagaacatttgatgc

SEQ ID NO: 11340 - protein, 400 aa, Triticum aestivum
  misc_feature (1)..(400): Ceres Seq. ID no. 13598583
PPRTHTTSISSPLPQNPSCPQVSSSAMAAAENAGDVAAGESRKLFVGGIPSSAQETELRGHFARFGAVRSIVVMRDKESGHGRGFGFVEFEDEEAAAKALGDGERPKHFICGRLVDVKRARARPPRNLGEQPVHQHQHQHQLEQGPVQGHQDAGDSTEASSDSMSYASKKVFIGGLRDNITEEEFRAYFEAFGTVTDVVVIYDSLTSRSRGFGFVTFDSEEAVRKVMGQSFHDLKGTRVEAKIAIPKDAQYYRNGRGRGSRTFGGRGPVGFDGSTYQPYNNRHGFYNGYMPQPVPTHPYYHGLYFGMGGNPYANAYPNHAVMANVPNMVARRPVYSPYPPMYPGYGFAYRSGYAGAAPSVQYGVNGGRDYMNDQDSMDVQELDSTATIATKFEYMKLGSQ

SEQ ID NO: 11341 - protein, 374 aa, Triticum aestivum
  misc_feature (1)..(374): Ceres Seq. ID no. 13598584
MAAAENAGDVAAGESRKLFVGGIPSSAQETELRGHFARFGAVRSIVVMRDKESGHGRGFGFVEFEDEEAAAKALGDGERPKHFICGRLVDVKRARARPPRNLGEQPVHQHQHQHQLEQGPVQGHQDAGDSTEASSDSMSYASKKVFIGGLRDNITEEEFRAYFEAFGTVTDVVVIYDSLTSRSRGFGFVTFDSEEAVRKVMGQSFHDLKGTRVEAKIAIPKDAQYYRNGRGRGSRTFGGRGPVGFDGSTYQPYNNRHGFYNGYMPQPVPTHPYYHGLYFGMGGNPYANAYPNHAVMANVPNMVARRPVYSPYPPMYPGYGFAYRSGYAGAAPSVQYGVNGGRDYMNDQDSMDVQELDSTATIATKFEYMKLGSQ

SEQ ID NO: 11342 - protein, 327 aa, Triticum aestivum
  misc_feature (1)..(327): Ceres Seq. ID no. 13598585
MRDKESGHGRGFGFVEFEDEEAAAKALGDGERPKHFICGRLVDVKRARARPPRNLGEQPVHQHQHQHQLEQGPVQGHQDAGDSTEASSDSMSYASKKVFIGGLRDNITEEEFRAYFEAFGTVTDVVVIYDSLTSRSRGFGFVTFDSEEAVRKVMGQSFHDLKGTRVEAKIAIPKDAQYYRNGRGRGSRTFGGRGPVGFDGSTYQPYNNRHGFYNGYMPQPVPTHPYYHGLYFGMGGNPYANAYPNHAVMANVPNMVARRPVYSPYPPMYPGYGFAYRSGYAGAAPSVQYGVNGGRDYMNDQDSMDVQELDSTATIATKFEYMKLGSQ

SEQ ID NO: 11343 - DNA, 1251 bp, Triticum aestivum
  misc_feature (1)..(1251): Ceres Seq. ID no. 13598593
aatcgaaaatccaaactcacggctagccacccactagccacacttactgaacacaggtcagctaagccagcttagctcaggaaggtagcaatggccagggctttccccatgggagtggtggccgccgcggccgtgctggtggtgctgtgtgccgtcatttcttctgccgccgcgcagcctcgtccccctctgccaaagaactcccacatgatcaccccggggcggttcgggaagagggcccaggtgctctcctgcgacgacaccaaggacgggaacagcccctgcagcgccacctgcgacaagcgctgccccaacgagtgcgtcgtcatgtgcccaggctgcaagacatactgcttgtgtgacttttaccccggggtgtcatgtggcgacccgcgtttcacaggagccgacggcaacaacttctacttccacggcaagaaggaccaggacttctgtgtcatctccgatgctgacctccatatcaacgctcacttcatcggcaagcgcaacccagctatgagccgtgacttcacctggatccaagcgctgggcatccgcttcgctgatcaccgcatgtacatgggcgcccagaagaccaccaagtggaagaacgacgtcgaccgccttgagttgaacctcgatggagaatcattcaacatcgctacagacatcggggcaaagtggcagtccactgttgtgcctggcctgaccgtcacgaggaccaccgtgaccaatggcgtgagggtccagcttaagggtgtgtttgacatcatggctaaggtggtgcccatcacgcaggaggactcccgcgtccacaactacggtgtaactgacgatgacagcctcgcgcatctggacatcgggttcaagttctatgacctcaccgacgacgttcatggtgtccttggccagacctaccgccctgactacgtcaacaagctcagcgtgagcgctagcatgcctgtgatgggtggtgtagccagctacatctcctctgacattttctccaccgactgcaaggtcgctaggttcggacttagcaccggcatctccatggtcaccaccaccgcaaactaagcaattcctcaagacaacgtcacactgatgtaaccggcctatactgatgatgaacataggcctagaaataaaataatatgtgagaaatgtaatgtgtaacattgttttgtgccagrraaaaaaaaaaaaaaaaaaaaaatgtttaaacacaataaagttggaacgggagggggg

SEQ ID NO: 11344 - protein, 328 aa, Triticum aestivum
  misc_feature (1)..(328): Ceres Seq. ID no. 15222378
MARAFPMGVVAAAAVLVVLCAVISSAAAQPRPPLPKNSHMITPGRFGKRAQVLSCDDTKDGNSPCSATCDKRCPNECVVMCPGCKTYCLCDFYPGVSCGDPRFTGADGNNFYFHGKKDQDFCVISDADLHINAHFIGKRNPAMSRDFTWIQALGIRFADHRMYMGAQKTTKWKNDVDRLELNLDGESFNIATDIGAKWQSTVVPGLTVTRTTVTNGVRVQLKGVFDIMAKVVPITQEDSRVHNYGVTDDDSLAHLDIGFKFYDLTDDVHGVLGQTYRPDYVNKLSVSASMPVMGGVASYISSDIFSTDCKVARFGLSTGISMVTTTAN

SEQ ID NO: 11345 - protein, 322 aa, Triticum aestivum
  misc_feature (1)..(322): Ceres Seq. ID no. 15222379
MGVVAAAAVLVVLCAVISSAAAQPRPPLPKNSHMITPGRFGKRAQVLSCDDTKDGNSPCSATCDKRCPNECVVMCPGCKTYCLCDFYPGVSCGDPRFTGADGNNFYFHGKKDQDFCVISDADLHINAHFIGKRNPAMSRDFTWIQALGIRFADHRMYMGAQKTTKWKNDVDRLELNLDGESFNIATDIGAKWQSTVVPGLTVTRTTVTNGVRVQLKGVFDIMAKVVPITQEDSRVHNYGVTDDDSLAHLDIGFKFYDLTDDVHGVLGQTYRPDYVNKLSVSASMPVMGGVASYISSDIFSTDCKVARFGLSTGISMVTTTAN

SEQ ID NO: 11346 - protein, 289 aa, Triticum aestivum
  misc_feature (1)..(289): Ceres Seq. ID no. 15222380
MITPGRFGKRAQVLSCDDTKDGNSPCSATCDKRCPNECVVMCPGCKTYCLCDFYPGVSCGDPRFTGADGNNFYFHGKKDQDFCVISDADLHINAHFIGKRNPAMSRDFTWIQALGIRFADHRMYMGAQKTTKWKNDVDRLELNLDGESFNIATDIGAKWQSTVVPGLTVTRTTVTNGVRVQLKGVFDIMAKVVPITQEDSRVHNYGVTDDDSLAHLDIGFKFYDLTDDVHGVLGQTYRPDYVNKLSVSASMPVMGGVASYISSDIFSTDCKVARFGLSTGISMVTTTAN

SEQ ID NO: 11347 - DNA, 1390 bp, Triticum aestivum
  misc_feature (1)..(1390): Ceres Seq. ID no. 13598605
actcatcacttccacgaagaagttaacagagcaagttcatccattctcaactctcaagaaaacatcaggcggcagcagacagcggaagctagcaatggccggagatctgggtaagagcagcggcggcgccagggtgtgcgtgaccggagccaccgggttcgtcggctcctggctcgtcaggaagctcctcgacgcaggctacaccgtccacgccaccatgcgaggcaccggagacgaggagaaagtggggcggctgcggcggctggtggtccccggcggggtggcgccggagcggctggtgctgttcgaggccgacctctacgaccccgccagcttcgcgccggccatcgccgggtgccagtccgtcttcctcatcgccacgccgttcgccgacggcgccgcggaggcggccgtgggcgcggtgcgctccatcctccggcagtgcgaggagtccgggacggtgaagcgcgtcatccacaccgcgtccatgtcgacagcctcgccgctcaccgccgccgggtacaaggacttcatcgacgagtcctgctggaccccgttcgacgtggactaccctctccggagtgctgacttcgataagcacatgctgtcgaagctcctgtcagagaaggagctgctgagctacaacgacggcgaggacccggcgttcgaggtggtgaccctgcccttgggcctcgtctccggcgacacgctcctcggccgcgtcacggaggcgctggaggtggccgtgtcgccggtgtccggggacgagtcccgcttcgggttcatgaggctgctgcagacggtggcgggctcggtgccgctggtgcacgtggacgacgtctgcgcggcgctcgtcttctgcgtggcgcggtcgtaccccgtctccggccgcttcctctgcgccgccgcctacccgaacatccacgacgtcgttgactactacgccagcaagtaccctcacctcgacctcctcagagagtaagcagccatcgattctttcttcttcgcctgaaatccagccgacaagttgcatcagattgatggactggattgatgatcatgtcaggaccgaggaggtggcgagggtgcaacctgagaggaacaagctgggggagctgggtttccggtacaggtacgggatggaggagatattggacggcaatgtccagtgggcagcgaggctggggcaccttgatgaatccaagctcagcgcgcaacacaaggatatgaacccaattagtgattagtggttgtgcggcacattatacacacgattgtttgattttcttatgcgtcttgtgcgtttctgaatccatatcattggaagtacatgtactgttaaaggaaatgagaggtgcgagtgataaataaatatgcttttggtttgtcc

SEQ ID NO: 11348 - protein, 326 aa, Triticum aestivum
  misc_feature (1)..(326): Ceres Seq. ID no. 13598606
LITSTKKLTEQVHPFSTLKKTSGGSRQRKLAMAGDLGKSSGGARVCVTGATGFVGSWLVRKLLDAGYTVHATMRGTGDEEKVGRLRRLVVPGGVAPERLVLFEADLYDPASFAPAIAGCQSVFLIATPFADGAAEAAVGAVRSILRQCEESGTVKRVIHTASMSTASPLTAAGYKDFIDESCWTPFDVDYPLRSADFDKHMLSKLLSEKELLSYNDGEDPAFEVVTLPLGLVSGDTLLGRVTEALEVAVSPVSGDESRFGFMRLLQTVAGSVPLVHVDDVCAALVFCVARSYPVSGRFLCAAAYPNIHDVVDYYASKYPHLDLLRE

SEQ ID NO: 11349 - protein, 295 aa, Triticum aestivum
  misc_feature (1)..(295): Ceres Seq. ID no. 13598607
MAGDLGKSSGGARVCVTGATGFVGSWLVRKLLDAGYTVHATMRGTGDEEKVGRLRRLVVPGGVAPERLVLFEADLYDPASFAPAIAGCQSVFLIATPFADGAAEAAVGAVRSILRQCEESGTVKRVIHTASMSTASPLTAAGYKDFIDESCWTPFDVDYPLRSADFDKHMLSKLLSEKELLSYNDGEDPAFEVVTLPLGLVSGDTLLGRVTEALEVAVSPVSGDESRFGFMRLLQTVAGSVPLVHVDDVCAALVFCVARSYPVSGRFLCAAAYPNIHDVVDYYASKYPHLDLLRE

SEQ ID NO: 11350 - protein, 254 aa, Triticum aestivum
  misc_feature (1)..(254): Ceres Seq. ID no. 13598608
MRGTGDEEKVGRLRRLVVPGGVAPERLVLFEADLYDPASFAPAIAGCQSVFLIATPFADGAAEAAVGAVRSILRQCEESGTVKRVIHTASMSTASPLTAAGYKDFIDESCWTPFDVDYPLRSADFDKHMLSKLLSEKELLSYNDGEDPAFEVVTLPLGLVSGDTLLGRVTEALEVAVSPVSGDESRFGFMRLLQTVAGSVPLVHVDDVCAALVFCVARSYPVSGRFLCAAAYPNIHDVVDYYASKYPHLDLLRE

SEQ ID NO: 11351 - DNA, 1722 bp, Triticum aestivum
  misc_feature (1)..(1722): Ceres Seq. ID no. 13598609
cccactttattgtgtttaaaaaaaacccaatccatactccagaagtccagatcgatcccaatggcgtcgtcggcgcttcgctgccttccaggcgacatcccgccgacgacgctgctcaccctaccaaacgagatgctcgaggaaatcctcctctgcctctccgacgccggcgacctcgtccgcgcctccatggcccgagtctccatccgccgcctcgtcacgaatcaccgcttcctccgccggttccgcactcgctacccgccgtctctactgggcatcgtctctccccttccccggccccgctgggaccggccgctgctgcaactggcccagccgccgcacccctccgcggccgccgcggccgctttctccgggcttgacgacgccgccgccgccgacttctcatgcgccttcctccccaaccccgcgcgctggcgtaggcgcgacttgcgggacggccgcgccctcttttccggcgtcccagagggcaccaatttcgactgccacgtctttgtcagggacctggctgtctgtgaccccctgtcccggcgctacatcctgctaccttccatccccgacgacctagccgccttggtgcagccacccgacgtgctgcgtttcgagcccttccttgctcctccggcggccgaggatgaggacggcttgtctttcagagttatttgcttggtgcagtgcaaaaccaagctggtcctcctcatcttctcttcaggttcaggtgctgaacaatggcgtgctgttacatttgacaattggatcagtttgctcacaggatcaggtaaccagccagagtcataccggcggtcagtaatacgccactatgcacacggctacttctgttgggtgctttctccggcaagcaagttgctcatgctcgacacacgcagcatgggtttctcagttgtggacctcccagatggcaccggtgaaaatgaagcacaggttgccattttggaggcagcgaatggaaggattaagatgtttattaatgagcatttcacaactgaactcaggtattatgtgttgcaaaatgatggagttggtgcaaaccagtggctgtcagaggcaacgttcaatttacccgtaaataatggcggctatatattcatgggcgtagcggggggatacttactcctacaagggcttggagaagacgaccaatatccattccatttggtttcgttgaatctgaagactttacagcttgagttgttccttgcatcaaagcgcaataacaagggtgctcatctgtttgccggtttcccaccatccttgtctttaccaactcttcgacatgatatgactgatgcctgcatttctaattcagatatctgatattgatgccgctgggagatgaaaccttgacgtctggaggtatggagcagcaacttggagcattatgtactggatggaatcatcaggctttccttttgagacggacgcaggcttgtttgcggtgctgactgttgtgcggctcggtgcttattttcagatatgtcatgggtgaatagttgtgataatctaccaaattagattcacaaatcaaatattactagataatttctatttttggaacctttgtttttatcagatatgcaatgtgactagaagcagggtgatatataccatcttctttgtttttgtttttgtgtaagtggtacaaatcggagatatacaaattggttctaccatcttctttgtttt

SEQ ID NO: 11352 - protein, 450 aa, Triticum aestivum
  misc_feature (1)..(450): Ceres Seq. ID no. 13598610
PTLLCLKKTQSILQKSRSIPMASSALRCLPGDIPPTTLLTLPNEMLEEILLCLSDAGDLVRASMARVSIRRLVTNHRFLRRFRTRYPPSLLGIVSPLPRPRWDRPLLQLAQPPHPSAAAAAAFSGLDDAAAADFSCAFLPNPARWRRRDLRDGRALFSGVPEGTNFDCHVFVRDLAVCDPLSRRYILLPSIPDDLAALVQPPDVLRFEPFLAPPAAEDEDGLSFRVICLVQCKTKLVLLIFSSGSGAEQWRAVTFDNWISLLTGSGNQPESYRRSVIRHYAHGYFCWVLSPASKLLMLDTRSMGFSVVDLPDGTGENEAQVAILEAANGRIKMFINEHFTTELRYYVLQNDGVGANQWLSEATFNLPVNNGGYIFMGVAGGYLLLQGLGEDDQYPFHLVSLNLKTLQLELFLASKRNNKGAHLFAGFPPSLSLPTLRHDMTDACISNSDI

SEQ ID NO: 11353 - protein, 430 aa, Triticum aestivum
  misc_feature (1)..(430): Ceres Seq. ID no. 13598611
MASSALRCLPGDIPPTTLLTLPNEMLEEILLCLSDAGDLVRASMARVSIRRLVTNHRFLRRFRTRYPPSLLGIVSPLPRPRWDRPLLQLAQPPHPSAAAAAAFSGLDDAAAADFSCAFLPNPARWRRRDLRDGRALFSGVPEGTNFDCHVFVRDLAVCDPLSRRYILLPSIPDDLAALVQPPDVLRFEPFLAPPAAEDEDGLSFRVICLVQCKTKLVLLIFSSGSGAEQWRAVTFDNWISLLTGSGNQPESYRRSVIRHYAHGYFCWVLSPASKLLMLDTRSMGFSVVDLPDGTGENEAQVAILEAANGRIKMFINEHFTTELRYYVLQNDGVGANQWLSEATFNLPVNNGGYIFMGVAGGYLLLQGLGEDDQYPFHLVSLNLKTLQLELFLASKRNNKGAHLFAGFPPSLSLPTLRHDMTDACISNSDI

SEQ ID NO: 11354 - protein, 406 aa, Triticum aestivum
  misc_feature (1)..(406): Ceres Seq. ID no. 13598612
MLEEILLCLSDAGDLVRASMARVSIRRLVTNHRFLRRFRTRYPPSLLGIVSPLPRPRWDRPLLQLAQPPHPSAAAAAAFSGLDDAAAADFSCAFLPNPARWRRRDLRDGRALFSGVPEGTNFDCHVFVRDLAVCDPLSRRYILLPSIPDDLAALVQPPDVLRFEPFLAPPAAEDEDGLSFRVICLVQCKTKLVLLIFSSGSGAEQWRAVTFDNWISLLTGSGNQPESYRRSVIRHYAHGYFCWVLSPASKLLMLDTRSMGFSVVDLPDGTGENEAQVAILEAANGRIKMFINEHFTTELRYYVLQNDGVGANQWLSEATFNLPVNNGGYIFMGVAGGYLLLQGLGEDDQYPFHLVSLNLKTLQLELFLASKRNNKGAHLFAGFPPSLSLPTLRHDMTDACISNSDI

SEQ ID NO: 11355 - DNA, 1004 bp, Triticum aestivum
  misc_feature (1)..(1004): Ceres Seq. ID no. 13598617
ctgtttttccccgtcgtcaacaatatcttctatcccgaaaatcaagctggttttccccttctctcgccaccccttcttctccaccgtccctcccctggagcgagcgagccctcgtctcactccccgcgatggcttcctccactgctctctccccggtggccttcaagtcctccttctcgccgctcccctccagaccagctcgtactaggataaatgtacaaggcgcattctgtttgccatgttccacttggaaaagagctaataatagatcgttccgggtatacagtttatttggaggaaagaaggagaaagatgagaatggtgacgaggcaccatcaaagggaggaatctttggaaacattggaaatatgcaaaacctttatgaaactgtgaagaaggcccaaatggttgtccaagtggaggctgtgcgggtgcaaaaggagcttgcagcgactgagattgagggttattgtgaaggcgaactaatcaaggttacactatctgggaaccaacaacctataaatgttgaaatcacggaagctgcaatggagttgggtgctgaaaaagtctccgagctggtcaatgaagcctacaaggatgcacaccagaggagcgtccaggcaatgaaggaaaggatggctgatctagcgcagagcataggaatgcctgcagggctcggcgacggtctcaagtgataaaaggcctggtacttgaatgctttccaataatgaaagaagcgtctctcaattttgtattctagctgtgtcgggtcatggttaaacccctccgcagcatcggttagctgtgcatgaactgtaactgtggacacctgtttccttgctcatttgcacatcatagttacagcattagttctaatgtgttgttttacaccaaacagatgttgcttttgtgctagtagaccggcagcctggagaacatttgtaaactaataactgcagagtgaaatatgtttacgttgcgaatagagtactctttggttatgg

SEQ ID NO: 11356 - protein, 230 aa, Triticum aestivum
  misc_feature (1)..(230): Ceres Seq. ID no. 15222384
VFPRRQQYLLSRKSSWFSPSLATPSSPPSLPWSERALVSLPAMASSTALSPVAFKSSFSPLPSRPARTRINVQGAFCLPCSTWKRANNRSFRVYSLFGGKKEKDENGDEAPSKGGIFGNIGNMQNLYETVKKAQMVVQVEAVRVQKELAATEIEGYCEGELIKVTLSGNQQPINVEITEAAMELGAEKVSELVNEAYKDAHQRSVQAMKERMADLAQSIGMPAGLGDGLK

SEQ ID NO: 11357 - protein, 188 aa, Triticum aestivum
  misc_feature (1)..(188): Ceres Seq. ID no. 15222385
MASSTALSPVAFKSSFSPLPSRPARTRINVQGAFCLPCSTWKRANNRSFRVYSLFGGKKEKDENGDEAPSKGGIFGNIGNMQNLYETVKKAQMVVQVEAVRVQKELAATEIEGYCEGELIKVTLSGNQQPINVEITEAAMELGAEKVSELVNEAYKDAHQRSVQAMKERMADLAQSIGMPAGLGDGLK

SEQ ID NO: 11358 - DNA, 1454 bp, Triticum aestivum
  misc_feature (1)..(1454): Ceres Seq. ID no. 13598618
aaaaaccgtgcctttccaatcccccggatccagtctcgctcccagcacaagtcctcccacccagccgctgcccggggcggcaatccgtcgagcaccagccgcgcgcgcgctccactccgctgcgcctgcggccgccgccgtccatggcgtccgccgcgcgggctctgggcgcgctcctccacagggcctcgtcgctttcgtcctccgcctctgctctcaggagcgcctcccttgtacacaggaatagcccaactggtggcgccagcttgttccaggggcacgtggctaggcggaggatttggacgttccagccgctctgtatggggcggcgctcctgcaagatcgccgggaggaagggtgctcagaatttgaaaaagatgaagcgcaacagcaaaatcggaaaagaaatcgttgctgccatcaagaagggtggtccaagtccttcgtccaacacagctttagcagcgatactagagaaagtaagagagcttgatgtccccaaggaagttgttgagcgtaacatcaaaagagcttcagaaaagggtcaagatacttacacagaaaagatttatgaggtctatggttttggtggagtaggtatggtcgttgaggtccttacagacaaaattacaagatctattgcggatattagaaatgttgtaaaagactgtggagcaaaattggctgatcctggatctgttacattcagattcagacaagctcgagtggttaacataaaagttacagatgccgataaggaccaactactctctgttgctttggatgctggcgccgatgatgttattgaaccaaattttgatgatgaagatgactctgaagaggttctagagaggttttacaagatagttactacatctgaaaactatcctgttgtgctatcaaagctacaagaggaagggctgaaatttgaaacggataacggttatgaactgctgcctctcaatccgattgaggtggatgacgaggccatggaacttaacaaggaccttgtattgaagttgcttgaattggatgatgttgatgctgtctacacagaccagaagtgagccaatttggaacccacaggctctctcagctctcaagacgctgctcgatgactccatttgggtagggcttgttttcaacttcgtgtccattaaggatttcttatcagcactgtttgcgccgattacgaagcctgcactcgtaacatcagcttcaagtgtccaaaatgaaaattggtgaacgcagcagtttccttttgggggtacttttccccacattctgccgtctcatagttttttaccttacgtttgttgtccctgatctcttcaccttgtccgtgtctcagtgagctgctagacgctgctcatataacgaatgttgtagctgcatcttttcatgtgattgtaagcaatacaagtaaaactgacctatgcatggactttggagtc

SEQ ID NO: 11359 - protein, 354 aa, Triticum aestivum
  misc_feature (1)..(354): Ceres Seq. ID no. 13598619
KPCLSNPPDPVSLPAQVLPPSRCPGRQSVEHQPRARSTPLRLRPPPSMASAARALGALLHRASSLSSSASALRSASLVHRNSPTGGASLFQGHVARRRIWTFQPLCMGRRSCKIAGRKGAQNLKKMKRNSKIGKEIVAAIKKGGPSPSSNTALAAILEKVRELDVPKEVVERNIKRASEKGQDTYTEKIYEVYGFGGVGMVVEVLTDKITRSIADIRNVVKDCGAKLADPGSVTFRFRQARVVNIKVTDADKDQLLSVALDAGADDVIEPNFDDEDDSEEVLERFYKIVTTSENYPVVLSKLQEEGLKFETDNGYELLPLNPIEVDDEAMELNKDLVLKLLELDDVDAVYTDQK

SEQ ID NO: 11360 - protein, 307 aa, Triticum aestivum
  misc_feature (1)..(307): Ceres Seq. ID no. 13598620
MASAARALGALLHRASSLSSSASALRSASLVHRNSPTGGASLFQGHVARRRIWTFQPLCMGRRSCKIAGRKGAQNLKKMKRNSKIGKEIVAAIKKGGPSPSSNTALAAILEKVRELDVPKEVVERNIKRASEKGQDTYTEKIYEVYGFGGVGMVVEVLTDKITRSIADIRNVVKDCGAKLADPGSVTFRFRQARVVNIKVTDADKDQLLSVALDAGADDVIEPNFDDEDDSEEVLERFYKIVTTSENYPVVLSKLQEEGLKFETDNGYELLPLNPIEVDDEAMELNKDLVLKLLELDDVDAVYTDQK

SEQ ID NO: 11361 - protein, 248 aa, Triticum aestivum
  misc_feature (1)..(248): Ceres Seq. ID no. 13598621
MGRRSCKIAGRKGAQNLKKMKRNSKIGKEIVAAIKKGGPSPSSNTALAAILEKVRELDVPKEVVERNIKRASEKGQDTYTEKIYEVYGFGGVGMVVEVLTDKITRSIADIRNVVKDCGAKLADPGSVTFRFRQARVVNIKVTDADKDQLLSVALDAGADDVIEPNFDDEDDSEEVLERFYKIVTTSENYPVVLSKLQEEGLKFETDNGYELLPLNPIEVDDEAMELNKDLVLKLLELDDVDAVYTDQK

SEQ ID NO: 11362 - DNA, 1253 bp, Triticum aestivum
  misc_feature (1)..(1253): Ceres Seq. ID no. 13598630
aatccaaccgcggctttggcacctcctcgcccgccgccgccgccgccgtcgccgaccagatcccgcgccgccgcagccgcagccgcctccggccatggcgccgccatcctccgaagagccggccgccgcctccggggccggcgccatctccaaggtcctcgtcgtcatagcgatgcagacggaggcgctcccgctcgtcacccggttccagctcgtcgaggcggccgccgatgattccatatttcctaaaggtgccccttggactcggtaccatggcgactacaaaggcctccacatcgatctcgtctggcctggaaaagaccctgtgcttggggttgacagtgttggtacagtatccgcagctcttgtgacttatgcttcthtacaattgttgaagccagaccttattgtgywtmacatcamcgctggtactgctggtggttttaaggccagaggagcaggtattggggatgtcttcttagcttcagatgttgctttccatgacaggagaatacccattcctgtctttgacagttatggaattggagcacgaaaaacatttgaaaccccgaatatagtgaaggaactcaatttgaaggttgggaaactgtcaactggtgattctctggatatgtccccccatgatgagacagcaatactgagcaatgaagctacagtcaaggatatggagggagcagcggtggcatatgttgctgacttgttctcgacacctgctatctttgtcaaagctgtgactgacattgttgatggggagaagccaacagccgaggagtttctgcaaaacctgatctccgtgacgatggcgcttgaccaggcagtcatgcaagtggtagacttcatcagcggcaaatgtatctctgatctctgaacgccgaacactccgccatgctgttctggggtccacaaactgagggagcctgaatatatattgttggatgtataatgtttcctggggggtttcacacacgattttacattatcgtaacccctatgtaaaaaattcttggcgattactcggagccattgtatgggattttgtagaattttacaaactgtgcagcttagtgaagctcggcttaataaggtggtgtattgttacactggaataaatgatgggcactggaactcccatggattcagtacaatggttgatggacgcaccttggcagcttcatcacatggcagctgaatactttccaaatggagtaagaagtaaaggctctcatgtttgc

SEQ ID NO: 11363 - protein, 295 aa, Triticum aestivum
  misc_feature (1)..(295): Ceres Seq. ID no. 15222386
  misc_feature (128)..(128): Xaa is any aa, unknown or other
  misc_feature (138)..(138): Xaa is any aa, unknown or other
  misc_feature (139)..(139): Xaa is any aa, unknown or other
  misc_feature (141)..(141): Xaa is any aa, unknown or other
IQPRLWHLLARRRRRRRRPDPAPPQPQPPPAMAPPSSEEPAAASGAGAISKVLVVIAMQTEALPLVTRFQLVEAAADDSIFPKGAPWTRYHGDYKGLHIDLVWPGKDPVLGVDSVGTVSAALVTYASXQLLKPDLIVXXIXAGTAGGFKARGAGIGDVFLASDVAFHDRRIPIPVFDSYGIGARKTFETPNIVKELNLKVGKLSTGDSLDMSPHDETAILSNEATVKDMEGAAVAYVADLFSTPAIFVKAVTDIVDGEKPTAEEFLQNLISVTMALDQAVMQVVDFISGKCISDL

SEQ ID NO: 11364 - protein, 264 aa, Triticum aestivum
  misc_feature (1)..(264): Ceres Seq. ID no. 15222387
  misc_feature (97)..(97): Xaa is any aa, unknown or other
  misc_feature (107)..(107): Xaa is any aa, unknown or other
  misc_feature (108)..(108): Xaa is any aa, unknown or other
  misc_feature (110)..(110): Xaa is any aa, unknown or other
MAPPSSEEPAAASGAGAISKVLVVIAMQTEALPLVTRFQLVEAAADDSIFPKGAPWTRYHGDYKGLHIDLVWPGKDPVLGVDSVGTVSAALVTYASXQLLKPDLIVXXIXAGTAGGFKARGAGIGDVFLASDVAFHDRRIPIPVFDSYGIGARKTFETPNIVKELNLKVGKLSTGDSLDMSPHDETAILSNEATVKDMEGAAVAYVADLFSTPAIFVKAVTDIVDGEKPTAEEFLQNLISVTMALDQAVMQVVDFISGKCISDL

SEQ ID NO: 11365 - protein, 238 aa, Triticum aestivum
  misc_feature (1)..(238): Ceres Seq. ID no. 15222388
  misc_feature (71)..(71): Xaa is any aa, unknown or other
  misc_feature (81)..(81): Xaa is any aa, unknown or other
  misc_feature (82)..(82): Xaa is any aa, unknown or other
  misc_feature (84)..(84): Xaa is any aa, unknown or other
MQTEALPLVTRFQLVEAAADDSIFPKGAPWTRYHGDYKGLHIDLVWPGKDPVLGVDSVGTVSAALVTYASXQLLKPDLIVXXIXAGTAGGFKARGAGIGDVFLASDVAFHDRRIPIPVFDSYGIGARKTFETPNIVKELNLKVGKLSTGDSLDMSPHDETAILSNEATVKDMEGAAVAYVADLFSTPAIFVKAVTDIVDGEKPTAEEFLQNLISVTMALDQAVMQVVDFISGKCISDL

SEQ ID NO: 11366 - DNA, 1675 bp, Triticum aestivum
  misc_feature (1)..(1675): Ceres Seq. ID no. 13598642
gaaaaatcgaccaaagagcaacccgacggccgtggtgatggaggcgatggggaagcagcagagggaggaggtgctcctccgcgccgcctccgacggcaacctccgactcctcaagaagatggcgcgctggatggggtcagggggccaaggcgaggccgccgtacttgcggcggtggaggacggcgaagggggtcgcccgctgcacctggcggccggggcgggccgggtcgaggtctgcaggtacctcgtcgaggacctccgcctcgatgtcaatcaactcaactgtcaaggtcacacgccactgtacctttctgcctattttgggagagctgctgctgcaacatatcttcttgatcatggtgccgatccactagctagcaaactacggtcacctctttatggcgctgcaatgcaagggcattgtgaaatgttagaaatgctgctttcaagaggactcgatgtggatttaaattctgtacaagggacggcattgcatgcagctgcttgttataaacaacatggcatgatgaagattttgttggagcaccatgccgatcctaacaaggtttgctatcttaataataccccgttgagtttggccatgcggcagcgggacatgtctacagagttgttggaatgtgccaagctactcataaaggctggtgctgatgtgaattttattgaccttgatggtgatagttacgtgacagtggcagcgaagttcggctatcctggcatcatgaagtgcttattagatgctggtgctaaccccgatattccagatgaatatggtagaacaccagttgaatttgctgcctctaacggcagtagggatatggttgaaatgttattccctttaacttctcctatttcaacgctgccggactggagtattgatggaatcatttctcatgtgaaacactatggtttgaagccgagggataaacaaaagtgtgcgaagagaagaactgaactgaaacagaaagctttaaaggcttttaaggaagaggaatattttatagcagcactgctgtatagttgtgcaataacacttgacccgagtccagatgaatatgcaaccctattggcaaataggagtctctgctgtttgcgcaccaagaacggaagagctgctctccctgatgctaccatgtgcagaagggtgcgacctttttggccaaaagcctgctatcgagaagggtcagcttttatgttattgaaggactatgagaaagcatgcaaggcttttgcggatggcttgaagcttgaccctacaaatggtgatcttgcaaatgctttaagggaagcccaagaagctgcgaaggatgctcgtcgccctgaaaattgactgatgtgtcaaaccttacatgcagaatctgaggctctgttttgttgctaagcaccttttgtccatcctgaaaacttctgccaagaatatcccgtggtcgtttaagacttccgttgcacccatcgtttgtaaatataactggggatgaactcgctgaccatagtatcttcattccagtgcatgtgttgacaaactttatcgtcacagaacgtacggcatagtccggtcaccgagaagcgctggaggcggagcagtatgtaattggctcattaattcttccttccccttaccttcgcgggaagtggtaaatgatgaaatttggacttg

SEQ ID NO: 11367 - protein, 448 aa, Triticum aestivum
  misc_feature (1)..(448): Ceres Seq. ID no. 15222389
KNRPKSNPTAVVMEAMGKQQREEVLLRAASDGNLRLLKKMARWMGSGGQGEAAVLAAVEDGEGGRPLHLAAGAGRVEVCRYLVEDLRLDVNQLNCQGHTPLYLSAYFGRAAAATYLLDHGADPLASKLRSPLYGAAMQGHCEMLEMLLSRGLDVDLNSVQGTALHAAACYKQHGMMKILLEHHADPNKVCYLNNTPLSLAMRQRDMSTELLECAKLLIKAGADVNFIDLDGDSYVTVAAKFGYPGIMKCLLDAGANPDIPDEYGRTPVEFAASNGSRDMVEMLFPLTSPISTLPDWSIDGIISHVKHYGLKPRDKQKCAKRRTELKQKALKAFKEEEYFIAALLYSCAITLDPSPDEYATLLANRSLCCLRTKNGRAALPDATMCRRVRPFWPKACYREGSAFMLLKDYEKACKAFADGLKLDPTNGDLANALREAQEAAKDARRPEN

SEQ ID NO: 11368 - protein, 436 aa, Triticum aestivum
  misc_feature (1)..(436): Ceres Seq. ID no. 15222390
MEAMGKQQREEVLLRAASDGNLRLLKKMARWMGSGGQGEAAVLAAVEDGEGGRPLHLAAGAGRVEVCRYLVEDLRLDVNQLNCQGHTPLYLSAYFGRAAAATYLLDHGADPLASKLRSPLYGAAMQGHCEMLEMLLSRGLDVDLNSVQGTALHAAACYKQHGMMKILLEHHADPNKVCYLNNTPLSLAMRQRDMSTELLECAKLLIKAGADVNFIDLDGDSYVTVAAKFGYPGIMKCLLDAGANPDIPDEYGRTPVEFAASNGSRDMVEMLFPLTSPISTLPDWSIDGIISHVKHYGLKPRDKQKCAKRRTELKQKALKAFKEEEYFIAALLYSCAITLDPSPDEYATLLANRSLCCLRTKNGRAALPDATMCRRVRPFWPKACYREGSAFMLLKDYEKACKAFADGLKLDPTNGDLANALREAQEAAKDARRPEN

SEQ ID NO: 11369 - protein, 433 aa, Triticum aestivum
  misc_feature (1)..(433): Ceres Seq. ID no. 15222391
MGKQQREEVLLRAASDGNLRLLKKMARWMGSGGQGEAAVLAAVEDGEGGRPLHLAAGAGRVEVCRYLVEDLRLDVNQLNCQGHTPLYLSAYFGRAAAATYLLDHGADPLASKLRSPLYGAAMQGHCEMLEMLLSRGLDVDLNSVQGTALHAAACYKQHGMMKILLEHHADPNKVCYLNNTPLSLAMRQRDMSTELLECAKLLIKAGADVNFIDLDGDSYVTVAAKFGYPGIMKCLLDAGANPDIPDEYGRTPVEFAASNGSRDMVEMLFPLTSPISTLPDWSIDGIISHVKHYGLKPRDKQKCAKRRTELKQKALKAFKEEEYFIAALLYSCAITLDPSPDEYATLLANRSLCCLRTKNGRAALPDATMCRRVRPFWPKACYREGSAFMLLKDYEKACKAFADGLKLDPTNGDLANALREAQEAAKDARRPEN

SEQ ID NO: 11370 - DNA, 1464 bp, Triticum aestivum
  misc_feature (1)..(1464): Ceres Seq. ID no. 13598653
atagtttccttcctcttctgacttatctcacatgctctgacctcagctccaatctgagaccctagtccctcgagccgtcgccgtgccgtagctgatagcatcaccgtccgacgccccccacccgctcccaaccctcccgcctctcacgcgcgccgcccccatcgccgtccccgccgtatccactccgtccgcagtcgacgggttttgaggtggacatgcattttgcaaatgtcaggctctaatcagatggcttcggatggtaaatttggaaaaggtcctcgggagctcactggggctgttgatttaattagccgctacaggctgctgaaccatcacagtttcttttgtaagaaaccattgccactggctatctcagatacacattatcttcagaatgttgtgggtgatactgaaatccgtaaaggagaagggatggagatagatcaactcattcagaatccagatctgagggagaagaagactgcttatattcagccttttgacatggaaacactaggacacgcatttcagttgcgagaaacagcgccagtagatctgccttcggctgaaaaaggcactccaactatatcgggaaaatcaaaggttaagtccagggacaaagtgaagaagcataaaaagcacaaggagaaagacaaggacaaggaacacaagaagcacaaacatcgccataaggatcggagtaaagataaagacaaagacaaagagaaagagaaagagaaagaaaaagagaaggagaaggagaaagacaaagacaaagacaaagaaaagaaaaaagagaagagcgtgcatcatgatttgggaggtgataattccaaaaaacatcatgagaagaagaggaaacatgatggaatggaaaatttggcggctgtacgtaaccacaaaaaaacacaaaagcgcaaaattcaatgaaatgggcagtggactttgtttggcgtaagatgtgacaaattcgtttccgtgttagttctcgtaatatgactccatgttttatgctgttaatgggcgactctgaaggttttcttgtcaataccacttccgatggagttactgatggaatttcctttatcaagatgatccggttacaagggacgcgcccaatcagatcatgatacaccgtaaatcaattctgggaaaacttgaacttgtcatttggagttatttgattttttttgtgtgtgtgtgtgttagttctgtgcccattagcaattcttgagtgttgccctcctatatgccctgtcctgtaactcagacagaagaaaagggtttactgtcaaagccgcatgatgtgaccgtgtacaacaggagacgtcacgtgtagaagagaaaaattagccgtacacattccatgatccagcaaattcaatggtggtgatgaaccttaaggaactcgagcagtatgttctgtgtaccaatcatgttttcttaatcaaacaatcccagttt

SEQ ID NO: 11371 - protein, 233 aa, Triticum aestivum
  misc_feature (1)..(233): Ceres Seq. ID no. 13598654
MSGSNQMASDGKFGKGPRELTGAVDLISRYRLLNHHSFFCKKPLPLAISDTHYLQNVVGDTEIRKGEGMEIDQLIQNPDLREKKTAYIQPFDMETLGHAFQLRETAPVDLPSAEKGTPTISGKSKVKSRDKVKKHKKHKEKDKDKEHKKHKHRHKDRSKDKDKDKEKEKEKEKEKEKEKDKDKDKEKKKEKSVHHDLGGDNSKKHHEKKRKHDGMENLAAVRNHKKTQKRKIQ

SEQ ID NO: 11372 - protein, 227 aa, Triticum aestivum
  misc_feature (1)..(227): Ceres Seq. ID no. 13598655
MASDGKFGKGPRELTGAVDLISRYRLLNHHSFFCKKPLPLAISDTHYLQNVVGDTEIRKGEGMEIDQLIQNPDLREKKTAYIQPFDMETLGHAFQLRETAPVDLPSAEKGTPTISGKSKVKSRDKVKKHKKHKEKDKDKEHKKHKHRHKDRSKDKDKDKEKEKEKEKEKEKEKDKDKDKEKKKEKSVHHDLGGDNSKKHHEKKRKHDGMENLAAVRNHKKTQKRKIQ

SEQ ID NO: 11373 - protein, 165 aa, Triticum aestivum
  misc_feature (1)..(165): Ceres Seq. ID no. 13598656
MEIDQLIQNPDLREKKTAYIQPFDMETLGHAFQLRETAPVDLPSAEKGTPTISGKSKVKSRDKVKKHKKHKEKDKDKEHKKHKHRHKDRSKDKDKDKEKEKEKEKEKEKEKDKDKDKEKKKEKSVHHDLGGDNSKKHHEKKRKHDGMENLAAVRNHKKTQKRKIQ

SEQ ID NO: 11374 - DNA, 1853 bp, Triticum aestivum
  misc_feature (1)..(1853): Ceres Seq. ID no. 13598695
atgagccagggtggcaatggcatgcctaacttaattcctgtttgattccctcctgctgcttattagttagctgccaaattgcctccaaaatatagctcgctggcaaatatggaacgcatgcatgtaattaacatggttgatttgtctatgcaatgtggatactcctatatggagtagtacgctactgcacacccgtatttggaagcattttacttcctcattgattaggatatatctcgcttgattaactccttgtttatgtgtagctatataggtgcgtcactcccttgctatgcgctcgttaaatatacgtcgtccagggattttcctatcgatcggctcgatcttgcttccactactcgatccattgaaacgatggtgaagacgagggccggtgccgtccggccgtgggcgcttctcgctcttgctctcctcctcatcgccggcagctgcgtggaggcggcggacgagcaggcggcgaacggcggtggcaggaggaggaggacgcatcgacgttccgcggcggcggtcgcggacatgatggtgcccatcaccttcctcaacgcctccgtcgagaagggcgccgtgtgtatggatgggacgccggccgcttacgacctggacccgggctccggggcagggagcaagagctggatcgtcaacctcgagggaggcgggtggtgcaacaacgcgaggacgtgcaggttccggacaaggactcaccatggctcctccaacttcatggagcggcagatcgccttcaccggcatcatgagcgccagccccgccgagaatcctgatttctacaactggaaccgggtgaagatccgctactgcgacagcgcctccttcgccggcgacaccttcgacaagggtaccgggctctacttccgggggcagcggatttgggaggaagccatccagcacctcctctccatcgggatggcgtcggccgaccgggcgcttctcacgggctgctccgccggtgggctggcggcgatactccactgcgaccagttcggcgccttcttcgccggccgaagcaccaccgtcaagtgcctcgccgacgcaggcctcttcctcgacgccgttgatgtttccgggggccgcagcttgagatcttactacggcgacattgtagccatgcagggagtggctccaaaccttccgcccacctgcaccgatcacctcgacgccacctcgtgcttcttccctcagaatataatcgacagcatcaagacccccatcttcttgctcaacgcagcctacgacgtctggcagattgaggaaagcctggccccaagcaaagccgaccccagccgcgcctggcgagcctgcaagttcaaccgctcggcctgcaacgcgtctcagataaacttcctgcaaggtttcagagatcagatggtggcatccgtgagaggcttctccggttccaagagcaacgggctcttcataaactcgtgtttcgcccactgccagtccgaactgccggccacctggaatggcacccctgccattcagaacaagaggatcgcgaaatctgtcggcgattggtactttggccgggccgaagtgaaggcgatcgattgcccatacccttgcgacaacacatgccgcaacatcatataagaagatcttgcaagcaagggccgattcgaacctcatgattaggatttagaactcgaggcaagtatttgttagtttttcataaagacttcacttcaggccggatatatgtctttgtgtatgatgtaattatgaaggtctcctcagaataaacttgttaaatgtaaaaaaaaaaaaaaaaaagcttatcgataccgtcgacctcgagggggggcccggtacccaat

SEQ ID NO: 11375 - protein, 456 aa, Triticum aestivum
  misc_feature (1)..(456): Ceres Seq. ID no. 15222399
MCSYIGASLPCYALVKYTSSRDFPIDRLDLASTTRSIETMVKTRAGAVRPWALLALALLLIAGSCVEAADEQAANGGGRRRRTHRRSAAAVADMMVPITFLNASVEKGAVCMDGTPAAYDLDPGSGAGSKSWIVNLEGGGWCNNARTCRFRTRTHHGSSNFMERQIAFTGIMSASPAENPDFYNWNRVKIRYCDSASFAGDTFDKGTGLYFRGQRIWEEAIQHLLSIGMASADRALLTGCSAGGLAAILHCDQFGAFFAGRSTTVKCLADAGLFLDAVDVSGGRSLRSYYGDIVAMQGVAPNLPPTCTDHLDATSCFFPQNIIDSIKTPIFLLNAAYDVWQIEESLAPSKADPSRAWRACKFNRSACNASQINFLQGFRDQMVASVRGFSGSKSNGLFINSCFAHCQSELPATWNGTPAIQNKRIAKSVGDWYFGRAEVKAIDCPYPCDNTCRNII

SEQ ID NO: 11376 - protein, 417 aa, Triticum aestivum
  misc_feature (1)..(417): Ceres Seq. ID no. 15222400
MVKTRAGAVRPWALLALALLLIAGSCVEAADEQAANGGGRRRRTHRRSAAAVADMMVPITFLNASVEKGAVCMDGTPAAYDLDPGSGAGSKSWIVNLEGGGWCNNARTCRFRTRTHHGSSNFMERQIAFTGIMSASPAENPDFYNWNRVKIRYCDSASFAGDTFDKGTGLYFRGQRIWEEAIQHLLSIGMASADRALLTGCSAGGLAAILHCDQFGAFFAGRSTTVKCLADAGLFLDAVDVSGGRSLRSYYGDIVAMQGVAPNLPPTCTDHLDATSCFFPQNIIDSIKTPIFLLNAAYDVWQIEESLAPSKADPSRAWRACKFNRSACNASQINFLQGFRDQMVASVRGFSGSKSNGLFINSCFAHCQSELPATWNGTPAIQNKRIAKSVGDWYFGRAEVKAIDCPYPCDNTCRNII

SEQ ID NO: 11377 - protein, 363 aa, Triticum aestivum
  misc_feature (1)..(363): Ceres Seq. ID no. 15222401
MMVPITFLNASVEKGAVCMDGTPAAYDLDPGSGAGSKSWIVNLEGGGWCNNARTCRFRTRTHHGSSNFMERQIAFTGIMSASPAENPDFYNWNRVKIRYCDSASFAGDTFDKGTGLYFRGQRIWEEAIQHLLSIGMASADRALLTGCSAGGLAAILHCDQFGAFFAGRSTTVKCLADAGLFLDAVDVSGGRSLRSYYGDIVAMQGVAPNLPPTCTDHLDATSCFFPQNIIDSIKTPIFLLNAAYDVWQIEESLAPSKADPSRAWRACKFNRSACNASQINFLQGFRDQMVASVRGFSGSKSNGLFINSCFAHCQSELPATWNGTPAIQNKRIAKSVGDWYFGRAEVKAIDCPYPCDNTCRNII

SEQ ID NO: 11378 - DNA, 1179 bp, Triticum aestivum
  misc_feature (1)..(1179): Ceres Seq. ID no. 13598708
acacacagcgacctactatctcataagcctataccatccgttgagccacacccaactccgccatggcgaacccctccaatttccagatcactccccgcgccgcgttcgtggagagcaacgagctcaacttccgcagtctgtacctgttccacacttccctcggcgcaaaccagacccagtccaccgtaatagacccgaatgctagtaccggtttgggtcagacggctgttaacaactgggcgatatgtgatagccctagccccggtgccaccgtcgttgcacgtgcacatggcctgcatatctatgccggtaactggcagaacaccttcagcataacctttgaagttgaaaggtttaaggggtcaacgcttcaggtgatggggatatctgttgaggaaggtgagtgggctattgttggtggcacaggacagttcgcaatggcaaacggtgtcatatacaaaaagttccatgagcagaggagcgacggtaacatcatagaactcactgtccacgcgttctgtccagtgctgaaaggctcgccgagccttctcacaaagcttgggccatggggtggaagtggagggtcagataaagacatcgttgaggcaccaaggcgtctagagagcatcacagttagcagcggctcgattattgattcaatcaaattttcttatgttgaccaagctggccagaagcacacaagtggaccctggggaggatccggaggaaatccgaacacgatcgtactcggggcttctgagtttgtgaaggaagtttctggaacatacggcatttatgacgcagaccaacacaacataataatgtcactgaaattcatcaccaatgtgaaggcttatgggcctttcggagaagcgaatggaacccctttcaccatacctgtggaaaacaatagcagcatagtgggcttcttcgggcgtagtgggatatatctcgatgcgcttggtgtctacgtgcgcccgctctaagcaacaacagctaatgttcttattttcggcgtttgtttctcatttcaaataagaagatgggatcgttgtcctttctcatccggaagatcctatgtagccacccggacttttaggtccctttgttgtgatgaataaaaatatcagttttcttacaaaaaaaaaaaaaaaaaagcttatcgataccgtcgacctc

SEQ ID NO: 11379 - protein, 307 aa, Triticum aestivum
  misc_feature (1)..(307): Ceres Seq. ID no. 13598709
MANPSNFQITPRAAFVESNELNFRSLYLFHTSLGANQTQSTVIDPNASTGLGQTAVNNWAICDSPSPGATVVARAHGLHIYAGNWQNTFSITFEVERFKGSTLQVMGISVEEGEWAIVGGTGQFAMANGVIYKKFHEQRSDGNIIELTVHAFCPVLKGSPSLLTKLGPWGGSGGSDKDIVEAPRRLESITVSSGSIIDSIKFSYVDQAGQKHTSGPWGGSGGNPNTIVLGASEFVKEVSGTYGIYDADQHNIIMSLKFITNVKAYGPFGEANGTPFTIPVENNSSIVGFFGRSGIYLDALGVYVRPL

SEQ ID NO: 11380 - protein, 202 aa, Triticum aestivum
  misc_feature (1)..(202): Ceres Seq. ID no. 13598710
MGISVEEGEWAIVGGTGQFAMANGVIYKKFHEQRSDGNIIELTVHAFCPVLKGSPSLLTKLGPWGGSGGSDKDIVEAPRRLESITVSSGSIIDSIKFSYVDQAGQKHTSGPWGGSGGNPNTIVLGASEFVKEVSGTYGIYDADQHNIIMSLKFITNVKAYGPFGEANGTPFTIPVENNSSIVGFFGRSGIYLDALGVYVRPL

SEQ ID NO: 11381 - protein, 182 aa, Triticum aestivum
  misc_feature (1)..(182): Ceres Seq. ID no. 13598711
MANGVIYKKFHEQRSDGNIIELTVHAFCPVLKGSPSLLTKLGPWGGSGGSDKDIVEAPRRLESITVSSGSIIDSIKFSYVDQAGQKHTSGPWGGSGGNPNTIVLGASEFVKEVSGTYGIYDADQHNIIMSLKFITNVKAYGPFGEANGTPFTIPVENNSSIVGFFGRSGIYLDALGVYVRPL

SEQ ID NO: 11382 - DNA, 1260 bp, Triticum aestivum
  misc_feature (1)..(1260): Ceres Seq. ID no. 13598749
actccactcaatccccaaaatggggacgctgcttccgtgtcaccctacccttaccctcctccccctcctcttcgccgccgccatcgtcggcgtgcgttgcgcgccggtgtacaggccggagtacctggtggacgggaaccagctggtaaacatgcagtaccacatgggccccgtcgtgtcaggcgcgccgaccaacctgttcctcatctggtacggccggtgggaggccccggcgcaggctgtgctccgcgacttcctcgcctccctctccgctccggcgccgttccccgccgtctccgactggtgggcccgcacgccgcggctctacacggaccaatccggcgccaatgtcaccgccacattcgccatcgccggggagcactccgacgccgggtactcccacggcgcctccctgaagcggatcgacatgcagtccatcatccgcaccgccgtggtcgcgtacccggaccctctgccgctcgacccgtacaacggcgtgtacctggtgctctcctcaccggacgtgcaggtggaggagttctgccgcgccatgtgcggcttccactacttcaccttcgcgtccgtggtcggggtcaccgtcccgtacgcgtgggtcgggaacagcggctcgcagtgcccagggaggtgtgcgtatccgttcgccgcgccggagtacggcgccagcgggcagggggtgctgcggccgccgaacggcgaccccggggtggacgggatggtgatcgtgctggggcacgagcttgcggagctggccaccaacccgctggtgaacgcgtggtacgccggtgacacgccaacggcgcccacggagatcgccgacctctgtctcggggtctacggcgacggcggtggagcaggcgggttcgtcgggaatgtctcccacgcagccgacggcagctcctacaacgtgaacggcgtcaacggtcggcggttcctggtgcagtggctctggaaccccgtcctcggcgcgtgctacggacccaactccagcaactgaagccgctcttctcttccccggatccgtggcttctctcagttgatgccattgcgctggatggcgttgcagaggcaggaatggcaagtccatggatggatgggtacgacatgccatgatatccagatactgaatgtctgaaatgtcattcagactcgatctgttccttatttgttggcccagggtttgcgataggtttatggattttgatagatctgtatctgtgaggacaagatgcaaatttttgc

SEQ ID NO: 11383 - protein, 337 aa, Triticum aestivum
  misc_feature (1)..(337): Ceres Seq. ID no. 13598750
LHSIPKMGTLLPCHPTLTLLPLLFAAAIVGVRCAPVYRPEYLVDGNQLVNMQYHMGPVVSGAPTNLFLIWYGRWEAPAQAVLRDFLASLSAPAPFPAVSDWWARTPRLYTDQSGANVTATFAIAGEHSDAGYSHGASLKRIDMQSIIRTAVVAYPDPLPLDPYNGVYLVLSSPDVQVEEFCRAMCGFHYFTFASVVGVTVPYAWVGNSGSQCPGRCAYPFAAPEYGASGQGVLRPPNGDPGVDGMVIVLGHELAELATNPLVNAWYAGDTPTAPTEIADLCLGVYGDGGGAGGFVGNVSHAADGSSYNVNGVNGRRFLVQWLWNPVLGACYGPNSSN

SEQ ID NO: 11384 - protein, 331 aa, Triticum aestivum
  misc_feature (1)..(331): Ceres Seq. ID no. 13598751
MGTLLPCHPTLTLLPLLFAAAIVGVRCAPVYRPEYLVDGNQLVNMQYHMGPVVSGAPTNLFLIWYGRWEAPAQAVLRDFLASLSAPAPFPAVSDWWARTPRLYTDQSGANVTATFAIAGEHSDAGYSHGASLKRIDMQSIIRTAVVAYPDPLPLDPYNGVYLVLSSPDVQVEEFCRAMCGFHYFTFASVVGVTVPYAWVGNSGSQCPGRCAYPFAAPEYGASGQGVLRPPNGDPGVDGMVIVLGHELAELATNPLVNAWYAGDTPTAPTEIADLCLGVYGDGGGAGGFVGNVSHAADGSSYNVNGVNGRRFLVQWLWNPVLGACYGPNSSN

SEQ ID NO: 11385 - protein, 287 aa, Triticum aestivum
  misc_feature (1)..(287): Ceres Seq. ID no. 13598752
MQYHMGPVVSGAPTNLFLIWYGRWEAPAQAVLRDFLASLSAPAPFPAVSDWWARTPRLYTDQSGANVTATFAIAGEHSDAGYSHGASLKRIDMQSIIRTAVVAYPDPLPLDPYNGVYLVLSSPDVQVEEFCRAMCGFHYFTFASVVGVTVPYAWVGNSGSQCPGRCAYPFAAPEYGASGQGVLRPPNGDPGVDGMVIVLGHELAELATNPLVNAWYAGDTPTAPTEIADLCLGVYGDGGGAGGFVGNVSHAADGSSYNVNGVNGRRFLVQWLWNPVLGACYGPNSSN

SEQ ID NO: 11386 - DNA, 888 bp, Triticum aestivum
  misc_feature (1)..(888): Ceres Seq. ID no. 13598758
atatcaggttcaggttcgggttctgcagccgccgtagaaccctagcgtgtctcattaaaccctcaacctccaccttccgacttgcttccagtaattcttccctccccaccaagaaaatcacagccgagaaatagccgaccgaccgcacccttccctcccttctcccccttcctcaagacaggccggaaccaaatcgtgaagctcgatggaccacgtgggctccatggaggagaggatcgtggcggaccggatccggaagaagctggaggaggtgaacgtcgccgcccagaagcacctcgagggcgtgcaggaccatgtcaacttcactctgcagaaagagtacttcaagtgtgcacatgactgctttgataggcgacggactcaagaggggatcaccagctgtgtagagaactgtggtgtgcccgctctttctgccaacaatgttgttgagactgagatggccaagttccaggaaaggttgaatcgctcgttgatggtctgccaagataagtttgaagcagcaaagctccagaagatgaagacagacgcaaccaatgagctggagtcgtgcgtgaacaggtccatcgatgacagcatcagggtcctgccccatctggttgagcagatcaagtccaccattaacatgaagtagaggaatcagaaactttcaaattgtcccccggctcgtttttgccatcgttagctgaatctatccagagtctctagcagcactagtgtaacatgctcattactgccatgagaaccatgtctagagaagagttttttgctgagagattagtgcgtctaaatggcgccgcgataccagactaaatgttgcaaacgtagcttttgcataacatcttaaaatcttaaaatcttttttttttc

SEQ ID NO: 11387 - protein, 148 aa, Triticum aestivum
  misc_feature (1)..(148): Ceres Seq. ID no. 13598759
MDHVGSMEERIVADRIRKKLEEVNVAAQKHLEGVQDHVNFTLQKEYFKCAHDCFDRRRTQEGITSCVENCGVPALSANNVVETEMAKFQERLNRSLMVCQDKFEAAKLQKMKTDATNELESCVNRSIDDSIRVLPHLVEQIKSTINMK

SEQ ID NO: 11388 - protein, 142 aa, Triticum aestivum
  misc_feature (1)..(142): Ceres Seq. ID no. 13598760
MEERIVADRIRKKLEEVNVAAQKHLEGVQDHVNFTLQKEYFKCAHDCFDRRRTQEGITSCVENCGVPALSANNVVETEMAKFQERLNRSLMVCQDKFEAAKLQKMKTDATNELESCVNRSIDDSIRVLPHLVEQIKSTINMK

SEQ ID NO: 11389 - DNA, 1391 bp, Triticum aestivum
  misc_feature (1)..(1391): Ceres Seq. ID no. 13598761
gcaatccgatgaaccagcaaaaccgtggacgagcaccgccggtattctgctcccgaattccacagatttccactccccgctcccaaagccccgatactttatagccggcgacagcaagcccagcaaaatcccatctcccaacccggaaatcctcccactcccgggaatgaatcagcttccccttccccttctctgagatctcagcccgagcctgcgcgccgcgacttccaccggaatccttccctcctagccgcaacatcgccggatcgattcaggcattcttggtggccggagaagcagtctttggtcctctgcttgagatcatcatcagacatgtcgctgctatcgaaattgcggctggttactgtggatgtgactggtactctgcttgcttacaaaggacggcttggtgattactactgcatggctgctaaggctgctggaaagccatgccctgattatgatcgaatgcacgaaggcttcaagcttgcatacactgagatggcaaggaaatacccatgctttggatttgcggcaaagatgccaacgattgaatggtggaggatttgtgtcaaggattcatttgttaaggctgggtatgattacgatgatgagacatttgataaagtgttcaagcgaatttattccgcctttggctcctctgcgccatactctgtttttcctgatgcacagcccttcatgagagggctgagggaaaaggggatcacagttggaatcgtcagcaatgcagagtaccggtacaaagaggtcatcttgcctgcgttagggctgaatcagggctcagagtgggacttcggggtgttctcaggcatcgtcggtgtcgagaaacctgacccaaaaatctacaagatcgcgctggagatggcggggaacgtcgcaccggaagaggcgctccacattggcgacagctaccgcaaggactacgtccctgcacggagcatcgggatgcacgcgctgctcctggaccggttcaagaccgccgacgccgagagctggaggcagtccggcgcgccggtgctccctgatctcgaagccgcacaggcatggctcaccaagaacccgaccgaggaacccgctgaggagccactaggggccgcactgctgcgcaggatggccgagaagctctgaatctcgcccctgggatggttcctgttgtgctcttgctggggagtgagggagccaaggagaagggatgtgttgtagcgatggttcactggccagtttagctagctggagctacttgaactctggtagtaggcttccagtgctgttgttgactgctgaatgtggccaagtgattcagccgtgcgacaaacatcttgcaatgacgaataattctaatcatgtttcgcataatggaggaatttaac

SEQ ID NO: 11390 - protein, 271 aa, Triticum aestivum
  misc_feature (1)..(271): Ceres Seq. ID no. 13598762
MSLLSKLRLVTVDVTGTLLAYKGRLGDYYCMAAKAAGKPCPDYDRMHEGFKLAYTEMARKYPCFGFAAKMPTIEWWRICVKDSFVKAGYDYDDETFDKVFKRIYSAFGSSAPYSVFPDAQPFMRGLREKGITVGIVSNAEYRYKEVILPALGLNQGSEWDFGVFSGIVGVEKPDPKIYKIALEMAGNVAPEEALHIGDSYRKDYVPARSIGMHALLLDRFKTADAESWRQSGAPVLPDLEAAQAWLTKNPTEEPAEEPLGAALLRRMAEKL

SEQ ID NO: 11391 - protein, 241 aa, Triticum aestivum
  misc_feature (1)..(241): Ceres Seq. ID no. 13598763
MAAKAAGKPCPDYDRMHEGFKLAYTEMARKYPCFGFAAKMPTIEWWRICVKDSFVKAGYDYDDETFDKVFKRIYSAFGSSAPYSVFPDAQPFMRGLREKGITVGIVSNAEYRYKEVILPALGLNQGSEWDFGVFSGIVGVEKPDPKIYKIALEMAGNVAPEEALHIGDSYRKDYVPARSIGMHALLLDRFKTADAESWRQSGAPVLPDLEAAQAWLTKNPTEEPAEEPLGAALLRRMAEKL

SEQ ID NO: 11392 - protein, 226 aa, Triticum aestivum
  misc_feature (1)..(226): Ceres Seq. ID no. 13598764
MHEGFKLAYTEMARKYPCFGFAAKMPTIEWWRICVKDSFVKAGYDYDDETFDKVFKRIYSAFGSSAPYSVFPDAQPFMRGLREKGITVGIVSNAEYRYKEVILPALGLNQGSEWDFGVFSGIVGVEKPDPKIYKIALEMAGNVAPEEALHIGDSYRKDYVPARSIGMHALLLDRFKTADAESWRQSGAPVLPDLEAAQAWLTKNPTEEPAEEPLGAALLRRMAEKL

SEQ ID NO: 11393 - DNA, 1532 bp, Triticum aestivum
  misc_feature (1)..(1532): Ceres Seq. ID no. 13654122
aaagaaaggcttggcgaagaggttaacgaatcgatcttctccgagttttttgtcctcgaggaatttagcaccgctcgggattctcaggccatgatgatcggtgtcgcaggcttcagccggcacatcggccagctcttgagtaaaagcaacgggtttattgcggcgtccctgtccgcggcgagctgcgcggacgaggcggagaaggccgagggggcggggtgccgggacgacgcggcggcgctgaggctcaaatggattgccatggcggcgatactggtgtccggcgtgatgggcgtgggcctgtcgctcgtggggcggaagcggcggacggtgcagaccggcagcgctgtcttcgtggccgccaaggctttcgcggccggcgtgatcctggccacggggttcgttcacatgctgcacgacgccgagcacgcgctctccaacccctgcctcccggccgcgccctggcggcggttcccgttccccgggttcgtcgccatgctcgctgctcttgccacgctggtgctcgacgtcctggtcaccaggttctacgagaccaagcaccgtgcggaggtagctcgggtcaaggctgacgccgctgccgcactcgccgccgcgtccacctccgccagcgacgaagacatcaccgtggtcaccgtcgtcgagggtgagcacaaggtcccgctcttgcaagcccactcccattcccacgcgcagtcgcatggtcacgagctggtgcaaccacaaggacgcgagggggaggtgtcagaccacgtgcgctccgtcgtggtatcacagatactggaaatggggattgtgtcgcactcggtgatcattgggctgtcgcttggtgtgtctcggagcccctgcacaatcaggccactggtggcagcgctctcattccaccagttcttcgagggatttgccctcggtgggtgcattgcgcaggctcagtttaagaacctttcggcagttatgatggcgtccttttttgccattacaacaccaactggtatcgccgctggggccggtttgtcctcattttacaacgccaatagccccagggctctagtggtcgaaggcatcctcgactctgtgtcggccggcatactcatatacatggcgctggtggatctaatcgcagccgatttcttgggtgggaagatgacagggtcgccacggcagcaagtgatggcctatgtcgccctgttcctaggtgcgctctccatgtcatcgcttgcagtttgggcctgaaccggtttaatgagatgaaggtagcggatgacgcctacgtcccaacatactgcctgtgatacatgtacataactaatgcatgtgcctgtgttcatatgattgcatacatacatcagataacgtgcccttgtttttgatgggcatgagagaacagcgccggtggaaacgcctgagcattgcctctgtatatactagatgaatccccgtgcgttgctgcgggatattttgtgctaaaatttctaatgtggagagatacgccatgtaaagaaaaatagtgactt

SEQ ID NO: 11394 - protein, 416 aa, Triticum aestivum
  misc_feature (1)..(416): Ceres Seq. ID no. 13654123
KERLGEEVNESIFSEFFVLEEFSTARDSQAMMIGVAGFSRHIGQLLSKSNGFIAASLSAASCADEAEKAEGAGCRDDAAALRLKWIAMAAILVSGVMGVGLSLVGRKRRTVQTGSAVFVAAKAFAAGVILATGFVHMLHDAEHALSNPCLPAAPWRRFPFPGFVAMLAALATLVLDVLVTRFYETKHRAEVARVKADAAAALAAASTSASDEDITVVTVVEGEHKVPLLQAHSHSHAQSHGHELVQPQGREGEVSDHVRSVVVSQILEMGIVSHSVIIGLSLGVSRSPCTIRPLVAALSFHQFFEGFALGGCIAQAQFKNLSAVMMASFFAITTPTGIAAGAGLSSFYNANSPRALVVEGILDSVSAGILIYMALVDLIAADFLGGKMTGSPRQQVMAYVALFLGALSMSSLAVWA

SEQ ID NO: 11395 - protein, 386 aa, Triticum aestivum
  misc_feature (1)..(386): Ceres Seq. ID no. 13654124
MMIGVAGFSRHIGQLLSKSNGFIAASLSAASCADEAEKAEGAGCRDDAAALRLKWIAMAAILVSGVMGVGLSLVGRKRRTVQTGSAVFVAAKAFAAGVILATGFVHMLHDAEHALSNPCLPAAPWRRFPFPGFVAMLAALATLVLDVLVTRFYETKHRAEVARVKADAAAALAAASTSASDEDITVVTVVEGEHKVPLLQAHSHSHAQSHGHELVQPQGREGEVSDHVRSVVVSQILEMGIVSHSVIIGLSLGVSRSPCTIRPLVAALSFHQFFEGFALGGCIAQAQFKNLSAVMMASFFAITTPTGIAAGAGLSSFYNANSPRALVVEGILDSVSAGILIYMALVDLIAADFLGGKMTGSPRQQVMAYVALFLGALSMSSLAVWA

SEQ ID NO: 11396 - protein, 385 aa, Triticum aestivum
  misc_feature (1)..(385): Ceres Seq. ID no. 13654125
MIGVAGFSRHIGQLLSKSNGFIAASLSAASCADEAEKAEGAGCRDDAAALRLKWIAMAAILVSGVMGVGLSLVGRKRRTVQTGSAVFVAAKAFAAGVILATGFVHMLHDAEHALSNPCLPAAPWRRFPFPGFVAMLAALATLVLDVLVTRFYETKHRAEVARVKADAAAALAAASTSASDEDITVVTVVEGEHKVPLLQAHSHSHAQSHGHELVQPQGREGEVSDHVRSVVVSQILEMGIVSHSVIIGLSLGVSRSPCTIRPLVAALSFHQFFEGFALGGCIAQAQFKNLSAVMMASFFAITTPTGIAAGAGLSSFYNANSPRALVVEGILDSVSAGILIYMALVDLIAADFLGGKMTGSPRQQVMAYVALFLGALSMSSLAVWA

SEQ ID NO: 11397 - DNA, 1796 bp, Triticum aestivum
  misc_feature (1)..(1796): Ceres Seq. ID no. 13654142
aaactgcaaaattccccaacagacgaccatgaagcttcggctgcgttccatggacgcgcgcggcggcgtcgctgagacgcaccgcgtgcagctgccggacacggccgtgctcgccgatgtgaagtccttcctcgccgccaagctctccgccgcgcagcccgtccccgccgagtccgtccgcctctccctcaaccgctcgcaggagctctgttcaccggacccctcagccaccctcgccgccctcggcctcgcatccggtgacctcctctatttcacgctctccgcagaattattatcgcagccaccgcctcctcaaacacttccccggaaccctagcccggatacagcctccatcgggcaaattgcttccggttcccaatctcctggggaggccggtggatcctcgtcaccgccgcaaaatctacacatacagcctgtctcttcgtcgctgccgcaaaatctacacatagagcctatctcttcgccgaggccgcgagccctccacgtggagcctattttgcccgtggcatctgatccgcccgatgtggtgatggcggaggccgtccacgcacccaagagcttgtcgagccttgtgattgggattctcaagcgggagatggaggcggaggatgctggatgcgcaaatggtacagttatccatcgcctagctgtgtccctgcaggcagctcttgtcgatgctggcttccttgcggagaatccgatggggtctcgccccggattgctgaaggactgggcctcgggtgcagcggcaacactgaccgtaaagtacaccctaccggagcttgtcgccatgctacctgagggtgaagaggggaagacagtggttttgaactgctcattgatgccaaattttgtgatgatatatgggtgtgtgcctggggcatgctcagaagtgcgcagattgtgcttggagttaccaaagctggcgccgctgctatatctggatagcaatgaagtgggtgcaacagaggagaaggagattcttgagctttggagggtgctgaaggatgagctgtgtcttccgctgatgatatctttgtgccaactcaacgggttgcgcttgccgccgtgcttgatggcattgccaggtgatctgaaggctaaagtcttggagtttgttcctggtgttgatcttgcaagggttcagtgcgcatgcaaggaattgcaggatcttgcagcagatgataatctttggaagatgaggcttgaactggagatgagtccttctagcaagggttctggatggagcggagattggaagcaaaggtttgtggcagcttggaaggtggacaacagtaggaggcatcacaagagaccacccagcccaaggttttcgggctatggttgggggatcggtacacgtaacccacttaacttcccagtaattggtggtgattcggaccgtctgccctttataaatcacaatatccttgggcgtagttttggaaatcagcggaggaacatctcgcccaactgcaatttcgagggtcatcgccaagggtttccttgatttaagttttcactagtatctcaagtatgcaatgcataggctgccttgtacatgtttataagttgcatgccagtgctcttatcctcgtgaacttttttgtctgtatcttagatcctatgtcttgtcgttttccggttattccttgctatgacaccaaagtacttctgctctgatctagccaacgccatgatcaattatgtaataaatagtttggacttatggtactgagagcttaactttgctctctatacatgtttcggtatct

SEQ ID NO: 11398 - protein, 509 aa, Triticum aestivum
  misc_feature (1)..(509): Ceres Seq. ID no. 13654143
NCKIPQQTTMKLRLRSMDARGGVAETHRVQLPDTAVLADVKSFLAAKLSAAQPVPAESVRLSLNRSQELCSPDPSATLAALGLASGDLLYFTLSAELLSQPPPPQTLPRNPSPDTASIGQIASGSQSPGEAGGSSSPPQNLHIQPVSSSLPQNLHIEPISSPRPRALHVEPILPVASDPPDVVMAEAVHAPKSLSSLVIGILKREMEAEDAGCANGTVIHRLAVSLQAALVDAGFLAENPMGSRPGLLKDWASGAAATLTVKYTLPELVAMLPEGEEGKTVVLNCSLMPNFVMIYGCVPGACSEVRRLCLELPKLAPLLYLDSNEVGATEEKEILELWRVLKDELCLPLMISLCQLNGLRLPPCLMALPGDLKAKVLEFVPGVDLARVQCACKELQDLAADDNLWKMRLELEMSPSSKGSGWSGDWKQRFVAAWKVDNSRRHHKRPPSPRFSGYGWGIGTRNPLNFPVIGGDSDRLPFINHNILGRSFGNQRRNISPNCNFEGHRQGFP

SEQ ID NO: 11399 - protein, 500 aa, Triticum aestivum
  misc_feature (1)..(500): Ceres Seq. ID no. 13654144
MKLRLRSMDARGGVAETHRVQLPDTAVLADVKSFLAAKLSAAQPVPAESVRLSLNRSQELCSPDPSATLAALGLASGDLLYFTLSAELLSQPPPPQTLPRNPSPDTASIGQIASGSQSPGEAGGSSSPPQNLHIQPVSSSLPQNLHIEPISSPRPRALHVEPILPVASDPPDVVMAEAVHAPKSLSSLVIGILKREMEAEDAGCANGTVIHRLAVSLQAALVDAGFLAENPMGSRPGLLKDWASGAAATLTVKYTLPELVAMLPEGEEGKTVVLNCSLMPNFVMIYGCVPGACSEVRRLCLELPKLAPLLYLDSNEVGATEEKEILELWRVLKDELCLPLMISLCQLNGLRLPPCLMALPGDLKAKVLEFVPGVDLARVQCACKELQDLAADDNLWKMRLELEMSPSSKGSGWSGDWKQRFVAAWKVDNSRRHHKRPPSPRFSGYGWGIGTRNPLNFPVIGGDSDRLPFINHNILGRSFGNQRRNISPNCNFEGHRQGFP

SEQ ID NO: 11400 - protein, 493 aa, Triticum aestivum
  misc_feature (1)..(493): Ceres Seq. ID no. 13654145
MDARGGVAETHRVQLPDTAVLADVKSFLAAKLSAAQPVPAESVRLSLNRSQELCSPDPSATLAALGLASGDLLYFTLSAELLSQPPPPQTLPRNPSPDTASIGQIASGSQSPGEAGGSSSPPQNLHIQPVSSSLPQNLHIEPISSPRPRALHVEPILPVASDPPDVVMAEAVHAPKSLSSLVIGILKREMEAEDAGCANGTVIHRLAVSLQAALVDAGFLAENPMGSRPGLLKDWASGAAATLTVKYTLPELVAMLPEGEEGKTVVLNCSLMPNFVMIYGCVPGACSEVRRLCLELPKLAPLLYLDSNEVGATEEKEILELWRVLKDELCLPLMISLCQLNGLRLPPCLMALPGDLKAKVLEFVPGVDLARVQCACKELQDLAADDNLWKMRLELEMSPSSKGSGWSGDWKQRFVAAWKVDNSRRHHKRPPSPRFSGYGWGIGTRNPLNFPVIGGDSDRLPFINHNILGRSFGNQRRNISPNCNFEGHRQGFP

SEQ ID NO: 11401 - DNA, 1861 bp, Triticum aestivum
  misc_feature (1)..(1861): Ceres Seq. ID no. 13654166
aaactcgcttcccaatcccagctccttttatctatctatctattctgaggtgaggggtggggaggaggggattggctgcctgcaagcaatggcggtcaatgaggaggaggaggggacttcgccgctgctgatcaaggcggagcgccggcaccacccgggctgcccgggctgcgaccacgaccggaggaaggagctccgcaccgggctaccttacaaggaattctcctacgtctggatgatctgtcttaccaccgctttaccaatatcgtcactgttccccttcttgtatttcatgataagagacttgcatgttgcaaaaagaacagaagatattgggttctatgctgggtttgtaggtgcttcttttatgtttggtagatgtttgacttcaactctttggggaatagcagcagatcgtattgggaggaagcctgttgttgtgtttggcattctctctgtggtgatatttaatactttgtttgggcttagcgtcacctattggatggcaatagctacaaggtttctccttggcgctttaaatggcttacttggaccaatgaaggcttatgctattgaagtttgccgacctgaacatgaacctctagcactatcacttgtcagcacggcatggggaataggtctcatcattggtcctgctcttggaggctaccttgcactgcctgcagagaaatacccaaatatattttcacctgactcattatttggaaggttcccgtacttcttaccatgcttgtgcacatcagtctttgctgccattgttctgataagctgcatatggatgccggagacgttacacaagcataaagtcagtgatgatggaaatcaaagtgttgaagctttggaggcccatctgattgatccaaaagaggaggttggacaaagtaatagttcgaataccaagaagagcttattcaagaattggccattgatgtcatctataattgtttattgcgtcttctccttccacgatatggcttatacagaggtgttctctctatgggctgaaagtgacaggaagtatggtggactgagtttatcatctgaagatgtaggtcaaacacttgcaattacaggtgccagtcttcttgtgtatcaactatttatgtacccatccatcattaaagttcttggacctatcaaatcttctcagatcgcagctgttctgtgcatacctattctctttgcctacccctatatgacgtacctgtcaggacctggattatcgatcgtactgaatattgcatcagtcataaaaaataatcttggtgttactatcatcacaggcactttcatccttcaaaacaatgccgtgcctcagaaccaaagaggagcagcaaatggattagccatgactggaatgtcctttttcaaggcagttgcccctgcaggtgccggcattgtgttctcgtgggcgcagaaacgccagcatgctttcttctttccaggtgatcagatggtgttctttctgctaaacatcatcgagctccttggacttgtcctcacattcagacccttcctggccgtgccagagcagtatgaaagaaattagtctttattattatagaattttgtggattgttaatgagacgatgacgactcatgcggccccgcagctgcgaggagctcaagggcgcccttgcaccaggataagaggtgattacctgtacttgtgtgtaacatctatgttgtagcagcatctcagagtggaaggtggtgcatatatacatgtttgtctggtatatagatggtggtggccagttaagttggttgtttgccattagttaggtagcaacatttgtaaaactactgtacaatgcaagagactgtactagctgggaag

SEQ ID NO: 11402 - protein, 522 aa, Triticum aestivum
  misc_feature (1)..(522): Ceres Seq. ID no. 15219623
NSLPNPSSFYLSIYSEVRGGEEGIGCLQAMAVNEEEEGTSPLLIKAERRHHPGCPGCDHDRRKELRTGLPYKEFSYVWMICLTTALPISSLFPFLYFMIRDLHVAKRTEDIGFYAGFVGASFMFGRCLTSTLWGIAADRIGRKPVVVFGILSVVIFNTLFGLSVTYWMAIATRFLLGALNGLLGPMKAYAIEVCRPEHEPLALSLVSTAWGIGLIIGPALGGYLALPAEKYPNIFSPDSLFGRFPYFLPCLCTSVFAAIVLISCIWMPETLHKHKVSDDGNQSVEALEAHLIDPKEEVGQSNSSNTKKSLFKNWPLMSSIIVYCVFSFHDMAYTEVFSLWAESDRKYGGLSLSSEDVGQTLAITGASLLVYQLFMYPSIIKVLGPIKSSQIAAVLCIPILFAYPYMTYLSGPGLSIVLNIASVIKNNLGVTIITGTFILQNNAVPQNQRGAANGLAMTGMSFFKAVAPAGAGIVFSWAQKRQHAFFFPGDQMVFFLLNIIELLGLVLTFRPFLAVPEQYERN

SEQ ID NO: 11403 - protein, 493 aa, Triticum aestivum
  misc_feature (1)..(493): Ceres Seq. ID no. 15219624
MAVNEEEEGTSPLLIKAERRHHPGCPGCDHDRRKELRTGLPYKEFSYVWMICLTTALPISSLFPFLYFMIRDLHVAKRTEDIGFYAGFVGASFMFGRCLTSTLWGIAADRIGRKPVVVFGILSVVIFNTLFGLSVTYWMAIATRFLLGALNGLLGPMKAYAIEVCRPEHEPLALSLVSTAWGIGLIIGPALGGYLALPAEKYPNIFSPDSLFGRFPYFLPCLCTSVFAAIVLISCIWMPETLHKHKVSDDGNQSVEALEAHLIDPKEEVGQSNSSNTKKSLFKNWPLMSSIIVYCVFSFHDMAYTEVFSLWAESDRKYGGLSLSSEDVGQTLAITGASLLVYQLFMYPSIIKVLGPIKSSQIAAVLCIPILFAYPYMTYLSGPGLSIVLNIASVIKNNLGVTIITGTFILQNNAVPQNQRGAANGLAMTGMSFFKAVAPAGAGIVFSWAQKRQHAFFFPGDQMVFFLLNIIELLGLVLTFRPFLAVPEQYERN

SEQ ID NO: 11404 - protein, 444 aa, Triticum aestivum
  misc_feature (1)..(444): Ceres Seq. ID no. 15219625
MICLTTALPISSLFPFLYFMIRDLHVAKRTEDIGFYAGFVGASFMFGRCLTSTLWGIAADRIGRKPVVVFGILSVVIFNTLFGLSVTYWMAIATRFLLGALNGLLGPMKAYAIEVCRPEHEPLALSLVSTAWGIGLIIGPALGGYLALPAEKYPNIFSPDSLFGRFPYFLPCLCTSVFAAIVLISCIWMPETLHKHKVSDDGNQSVEALEAHLIDPKEEVGQSNSSNTKKSLFKNWPLMSSIIVYCVFSFHDMAYTEVFSLWAESDRKYGGLSLSSEDVGQTLAITGASLLVYQLFMYPSIIKVLGPIKSSQIAAVLCIPILFAYPYMTYLSGPGLSIVLNIASVIKNNLGVTIITGTFILQNNAVPQNQRGAANGLAMTGMSFFKAVAPAGAGIVFSWAQKRQHAFFFPGDQMVFFLLNIIELLGLVLTFRPFLAVPEQYERN

SEQ ID NO: 11405 - DNA, 899 bp, Triticum aestivum
  misc_feature (1)..(899): Ceres Seq. ID no. 13654167
cactcccctgtctgtctccaagtccaagatcacaccgcgctttcttccttccccgtcgccgatccagacgaagcgccgcacgccggttcccttcacccccgcccgccaacgtctccggccaggttggatccatggcggaaaagaaggtcgtgctgaagctggacctgcacgacgacaagcagaagcagagggctctcaaggtcgtctccactctccacggcatcgaccagatcgccgtggacatgaaggaccagaagatgacggtggtgggcaccgtcgaccccgtggacctcgtcggcaggctgcgcagcaagctcttccccacggcgcagatgctctccgtcggcccggccaaggaggagaagaaggacggcggcgccaagaaggacgacggcaagaaggatggcgacaagaaggagccgatcccggtgtacacgccgtggtacccgccgccgccgccgctgtaccacccgcacccgtactaccacaaccacagcgccgaggaggaccccagctcctgcgtcatctgctgatcggcgcgcgccgctcccttgtacattttgtagctggccgtgtgctctgctgcctgccggtcgaccatgcctgctacggtgatcgacggcgtgcaccatacttaaggccgtttaaggattttgcgccagtgatccggctgctgtgcttgtgcatctgcttagtttataaagtgcagatatggaatttattagtgtgtagtgtagaattactactagatagaactgctggagttggattttgagtgaaagttcaccgagtgctctgctctccaatgtgataacagagtagtgaaataattagattaagtgctctgctctctggtgtggaaagaaaatagtgaagcccaataaataaattgaaggtgc

SEQ ID NO: 11406 - protein, 257 aa, Triticum aestivum
  misc_feature (1)..(257): Ceres Seq. ID no. 13654168
TPLSVSKSKITPRFLPSPSPIQTKRRTPVPFTPARQRLRPGWIHGGKEGRAEAGPARRQAEAEGSQGRLHSPRHRPDRRGHEGPEDDGGGHRRPRGPRRQAAQQALPHGADALRRPGQGGEEGRRRQEGRRQEGWRQEGADPGVHAVVPAAAAAVPPAPVLPQPQRRGGPQLLRHLLIGARRSLVHFVAGRVLCCLPVDHACYGDRRRAPYLRPFKDFAPVIRLLCLCICLVYKVQIWNLLVCSVELLLDRTAGVGF

SEQ ID NO: 11407 - protein, 176 aa, Triticum aestivum
  misc_feature (1)..(176): Ceres Seq. ID no. 13654169
LPCLSPSPRSHRAFFLPRRRSRRSAARRFPSPPPANVSGQVGSMAEKKVVLKLDLHDDKQKQRALKVVSTLHGIDQIAVDMKDQKMTVVGTVDPVDLVGRLRSKLFPTAQMLSVGPAKEEKKDGGAKKDDGKKDGDKKEPIPVYTPWYPPPPPLYHPHPYYHNHSAEEDPSSCVIC

SEQ ID NO: 11408 - protein, 133 aa, Triticum aestivum
  misc_feature (1)..(133): Ceres Seq. ID no. 13654170
MAEKKVVLKLDLHDDKQKQRALKVVSTLHGIDQIAVDMKDQKMTVVGTVDPVDLVGRLRSKLFPTAQMLSVGPAKEEKKDGGAKKDDGKKDGDKKEPIPVYTPWYPPPPPLYHPHPYYHNHSAEEDPSSCVIC

SEQ ID NO: 11409 - DNA, 1335 bp, Triticum aestivum
  misc_feature (1)..(1335): Ceres Seq. ID no. 13654187
aaaaaccgcaacccccaccccaccccaccccaccccacccaccacagcaacgagggcaagcgtgcgtcaacatcagacgactcgtcccggattgtgattcgcggaggcgtttcccggcgcccagatgagctcacggatggccggatcggtcctcctccgccgcgccggcgccggcgccagccgcctcttcgccaccaccccgtctccggcggccagggccgtcctcggtggaggtgagggcgcgtgggtgcggctgatgtccacctccgcggcctcgcaggtcaaggacgaggcggccaaggcggtcaaggcggaggcggccaaggcggtcaaggcggaggcggccaagggcgacggggagaagaaggaggtggccatcagcagctactgggggatcgagcagtcgaagaagctggtgcgcgaggacggcaccgagtggaagtggtcttgcttcaggccatgggagacgtacaccgcggacacgtcgatcgatctgaccaagcaccacgtgcccaacacgatgctcgacaagatcgcctactacaccgtcaagtccctgcgcttccccaccgacatcttcttccagaggaggtatggctgccgcgcaatgatgctggagactgttgccgcagtgccggggatggtgggcggcatgctcctccacctgcgctcgctccggcgcttcgagcagagcggcggctggatccgcgcgctgctggaggaggccgagaacgagcgcatgcacctcatgaccttcatggaggtggcgcagcccaggtggtacgagcgcgccctcgtcatcgccgtccagggcgtcttcttcaacgcctacttcttcggctacctcatctcgcccaagttcgcgcaccgcgtcgtcgggtacctcgaggaggaggccgtccactcctacacggagttcctcaaggacctcgacgacggcaagatcgacaacgtccccgccccggccatcgccatcgactactggcgcctccctgccaacgccaccctcaaggacgtggtcaccgtggtgcgcgccgacgaggctcaccaccgcgacgtcaaccacttcgcatcggacgtgtactaccagggtatgcagctgaaggccaccccggccccgatcggataccactgaggctggccgtgttctgctgaattttgcatcgctactattactactactaccaagcaaatgagtgtttcgttttgaaggcagaggaaatgagagctctttagctgtataggatgttgcaattgttgctcgtttggtaactattccgtactgagaaataagcagtgtgcttgtcagttacgtatctaggatattgttgaacc

SEQ ID NO: 11410 - protein, 336 aa, Triticum aestivum
  misc_feature (1)..(336): Ceres Seq. ID no. 13654188
MSSRMAGSVLLRRAGAGASRLFATTPSPAARAVLGGGEGAWVRLMSTSAASQVKDEAAKAVKAEAAKAVKAEAAKGDGEKKEVAISSYWGIEQSKKLVREDGTEWKWSCFRPWETYTADTSIDLTKHHVPNTMLDKIAYYTVKSLRFPTDIFFQRRYGCRAMMLETVAAVPGMVGGMLLHLRSLRRFEQSGGWIRALLEEAENERMHLMTFMEVAQPRWYERALVIAVQGVFFNAYFFGYLISPKFAHRVVGYLEEEAVHSYTEFLKDLDDGKIDNVPAPAIAIDYWRLPANATLKDVVTVVRADEAHHRDVNHFASDVYYQGMQLKATPAPIGYH

SEQ ID NO: 11411 - protein, 332 aa, Triticum aestivum
  misc_feature (1)..(332): Ceres Seq. ID no. 13654189
MAGSVLLRRAGAGASRLFATTPSPAARAVLGGGEGAWVRLMSTSAASQVKDEAAKAVKAEAAKAVKAEAAKGDGEKKEVAISSYWGIEQSKKLVREDGTEWKWSCFRPWETYTADTSIDLTKHHVPNTMLDKIAYYTVKSLRFPTDIFFQRRYGCRAMMLETVAAVPGMVGGMLLHLRSLRRFEQSGGWIRALLEEAENERMHLMTFMEVAQPRWYERALVIAVQGVFFNAYFFGYLISPKFAHRVVGYLEEEAVHSYTEFLKDLDDGKIDNVPAPAIAIDYWRLPANATLKDVVTVVRADEAHHRDVNHFASDVYYQGMQLKATPAPIGYH

SEQ ID NO: 11412 - protein, 292 aa, Triticum aestivum
  misc_feature (1)..(292): Ceres Seq. ID no. 13654190
MSTSAASQVKDEAAKAVKAEAAKAVKAEAAKGDGEKKEVAISSYWGIEQSKKLVREDGTEWKWSCFRPWETYTADTSIDLTKHHVPNTMLDKIAYYTVKSLRFPTDIFFQRRYGCRAMMLETVAAVPGMVGGMLLHLRSLRRFEQSGGWIRALLEEAENERMHLMTFMEVAQPRWYERALVIAVQGVFFNAYFFGYLISPKFAHRVVGYLEEEAVHSYTEFLKDLDDGKIDNVPAPAIAIDYWRLPANATLKDVVTVVRADEAHHRDVNHFASDVYYQGMQLKATPAPIGYH

SEQ ID NO: 11413 - DNA, 1253 bp, Triticum aestivum
  misc_feature (1)..(1253): Ceres Seq. ID no. 13654231
cttatctcggcgccggagcccacgaccgcttccccgctcaccaccccaaccccgaaatatcccccaattccgacgcgaccgcggaaccctagccccccggcaatcttcgctggacccggagagccgctccggcgccatggcatccccggaaggatcaaactgggtattcgactgccccctcatggacgaccttgctgccgccgacttcgccgcggcatccgcaggaggcttctactggaccccgccgatgcagccgcagatgcacactcttgcgcaggccgtctccgccaccccggctcccaatccctgtgctgaaatcaatagctctgtttcggtggactgggaccatgccaaaggacaaccgaaaaataaacgtcctaggtcagaaactggtgctcaacctagctccaaagcatgcagggagaaagtgagaagggacaagctaaacgagaggttcttggaattgggtgctgtcttggatccggggaaaacacctaaaatcgacaaatgtgctatattaaatgatgctatccgtgcggtaactgaattgcgtagtgaagcagagaagttgaaggattccaatgagtctctccaagagaagattagagagctaaaggctgagaagaatgagctacgagatgagaagcaaaagttgaaggcggagaaagagagcctggagcagcagattaagttcatgaatgcccgtcagagcctcgtaccacacccttctgtcatcccagctgctgcattcgctgccgcccaaggccaagcggcagggcacaagctgatgatgcctgtgatgagctacccaggatttcccatgtggcagttcatgccgccttcagatgttgatacctccgatgaccccaagtcatgccctccggttgcataagccagcaaaaatcatttgcctcatctatctcatggggaaggatggctaaaaagccgtccgttaaattatatcttagtcgtcagtgttactatgcagaagccgtttagtgttactatatgtagttaaatcaagaaccgaactgaagcgtcgtcgttgtatcacccgggaacatttgattatcttgtgaaaccgttgtatattgttagtaaataaataccatccgttgaagcaaatggcgcttggacgccatagcattaccgacttgttactttgttcgacatgttgcccgtgatttttgacctataacataaatatgttgtgctgcaggtcaaaataaaaataaaaatatataggttgtgct

SEQ ID NO: 11414 - protein, 296 aa, Triticum aestivum
  misc_feature (1)..(296): Ceres Seq. ID no. 13654232
LSRRRSPRPLPRSPPQPRNIPQFRRDRGTLAPRQSSLDPESRSGAMASPEGSNWVFDCPLMDDLAAADFAAASAGGFYWTPPMQPQMHTLAQAVSATPAPNPCAEINSSVSVDWDHAKGQPKNKRPRSETGAQPSSKACREKVRRDKLNERFLELGAVLDPGKTPKIDKCAILNDAIRAVTELRSEAEKLKDSNESLQEKIRELKAEKNELRDEKQKLKAEKESLEQQIKFMNARQSLVPHPSVIPAAAFAAAQGQAAGHKLMMPVMSYPGFPMWQFMPPSDVDTSDDPKSCPPVA

SEQ ID NO: 11415 - protein, 251 aa, Triticum aestivum
  misc_feature (1)..(251): Ceres Seq. ID no. 13654233
MASPEGSNWVFDCPLMDDLAAADFAAASAGGFYWTPPMQPQMHTLAQAVSATPAPNPCAEINSSVSVDWDHAKGQPKNKRPRSETGAQPSSKACREKVRRDKLNERFLELGAVLDPGKTPKIDKCAILNDAIRAVTELRSEAEKLKDSNESLQEKIRELKAEKNELRDEKQKLKAEKESLEQQIKFMNARQSLVPHPSVIPAAAFAAAQGQAAGHKLMMPVMSYPGFPMWQFMPPSDVDTSDDPKSCPPVA

SEQ ID NO: 11416 - protein, 236 aa, Triticum aestivum
  misc_feature (1)..(236): Ceres Seq. ID no. 13654234
MDDLAAADFAAASAGGFYWTPPMQPQMHTLAQAVSATPAPNPCAEINSSVSVDWDHAKGQPKNKRPRSETGAQPSSKACREKVRRDKLNERFLELGAVLDPGKTPKIDKCAILNDAIRAVTELRSEAEKLKDSNESLQEKIRELKAEKNELRDEKQKLKAEKESLEQQIKFMNARQSLVPHPSVIPAAAFAAAQGQAAGHKLMMPVMSYPGFPMWQFMPPSDVDTSDDPKSCPPVA

SEQ ID NO: 11417 - DNA, 1517 bp, Triticum aestivum
  misc_feature (1)..(1517): Ceres Seq. ID no. 13654241
atggcatgcgctatatcttcctccccaaagtttgtcggaattacaaaacagcccccgtactcttcctccccacctctcgcctaccgttcgcgtcctccgcccgaggcctccacgggagcgccggagcgcacgcctgatctccccgcctcctcctcccggcaccgcggccccggctcctagcccgcctcacgatcgggggacgaggcacgagtaggagggcgagggtgcgaggagatgcagagggaccgaggcgtctcggcggccgctgggggcgccggtgagaggaagcggataggcgaggcgatggacaggtcctccccgtcgacgtcctgggggttctccggcggacgcgagagggaccggatcgccgccggcaagcagccggaggtgccccgctccggcggcggatccaccgccatgtccaagggcaagttgtccgatggagaatcggatactgacagtgaagaatcagatctcagtggttctgatggagaagatacatcgtggatttcatggttctgtagcttgcgaggcaatgagtttttctgtgaagttgatgacgattacatacaagacgatttcaatctctgtgggctaagcggtcaagttccatattatgaatatgctcttgatctgatattggatgtcgagtcttcacatggtgatatgttcacagaagagcagaatgaacttattgaatcagctgctgagatgctttatggattgattcatgttcgatatattcttacaagtaaaggattggctgcaatgttggataaatacaagaattatgactttggcagatgtccaagagtgcactgcagcggccagccatgccttccagttggccagtcggacattcctcgttctagtaatgtgaaaatttactgcccaaagtgtgaagatctctactatccgagatccaaatatcaaagcaacattgacggagcttactttgggacaacgtttcctcacttgtttctgatgacgtacccacatttgaagccccagaaaccgtcacagcagtacgtccccaaggtttttggcttcaaacttcataagccataacaagtttgaagactgaaggtgcaaaaggttcatagcagagttgtctgatatgtcacgctgcacatcacttccaagctgctcatttgtgcgcgtggcgcagtttagcacttggttcagttggttacccgtggcttggccgaaaccgacctgacctctggctgatttcccttgtcctccgttttcgctctcgcctgacgttctgatttgatccttgtggcttgtttagtgtagtagatttcttctatcctgttctttatactcattattatatttgagtttggcagttgctaaaagaaggcagttcgtaacagtgttatgtctctgctgtgtatttttcattttgttttacattaggttcctttgccaaaatgtgatggtaatggtaatctgaaacattcgatccggctattcttattcttcacctgcaactgagtttgtatggaaagttt

SEQ ID NO: 11418 - protein, 277 aa, Triticum aestivum
  misc_feature (1)..(277): Ceres Seq. ID no. 13654242
MQRDRGVSAAAGGAGERKRIGEAMDRSSPSTSWGFSGGRERDRIAAGKQPEVPRSGGGSTAMSKGKLSDGESDTDSEESDLSGSDGEDTSWISWFCSLRGNEFFCEVDDDYIQDDFNLCGLSGQVPYYEYALDLILDVESSHGDMFTEEQNELIESAAEMLYGLIHVRYILTSKGLAAMLDKYKNYDFGRCPRVHCSGQPCLPVGQSDIPRSSNVKIYCPKCEDLYYPRSKYQSNIDGAYFGTTFPHLFLMTYPHLKPQKPSQQYVPKVFGFKLHKP

SEQ ID NO: 11419 - protein, 254 aa, Triticum aestivum
  misc_feature (1)..(254): Ceres Seq. ID no. 13654243
MDRSSPSTSWGFSGGRERDRIAAGKQPEVPRSGGGSTAMSKGKLSDGESDTDSEESDLSGSDGEDTSWISWFCSLRGNEFFCEVDDDYIQDDFNLCGLSGQVPYYEYALDLILDVESSHGDMFTEEQNELIESAAEMLYGLIHVRYILTSKGLAAMLDKYKNYDFGRCPRVHCSGQPCLPVGQSDIPRSSNVKIYCPKCEDLYYPRSKYQSNIDGAYFGTTFPHLFLMTYPHLKPQKPSQQYVPKVFGFKLHKP

SEQ ID NO: 11420 - protein, 216 aa, Triticum aestivum
  misc_feature (1)..(216): Ceres Seq. ID no. 13654244
MSKGKLSDGESDTDSEESDLSGSDGEDTSWISWFCSLRGNEFFCEVDDDYIQDDFNLCGLSGQVPYYEYALDLILDVESSHGDMFTEEQNELIESAAEMLYGLIHVRYILTSKGLAAMLDKYKNYDFGRCPRVHCSGQPCLPVGQSDIPRSSNVKIYCPKCEDLYYPRSKYQSNIDGAYFGTTFPHLFLMTYPHLKPQKPSQQYVPKVFGFKLHKP

SEQ ID NO: 11421 - DNA, 462 bp, Triticum aestivum
  misc_feature (1)..(462): Ceres Seq. ID no. 13654250
cccaaaccccatccatcccttcctcctcccgagcagcctcctcgccgacgaaagtgccggagagctttccagaaggtcagggggagggatgggcgagttcgacgactactgggcgcgggcgtacaggggcgaccccgcggtgccgcactccgacccgcagcggctcatctccacctggaccggcgccttcnccctcggcgccgccgcctgcgtccaccaccacgtctccggcctcgcctccaacatcaagtcccttccccacagctggcangacatgacaatgatgctcgatcagaagcgctggaagaaaattcttgacaagaagcagcaacaagcttaagttccataaccttcaccgnttgggccacagttggaagagctttctatcttgctngttgggcatggcanaggaagttcttgcatcagtntggtattaggatagagtttttctacctcttgttt

SEQ ID NO: 11422 - protein, 112 aa, Triticum aestivum
  misc_feature (1)..(112): Ceres Seq. ID no. 13654251
  misc_feature (64)..(64): Xaa is any aa, unknown or other
  misc_feature (90)..(90): Xaa is any aa, unknown or other
PNPIHPFLLPSSLLADESAGELSRRSGGGMGEFDDYWARAYRGDPAVPHSDPQRLISTWTGAFXLGAAACVHHHVSGLASNIKSLPHSWXDMTMMLDQKRWKKILDKKQQQA

SEQ ID NO: 11423 - protein, 105 aa, Triticum aestivum
  misc_feature (1)..(105): Ceres Seq. ID no. 13654252
  misc_feature (64)..(64): Xaa is any aa, unknown or other
  misc_feature (91)..(91): Xaa is any aa, unknown or other
PKPHPSLPPPEQPPRRRKCRRAFQKVRGRDGRVRRLLGAGVQGRPRGAALRPAAAHLHLDRRLXPRRRRLRPPPRLRPRLQHQVPSPQLAXHDNDARSEALEENS

SEQ ID NO: 11424 - protein, 91 aa, Triticum aestivum
  misc_feature (1)..(91): Ceres Seq. ID no. 13654253
  misc_feature (63)..(63): Xaa is any aa, unknown or other
  misc_feature (90)..(90): Xaa is any aa, unknown or other
QTPSIPSSSRAASSPTKVPESFPEGQGEGWASSTTTGRGRTGATPRCRTPTRSGSSPPGPAPXPSAPPPASTTTSPASPPTSSPFPTAGXT

SEQ ID NO: 11425 - protein, 83 aa, Triticum aestivum
  misc_feature (1)..(83): Ceres Seq. ID no. 13654254
  misc_feature (35)..(35): Xaa is any aa, unknown or other
  misc_feature (61)..(61): Xaa is any aa, unknown or other
MGEFDDYWARAYRGDPAVPHSDPQRLISTWTGAFXLGAAACVHHHVSGLASNIKSLPHSWXDMTMMLDQKRWKKILDKKQQQA

SEQ ID NO: 11426 - DNA, 1634 bp, Triticum aestivum
  misc_feature (1)..(1634): Ceres Seq. ID no. 13654273
atgtttcgtgaatacagtgaccaaactgaaccctagagccaagtttagttactgtagatgtaattttctccgatgctccagatacgcctgagcaggatcggctcgtcggactccggggccgcggcctctggcgcggcggctggggcgtccggtggcgccccggcgaagtccgccgccgcggcggctggcggtgccccggagtcggtgactgtcgcttgccccgaccacctggtcatcgcagacctcgccgtggcgaagagcctcggcgccgtcacaaactccgccatcgctgcgacgcgcgccatcggccgccgctcccgccggcccctcggcgagcgcgtccacatctgctcccgctgcgagttccccatcgccattaatggccgcctcatttcttgcgaacatgcattctgtttagcctgtgcaagaagtgattccagctgctatctttgtgatgagcgcattcagaagattcagactgtgaaaatgatggaagggatttttatctgcgctgcacctatgtgcctcaagtctttccttaagaaagcggaatttatgactcatgtacctgaagctcatgcaaatctcctccaaactaacacggagaaggaagaacgtaatgaaccagatgctcctaacatctcccgtgcttctggaggagatgctcaaaggcaatctcaaatgcctgagatatctaccgcacgtgctcctccaaggcggggtgtttcacccacttcaagttctcacatgcaagagcgtgaagaccgatctcggtatcaccagtccagggagagggagcacaccccactaaggccccctatgctaagcaaaccaccatcattccatggtcgccactatccaccaggtgatactcggtccgaaaacaacacacctcaaggatttgaccgttcttacagctgggcccatgatggtacacctggtgcaactccacttcgccaagaacctgaccatggtactcaagacaagcagcaagtgatgcctaattcacctttcatgttctctccaatgcatcctcatcagcaaaacttcatgatgcatatgaatatgaatcagcctttaatccccagctcatcattcagctaccctgtccaacaagatgggaatccgcagtacttcagtgctcctttccagatgcaactgcaagatgccggatcagatcaaggttcagcgtcggtgcctgaggggcttcagcgcccatggggcatggggttgatgggcaatccatctcagggaggtggcggcatggccttcatgccaactggtttcgggatgatgccagacagctcgatgaatccaggcatgcaaggtagggattttcaaggccaagctgatcgtggcgacggaaggggcatccaagaacagttacctatggtgatgcaaatgcagatgtcgctccccccacctccccctacacaacccccgtccgctggacagcagtctttcaacagaacttgatgagttttttgcgtgccaattttatggctgctgccaaaatcgtgctgtactgcgttgggaaattgcaattttgccaccttggcatgtaactgatgagcactcgatggcagcctatgttgtgctaaaaacgatgcaatttaatctgagttgtcatatgc

SEQ ID NO: 11427 - protein, 467 aa, Triticum aestivum
  misc_feature (1)..(467): Ceres Seq. ID no. 13654274
MLQIRLSRIGSSDSGAAASGAAAGASGGAPAKSAAAAAGGAPESVTVACPDHLVIADLAVAKSLGAVTNSAIAATRAIGRRSRRPLGERVHICSRCEFPIAINGRLISCEHAFCLACARSDSSCYLCDERIQKIQTVKMMEGIFICAAPMCLKSFLKKAEFMTHVPEAHANLLQTNTEKEERNEPDAPNISRASGGDAQRQSQMPEISTARAPPRRGVSPTSSSHMQEREDRSRYHQSREREHTPLRPPMLSKPPSFHGRHYPPGDTRSENNTPQGFDRSYSWAHDGTPGATPLRQEPDHGTQDKQQVMPNSPFMFSPMHPHQQNFMMHMNMNQPLIPSSSFSYPVQQDGNPQYFSAPFQMQLQDAGSDQGSASVPEGLQRPWGMGLMGNPSQGGGGMAFMPTGFGMMPDSSMNPGMQGRDFQGQADRGDGRGIQEQLPMVMQMQMSLPPPPPTQPPSAGQQSFNRT

SEQ ID NO: 11428 - protein, 329 aa, Triticum aestivum
  misc_feature (1)..(329): Ceres Seq. ID no. 13654275
MMEGIFICAAPMCLKSFLKKAEFMTHVPEAHANLLQTNTEKEERNEPDAPNISRASGGDAQRQSQMPEISTARAPPRRGVSPTSSSHMQEREDRSRYHQSREREHTPLRPPMLSKPPSFHGRHYPPGDTRSENNTPQGFDRSYSWAHDGTPGATPLRQEPDHGTQDKQQVMPNSPFMFSPMHPHQQNFMMHMNMNQPLIPSSSFSYPVQQDGNPQYFSAPFQMQLQDAGSDQGSASVPEGLQRPWGMGLMGNPSQGGGGMAFMPTGFGMMPDSSMNPGMQGRDFQGQADRGDGRGIQEQLPMVMQMQMSLPPPPPTQPPSAGQQSFNRT

SEQ ID NO: 11429 - protein, 328 aa, Triticum aestivum
  misc_feature (1)..(328): Ceres Seq. ID no. 13654276
MEGIFICAAPMCLKSFLKKAEFMTHVPEAHANLLQTNTEKEERNEPDAPNISRASGGDAQRQSQMPEISTARAPPRRGVSPTSSSHMQEREDRSRYHQSREREHTPLRPPMLSKPPSFHGRHYPPGDTRSENNTPQGFDRSYSWAHDGTPGATPLRQEPDHGTQDKQQVMPNSPFMFSPMHPHQQNFMMHMNMNQPLIPSSSFSYPVQQDGNPQYFSAPFQMQLQDAGSDQGSASVPEGLQRPWGMGLMGNPSQGGGGMAFMPTGFGMMPDSSMNPGMQGRDFQGQADRGDGRGIQEQLPMVMQMQMSLPPPPPTQPPSAGQQSFNRT

SEQ ID NO: 11430 - DNA, 1443 bp, Triticum aestivum
  misc_feature (1)..(1443): Ceres Seq. ID no. 13654285
agaacatcctaatcgaaaaaacttcccccaaccaaaagacagcaccgtgtgttctcgtgtgtatatgtctatggcctaatcgagaccatggacgttaccggggacgccggtggaggtcgccgccccaacttccccctgcagctcctcgagaagaaggaggagcatccgtgctccatctccccggctgctgggctcgggacgaatgggtcggcgacgggggagctgcaggtgcggaaggcggcaccgcctaagcggaccacgagcaaggaccggcatacgaaggtggacgggcgcggccgccgcatccggatgccggcgatctgcgcggcgcgggtgttccagctgacgcgggaactggggcacaagacggacggcgagaccatcgagtggctcctgcagcaggcggagcccgctgtgattgcggccaccggcacaggcaccatcccggccaacttcacatctctcaacatctccctccgctcctccggctccatgctctccaccatacccgcccacctccgcgccgccggcctgccggggtctcgctttggaggtggcccatgggcggacgcgtgggaccgcttcgtcggtctcgggttcggcggtggcctcgagagcccggcctccaccaccacctcgtcgtcgtccccgctgctgctgagcttccactccggaagcgtcggcctcgacgtttcgccgtcgtcggcgacggctgcggccaacacggaactgtccaggaagcggcgttgggagcaagaaatgcagcagcagcagcaacaacatcatcaccaccaacagcaacagcagcaacagtaccagcaacagatggccgggtacacgcagagccaaatgccgggcactgtgtggatggtgccgacgagcaacgcccaggccgccggagcggcgcctgccggtggcggcgagtcgatctggacgttcccgcaacccggaagcggcggcggcggcggctcggcgaccgtgtaccgcggcgtgccgagcgggctacatttcatgaacatccccgcgccgatggcagtgcacgcgcagcagctgggactcggccaggccggcggcggcggatcagcagcagcgggcgaggggcacatggggatcctcgccgcgctcaacgcgtaccgtgggcagcatgcagcggcgtcggaggtcaccgtggcggggcacaatggagcagctgaagggactactcaccatcaacatcagaatcagcatcagcatctgcagcacgggggtggcgagccgaacgagagcatgagcggcagcgactcgtaggacttcgtgaccgctggtccgttcgacagctttggcttaccaattttcgtctttggatttgttcttctttggtttgtttctgttcttgactcgatcgcttgttatggctttgttccttctccaaattcttgcacggttcatacgattgcaacttgc

SEQ ID NO: 11431 - protein, 399 aa, Triticum aestivum
  misc_feature (1)..(399): Ceres Seq. ID no. 15219637
MDVTGDAGGGRRPNFPLQLLEKKEEHPCSISPAAGLGTNGSATGELQVRKAAPPKRTTSKDRHTKVDGRGRRIRMPAICAARVFQLTRELGHKTDGETIEWLLQQAEPAVIAATGTGTIPANFTSLNISLRSSGSMLSTIPAHLRAAGLPGSRFGGGPWADAWDRFVGLGFGGGLESPASTTTSSSSPLLLSFHSGSVGLDVSPSSATAAANTELSRKRRWEQEMQQQQQQHHHHQQQQQQQYQQQMAGYTQSQMPGTVWMVPTSNAQAAGAAPAGGGESIWTFPQPGSGGGGGSATVYRGVPSGLHFMNIPAPMAVHAQQLGLGQAGGGGSAAAGEGHMGILAALNAYRGQHAAASEVTVAGHNGAAEGTTHHQHQNQHQHLQHGGGEPNESMSGSDS

SEQ ID NO: 11432 - protein, 325 aa, Triticum aestivum
  misc_feature (1)..(325): Ceres Seq. ID no. 15219638
MPAICAARVFQLTRELGHKTDGETIEWLLQQAEPAVIAATGTGTIPANFTSLNISLRSSGSMLSTIPAHLRAAGLPGSRFGGGPWADAWDRFVGLGFGGGLESPASTTTSSSSPLLLSFHSGSVGLDVSPSSATAAANTELSRKRRWEQEMQQQQQQHHHHQQQQQQQYQQQMAGYTQSQMPGTVWMVPTSNAQAAGAAPAGGGESIWTFPQPGSGGGGGSATVYRGVPSGLHFMNIPAPMAVHAQQLGLGQAGGGGSAAAGEGHMGILAALNAYRGQHAAASEVTVAGHNGAAEGTTHHQHQNQHQHLQHGGGEPNESMSGSDS

SEQ ID NO: 11433 - protein, 264 aa, Triticum aestivum
  misc_feature (1)..(264): Ceres Seq. ID no. 15219639
MLSTIPAHLRAAGLPGSRFGGGPWADAWDRFVGLGFGGGLESPASTTTSSSSPLLLSFHSGSVGLDVSPSSATAAANTELSRKRRWEQEMQQQQQQHHHHQQQQQQQYQQQMAGYTQSQMPGTVWMVPTSNAQAAGAAPAGGGESIWTFPQPGSGGGGGSATVYRGVPSGLHFMNIPAPMAVHAQQLGLGQAGGGGSAAAGEGHMGILAALNAYRGQHAAASEVTVAGHNGAAEGTTHHQHQNQHQHLQHGGGEPNESMSGSDS

SEQ ID NO: 11434 - DNA, 1451 bp, Triticum aestivum
  misc_feature (1)..(1451): Ceres Seq. ID no. 13654402
agtgattgggcacacccttctataaacgggacccaagggacgcagtttctcatcgccccgtccagaacctttctccttctgtcccgcaaacccccgagagatcacagcatgttcggcttcggtcaccacggccaccatggccagaacccccctgccaacgctccggccgccggcggcggcaaccagcccaccttcaagatcttctgcaaggccgacgagggctactgcctctccgtccgcgacggcaacgtcgtcctcgccccctccaacccccgcgacgagcaccagcactggttcaaggacatgcgcttcagcacccagatcaaggacgaggaaggtaaccccgccttcgccatcgtcaacaaggccactggtctcgccgtcaagcactccctcggccagtcccacccggtgaagctcgtgccattcaacccggagtacctcgacgagtccgtgatgtggacggagagcggcgacgtcggcaagggcttccgctgcattcgcatggtgaacaacatccgcctcaactttgacgccctcaacggcgacaaggaccacggcggcgtgcacgacggcaccaccgtcgtcctctgggagtgggccaagggcgacaaccagagctggaagatcctcccctggggcgaagaggcctacgccggaggcagcgccaacgccccccgcggcggctccacagagcccaccgtgcgcatcttctgcaaggccgacgacggcttcagcgccaccgttcgcaacggcgctgtggtcctcgcgcccaccaacccccgcgacgagtaccagcactggttcaaggacatgaggcacagcaaccgcatcaaggatgaggaaggctacccggccttcgccctcgtcaacaaggtgacaggcgaggccatcaagcactcccaaggcgagggccacccggtgaagctggtgccatacaacgccaactaccaggacgagtcagtgttgtggactgagagccgcgacgtgggcgccggcttccggtgcatccgcatggtgaacaacatctacctcaactttgacgctctccacggcgacaaggagcacggcggcgtgcgcgacggcacctccctcgtgctgtggaagtggtgtgagggcgacaaccagcgctggaagatcctcccctggtaaacgtgtcatgctgctgaagctgagttgatcgccaccgtgacccggagtttggtagagatcggcctgtgatctgttgccgtgtcggtagaataaaagtcgtgtgcggtcggcggtggtgatgtgtccgtgagtgtgtgtgcttagtttctgtcctgtcgttgtgtcctgctatggcgagctatccgatgtaataagcatttggcacttgtgcttgtttttcaaaccatggatccgtgatgacaacctctgtactgtggtgcaatcctttcatctatgcgaatggtctttattgcggtttt

SEQ ID NO: 11435 - protein, 383 aa, Triticum aestivum
  misc_feature (1)..(383): Ceres Seq. ID no. 13654403
SDWAHPSINGTQGTQFLIAPSRTFLLLSRKPPRDHSMFGFGHHGHHGQNPPANAPAAGGGNQPTFKIFCKADEGYCLSVRDGNVVLAPSNPRDEHQHWFKDMRFSTQIKDEEGNPAFAIVNKATGLAVKHSLGQSHPVKLVPFNPEYLDESVMWTESGDVGKGFRCIRMVNNIRLNFDALNGDKDHGGVHDGTTVVLWEWAKGDNQSWKILPWGEEAYAGGSANAPRGGSTEPTVRIFCKADDGFSATVRNGAVVLAPTNPRDEYQHWFKDMRHSNRIKDEEGYPAFALVNKVTGEAIKHSQGEGHPVKLVPYNANYQDESVLWTESRDVGAGFRCIRMVNNIYLNFDALHGDKEHGGVRDGTSLVLWKWCEGDNQRWKILPW

SEQ ID NO: 11436 - protein, 347 aa, Triticum aestivum
  misc_feature (1)..(347): Ceres Seq. ID no. 13654404
MFGFGHHGHHGQNPPANAPAAGGGNQPTFKIFCKADEGYCLSVRDGNVVLAPSNPRDEHQHWFKDMRFSTQIKDEEGNPAFAIVNKATGLAVKHSLGQSHPVKLVPFNPEYLDESVMWTESGDVGKGFRCIRMVNNIRLNFDALNGDKDHGGVHDGTTVVLWEWAKGDNQSWKILPWGEEAYAGGSANAPRGGSTEPTVRIFCKADDGFSATVRNGAVVLAPTNPRDEYQHWFKDMRHSNRIKDEEGYPAFALVNKVTGEAIKHSQGEGHPVKLVPYNANYQDESVLWTESRDVGAGFRCIRMVNNIYLNFDALHGDKEHGGVRDGTSLVLWKWCEGDNQRWKILPW

SEQ ID NO: 11437 - protein, 282 aa, Triticum aestivum
  misc_feature (1)..(282): Ceres Seq. ID no. 13654405
MRFSTQIKDEEGNPAFAIVNKATGLAVKHSLGQSHPVKLVPFNPEYLDESVMWTESGDVGKGFRCIRMVNNIRLNFDALNGDKDHGGVHDGTTVVLWEWAKGDNQSWKILPWGEEAYAGGSANAPRGGSTEPTVRIFCKADDGFSATVRNGAVVLAPTNPRDEYQHWFKDMRHSNRIKDEEGYPAFALVNKVTGEAIKHSQGEGHPVKLVPYNANYQDESVLWTESRDVGAGFRCIRMVNNIYLNFDALHGDKEHGGVRDGTSLVLWKWCEGDNQRWKILPW

SEQ ID NO: 11438 - DNA, 548 bp, Triticum aestivum
  misc_feature (1)..(548): Ceres Seq. ID no. 13654415
aaaaaaaagtggggcgaggaagaaaccgaaacactcacacagaacaccacaccccccaccccggcgacacaccacccctcccgccccaaatctcagatcagagcgccgggagatctgccatttccgggtggagggatcgagccccgcgcttctcgattaaatcctgggctctgtatcttgtgtggatggcatttgtgcctcagagactgtagctcaccaagtgttgatttgaacctgtgaagatagagatgggttctccgagaaaatccgacaagaaggccgccttagactttgcagcatggggtttcaatatcacctcatccgttgggatcatcatggtcaacaaagccctaatggctacacatggattcagttttgccacaacattaactggccttcatttattgacaacgaccttgatgactattgtgtttcggtggttaggcctgagccagccctctcacttaccgctaccagatctgattaagttcgtaatcttttcaaatttgtcgatcgttggcatgaatgtgagcttgatgtggaattct

SEQ ID NO: 11439 - protein, 100 aa, Triticum aestivum
  misc_feature (1)..(100): Ceres Seq. ID no. 13654416
MGSPRKSDKKAALDFAAWGFNITSSVGIIMVNKALMATHGFSFATTLTGLHLLTTTLMTIVFRWLGLSQPSHLPLPDLIKFVIFSNLSIVGMNVSLMWNS

SEQ ID NO: 11440 - protein, 79 aa, Triticum aestivum
  misc_feature (1)..(79): Ceres Seq. ID no. 13654417
KKKWGEEETETLTQNTTPPTPATHHPSRPKSQIRAPGDLPFPGGGIEPRASRLNPGLCILCGWHLCLRDCSSPSVDLNL

SEQ ID NO: 11441 - protein, 71 aa, Triticum aestivum
  misc_feature (1)..(71): Ceres Seq. ID no. 13654418
MVNKALMATHGFSFATTLTGLHLLTTTLMTIVFRWLGLSQPSHLPLPDLIKFVIFSNLSIVGMNVSLMWNS

SEQ ID NO: 11442 - DNA, 1419 bp, Triticum aestivum
  misc_feature (1)..(1419): Ceres Seq. ID no. 13654452
acacacacacagcgcaacgcctcccagctcgactccacgtgctgccgccgccgccggcgtagacctcccgttggccgccatggacccgcgcttccagctgcccactccggtgccgtcctccggcggcgctggtgtgcgagggcaccaccggcgggcccattcggagacgtttctgcgcttccccgacaccgacctcttcctcgaccccgatggagacttctccttctccgacctcgacttcccatccctctccgacgactccccggcggtctccgacccgaccccgcctcctcccccgccgatggcggccagctcgtcccagacaccggctccccgtccaccgggcgggacccacaacaggagcctctcccttgacgccgccttcttcgagggcctcgccttgcaggggggaggaggcgggggttgtggtggccataagaggagcgggtccatggatggggtgaactcgccgttcgaaggcgagtcggcgctgtcgggcgggctggactacgccaagaaggccatgccggccgagaggatcgccgagctagctctccttgaccccaaacgcgcaaagaggattttggcaaaccggcagtcggcagcgaggtcgaaggagaggaagatcaagtataccggtgagctagagaggaaggtccagacactgcagaccgaggccactacgctatcagcacagcttacacttctccagagggatacttctggtttaactaccgagaatagagaactcaaacttcggttgcagtccatggaggagcaagctaaactacgggatgctctaaatgacgctctgcgagaagaagtccagcggcttaagatagctgcagggcaagctccaaaaatgaatgggagtcaattcaacggcggactccagcagattccatcctatttctctcagcaacaccagcgacagcagcagcagcagcatcaacaacagatggcttacttaggtgggcaccaagctcagcgtcaccatccaaaccatcaccagagcccatcgaatggtggccagtcgctgagtggtctgtccctagacgactccatggatttcatttgaggaacactagggccctcctattaaatcatacaccaactgcaactcagcattgtacagatagctaatgtactatctatgcatatgaatcattggtagggtagctagcctttctttgtatttctatcattaatcagaaagcatgctcttgtatgacataatctcctctttcccttctttgtctgtttctggagagcaattgatgatactgggaactcttacttacaatgtgcttttcaggtcataactgttatgagatacacttgttagatwaaaaaaaaaaaaaaaaaaaaaaaaaaaaacaaaaaaccaaaaaaaaaaaaaaaaaagcttatcgataccgt

SEQ ID NO: 11443 - protein, 358 aa, Triticum aestivum
  misc_feature (1)..(358): Ceres Seq. ID no. 15219657
HTHSATPPSSTPRAAAAAGVDLPLAAMDPRFQLPTPVPSSGGAGVRGHHRRAHSETFLRFPDTDLFLDPDGDFSFSDLDFPSLSDDSPAVSDPTPPPPPPMAASSSQTPAPRPPGGTHNRSLSLDAAFFEGLALQGGGGGGCGGHKRSGSMDGVNSPFEGESALSGGLDYAKKAMPAERIAELALLDPKRAKRILANRQSAARSKERKIKYTGELERKVQTLQTEATTLSAQLTLLQRDTSGLTTENRELKLRLQSMEEQAKLRDALNDALREEVQRLKIAAGQAPKMNGSQFNGGLQQIPSYFSQQHQRQQQQQHQQQMAYLGGHQAQRHHPNHHQSPSNGGQSLSGLSLDDSMDFI

SEQ ID NO: 11444 - protein, 332 aa, Triticum aestivum
  misc_feature (1)..(332): Ceres Seq. ID no. 15219658
MDPRFQLPTPVPSSGGAGVRGHHRRAHSETFLRFPDTDLFLDPDGDFSFSDLDFPSLSDDSPAVSDPTPPPPPPMAASSSQTPAPRPPGGTHNRSLSLDAAFFEGLALQGGGGGGCGGHKRSGSMDGVNSPFEGESALSGGLDYAKKAMPAERIAELALLDPKRAKRILANRQSAARSKERKIKYTGELERKVQTLQTEATTLSAQLTLLQRDTSGLTTENRELKLRLQSMEEQAKLRDALNDALREEVQRLKIAAGQAPKMNGSQFNGGLQQIPSYFSQQHQRQQQQQHQQQMAYLGGHQAQRHHPNHHQSPSNGGQSLSGLSLDDSMDFI

SEQ ID NO: 11445 - protein, 258 aa, Triticum aestivum
  misc_feature (1)..(258): Ceres Seq. ID no. 15219659
MAASSSQTPAPRPPGGTHNRSLSLDAAFFEGLALQGGGGGGCGGHKRSGSMDGVNSPFEGESALSGGLDYAKKAMPAERIAELALLDPKRAKRILANRQSAARSKERKIKYTGELERKVQTLQTEATTLSAQLTLLQRDTSGLTTENRELKLRLQSMEEQAKLRDALNDALREEVQRLKIAAGQAPKMNGSQFNGGLQQIPSYFSQQHQRQQQQQHQQQMAYLGGHQAQRHHPNHHQSPSNGGQSLSGLSLDDSMDFI

SEQ ID NO: 11446 - DNA, 549 bp, Triticum aestivum
  misc_feature (1)..(549): Ceres Seq. ID no. 13654459
cgaaaacagtccagactacacccggtgagcgccctttccctcttccccgacctcccatcccttctccgtgcgttcgccgctgctttgccctagctgggtggcaggcggcccacgaaattcttggacagagattagtagatttcccggccccggccgggggaagataaggatagtctccttcggcgaggttggaattaggccccactgagcgcccccagccatgagttgcgggagatctgaaaacactaccagaaaatgcaggacgcgttcaacacctggtgaaacgatgtatctacatactgcagatgctaaaaagatcacccactaccaagctaatctaccaacaacaatggatcgcgatatcggcgcctaccctgtgaagcaccactttccgtctcctatagtttcttggatagaagacctttctagctttggcgatgttccttttagtcatgatactgaatacgtggatgatcaatcaacaccttcatttgggcagtcttttgcatctagcaatttgcatgacatgcaaatatcagtgagattgac

SEQ ID NO: 11447 - protein, 109 aa, Triticum aestivum
  misc_feature (1)..(109): Ceres Seq. ID no. 13654460
MSCGRSENTTRKCRTRSTPGETMYLHTADAKKITHYQANLPTTMDRDIGAYPVKHHFPSPIVSWIEDLSSFGDVPFSHDTEYVDDQSTPSFGQSFASSNLHDMQISVRL

SEQ ID NO: 11448 - protein, 87 aa, Triticum aestivum
  misc_feature (1)..(87): Ceres Seq. ID no. 13654461
MYLHTADAKKITHYQANLPTTMDRDIGAYPVKHHFPSPIVSWIEDLSSFGDVPFSHDTEYVDDQSTPSFGQSFASSNLHDMQISVRL

SEQ ID NO: 11449 - protein, 66 aa, Triticum aestivum
  misc_feature (1)..(66): Ceres Seq. ID no. 13654462
MDRDIGAYPVKHHFPSPIVSWIEDLSSFGDVPFSHDTEYVDDQSTPSFGQSFASSNLHDMQISVRL

SEQ ID NO: 11450 - DNA, 957 bp, Triticum aestivum
  misc_feature (1)..(957): Ceres Seq. ID no. 13654507
tatataaagttggttttggagctctcagaattatgtgctgaacagaatttagaggtatggtatctggaggatgaattaatcagcccttgcctgttggaagaactaccgaatcaaggtgatcaaatagacgatctgaaaattctgtttgactgtatctgcgaagctctaacagagatccaggagagatattttagactctcttcttggttgtcgtttctcaaacacgacatacgggcacctccaatgggagaagacctcgtcgcagaagttgacaaatatgttgacgattacctccgacatagttttcaaagtacattagatcatacaataaaaaaggatttcgaagttcggacatggatggacattcggtcgaagactgaaggtatcgttgtggagatatgggagtttgtgttagaggaacttatcgatgaggctgttttcgatttgtggatttgaagctctgatcaggtcccctgtcggtggtgctttgtgaggggtatgtacactaggtataactgtagaggttttcatgctgacaataacaccattttacgtggcagaataacacgggctgttttgtttggcccgttcgagtaaagtaatgagagtgtgaacttcgacggcgttttgctcgtcgaagtgtgtataactgcagcggaagaaacttctctgatgcatgacagcggaagtttcgacctgcaaacctcccagccgtgcagcttgtctagactagatgaagtttgggtaactgtcacagccatgcctcttggacagctaaattgcacagcagtctgaaaggctttgcggattttcctcttgtacattgtgatcagaggtgatcacacatgtatattgtttttttccttttctttgtgtttgtgtgtacatgtgtaatagtttttcgagaatcacacatgtgtaacagttaccataatatatgacagatcaaatgctact

SEQ ID NO: 11451 - protein, 151 aa, Triticum aestivum
  misc_feature (1)..(151): Ceres Seq. ID no. 15219662
YIKLVLELSELCAEQNLEVWYLEDELISPCLLEELPNQGDQIDDLKILFDCICEALTEIQERYFRLSSWLSFLKHDIRAPPMGEDLVAEVDKYVDDYLRHSFQSTLDHTIKKDFEVRTWMDIRSKTEGIVVEIWEFVLEELIDEAVFDLWI

SEQ ID NO: 11452 - protein, 70 aa, Triticum aestivum
  misc_feature (1)..(70): Ceres Seq. ID no. 15219663
MGEDLVAEVDKYVDDYLRHSFQSTLDHTIKKDFEVRTWMDIRSKTEGIVVEIWEFVLEELIDEAVFDLWI

SEQ ID NO: 11453 - DNA, 1708 bp, Triticum aestivum
  misc_feature (1)..(1708): Ceres Seq. ID no. 13654539
aggaagagaagagatcagatcagatctcatctcagtctcctctgctcaggtcgccggcgatggcgatggcgccgtccctccgcaccaccgtcctgctcctcctcttcctcctcgccgcctcttctcaggcggaggcggcacaagcggcggaggacggcatccgggtcctctccgccgagaaaaggatcgacctcaccggccccattgtcaaggtcttcctcaccctcaaggtccagaacgccgccaccggcgccgacgcctcacacgtcctcatcgccttcacgcctgccgaggccgaccacctcgccatcgtcaaggccacccgggccgagggcaagcgcaagaagaaggcctacatcccgctcccagtaacacccgccgacgccgccaccgccgctcccaacggcgcccgcctctactccatctcccttcccagcccactaaaacccgccgagaccaccacggtggaggtcttctacgtgctcacccactccctcgagcccttccctgccgagatcacccagtccgagtcccagctcgtctactaccgcgacagcgccgtcatcctctcgccgtaccatgtccaggagcagggcacctacgtcaagacgcccagcagcagggtcgagtccttcaccagggccgaccccaccagccgctcgggccctgatgtcaaatacggcgcgtacagcaaccagctcccatacgcctactcgcccatcattctgcattatgagaacaaccatgcgtttgctgtcgtcgaggagctcgtgcgcaaggtggagatctcccactgggggaacgtccaggtcaccgagcactacaagttgaagcatggcggtgccaagcacaaaggagtcttttcaaggctcgagtatcaggctaggcaatctatcagcggagcgtcatcatttaagaatcttcttgcaaggttgcctccacgagttcattcagtctactatcgtgatgagattggtaacatctcctcatcccatctgcgcagtgattcatacaagtcagaactagaaattgaaccaagatatccgctttttggtgggtggcactgcactttcaccatcggctatggtatgccactgcaagatttcctgtttgaatcggctgatggccgacgctttgccaatcttacatttggatgccctctactgaatactgtggttgataatcttaccatcaaggttgtgcttcccgagggatcgaaaagcccgcaggctgttgttcctttcgagaccgagcaacatcttgagactagctattcatacctggatgttgtggggaggacgacagtggtgataaagaagaaaaacgtagtaggagagcacaatgttccattccaggtgtactacgagttcagtcccatcttcatgctggcggagccgctgatgctggtgaccgcagtgctgctcttgttcgcggcgtgcattgtctatcttcacacggatctgtccatcgcgaaatcgcaggcctcctgaaggaggagtagctgcaaactagtcgttgtgatgaagtaattgatggtggtgaaacattagctttggggagttttgtagaagaagcaagcatgacgataattgattgctgtaggaactttgactcttttttttttattttcctgtggaagaaaaagaaaaatcacaattggattggatgttgagcaacaacttggttagtctgatcaagatacgttttt

SEQ ID NO: 11454 - protein, 495 aa, Triticum aestivum
  misc_feature (1)..(495): Ceres Seq. ID no. 15219664
EEKRSDQISSQSPLLRSPAMAMAPSLRTTVLLLLFLLAASSQAEAAQAAEDGIRVLSAEKRIDLTGPIVKVFLTLKVQNAATGADASHVLIAFTPAEADHLAIVKATRAEGKRKKKAYIPLPVTPADAATAAPNGARLYSISLPSPLKPAETTTVEVFYVLTHSLEPFPAEITQSESQLVYYRDSAVILSPYHVQEQGTYVKTPSSRVESFTRADPTSRSGPDVKYGAYSNQLPYAYSPIILHYENNHAFAVVEELVRKVEISHWGNVQVTEHYKLKHGGAKHKGVFSRLEYQARQSISGASSFKNLLARLPPRVHSVYYRDEIGNISSSHLRSDSYKSELEIEPRYPLFGGWHCTFTIGYGMPLQDFLFESADGRRFANLTFGCPLLNTVVDNLTIKVVLPEGSKSPQAVVPFETEQHLETSYSYLDVVGRTTVVIKKKNVVGEHNVPFQVYYEFSPIFMLAEPLMLVTAVLLLFAACIVYLHTDLSIAKSQAS

SEQ ID NO: 11455 - protein, 476 aa, Triticum aestivum
  misc_feature (1)..(476): Ceres Seq. ID no. 15219665
MAMAPSLRTTVLLLLFLLAASSQAEAAQAAEDGIRVLSAEKRIDLTGPIVKVFLTLKVQNAATGADASHVLIAFTPAEADHLAIVKATRAEGKRKKKAYIPLPVTPADAATAAPNGARLYSISLPSPLKPAETTTVEVFYVLTHSLEPFPAEITQSESQLVYYRDSAVILSPYHVQEQGTYVKTPSSRVESFTRADPTSRSGPDVKYGAYSNQLPYAYSPIILHYENNHAFAVVEELVRKVEISHWGNVQVTEHYKLKHGGAKHKGVFSRLEYQARQSISGASSFKNLLARLPPRVHSVYYRDEIGNISSSHLRSDSYKSELEIEPRYPLFGGWHCTFTIGYGMPLQDFLFESADGRRFANLTFGCPLLNTVVDNLTIKVVLPEGSKSPQAVVPFETEQHLETSYSYLDVVGRTTVVIKKKNVVGEHNVPFQVYYEFSPIFMLAEPLMLVTAVLLLFAACIVYLHTDLSIAKSQAS

SEQ ID NO: 11456 - protein, 474 aa, Triticum aestivum
  misc_feature (1)..(474): Ceres Seq. ID no. 15219666
MAPSLRTTVLLLLFLLAASSQAEAAQAAEDGIRVLSAEKRIDLTGPIVKVFLTLKVQNAATGADASHVLIAFTPAEADHLAIVKATRAEGKRKKKAYIPLPVTPADAATAAPNGARLYSISLPSPLKPAETTTVEVFYVLTHSLEPFPAEITQSESQLVYYRDSAVILSPYHVQEQGTYVKTPSSRVESFTRADPTSRSGPDVKYGAYSNQLPYAYSPIILHYENNHAFAVVEELVRKVEISHWGNVQVTEHYKLKHGGAKHKGVFSRLEYQARQSISGASSFKNLLARLPPRVHSVYYRDEIGNISSSHLRSDSYKSELEIEPRYPLFGGWHCTFTIGYGMPLQDFLFESADGRRFANLTFGCPLLNTVVDNLTIKVVLPEGSKSPQAVVPFETEQHLETSYSYLDVVGRTTVVIKKKNVVGEHNVPFQVYYEFSPIFMLAEPLMLVTAVLLLFAACIVYLHTDLSIAKSQAS

SEQ ID NO: 11457 - DNA, 1559 bp, Triticum aestivum
  misc_feature (1)..(1559): Ceres Seq. ID no. 13654557
agcctctccccccgccgccgcccaagccgctaccctttcctcctccccgccgccgccgccgccatggccaccaccgcgcgcccgctcgtctccgtcaaggctctggacggggacatggcaaccgacgcggccggcgtcccgatgccgcacgtcatgaaggcgccgatccgccccgacgtcatcaccttcgtccacaggctcgtctcctgcaacagccgccagccctacgccgtctcccgcaaggccggtcaccagacctcggccgagtcctggggcacgggtcgcgccgtctcgcgtatcccgcgtgtcggcggtggcggtacccaccgcgccggccagggagccttcggcaacatgtgccgtggcggacgcatgttcgcgcccacccggatctggcgcaagtggcaccgtcgcgtcaacgtccgcctccgccgcgtcgccgtcgcctccgccctcgccgccaccgccgtcccggccatcgtcaccgcccgcggccaccgcatcgagtccgtccccgagttcccgctcgtcgtctccgactcggccgagggcatcgagaagaccgcccaggccatcaaggtcctcaagcagctgggcgcctacgccgacgccgagaaggccaagctgtccgtgggcatccgccccggcaagggtaagatgcgcaaccgcaggtacatcaaccgcaagggccccctcatcgtctacggcaccgagggctccaagatcgtcaaggccttccgcaacctccctggtgtggatgttgccaacgtcgagcgcctcaacttgctcgaccttgcccctggtggccaccttggccggtttgtgatctggaccgagtctgccttcaagaagctggacgaggtgtacggctcctttgaggcgtcttcctccaagaagaagggcttcgttctccccaggcccaagatgaccaatgctgaccttggccgcctcatcaactctgatgaggtccagtctgtggtgaagcccatcaacaaggaggtcaagcgcagggaggccaggaagaaccctctgaagaacgctgctgccgtcctcaagctgaacccctattttggaactgcccgcaggatggcagttcttgctgaggcagcccgtgttaaggccaggaaggagaagatcaactccaagaggaccaagctcagcgcggaggaggcatctaagatcaaggctgctgggaaggcctggtaccagaccatgatctctgacagcgactacactgagttcgacgtcttctccaagtggctcggcgtcagccagtgatcatctagttgtagtagcagtctatcgtcctaccttaagagaccctaaagtatgattttgtgtcatgttatcgtttatctggagtctgagacatcttgctgttttggtagctgtttatctcaagtgttttatctatggacgcattttgggagacatgttatatggcatgctttatcgtcgtcgagttcttagttcagattttgagtcgtgtttttcatatatactttgttatgaatgcgaaataatttttggcattgtgaagttttgtggttggcataccc

SEQ ID NO: 11458 - protein, 425 aa, Triticum aestivum
  misc_feature (1)..(425): Ceres Seq. ID no. 13654558
SLSPRRRPSRYPFLLPAAAAAMATTARPLVSVKALDGDMATDAAGVPMPHVMKAPIRPDVITFVHRLVSCNSRQPYAVSRKAGHQTSAESWGTGRAVSRIPRVGGGGTHRAGQGAFGNMCRGGRMFAPTRIWRKWHRRVNVRLRRVAVASALAATAVPAIVTARGHRIESVPEFPLVVSDSAEGIEKTAQAIKVLKQLGAYADAEKAKLSVGIRPGKGKMRNRRYINRKGPLIVYGTEGSKIVKAFRNLPGVDVANVERLNLLDLAPGGHLGRFVIWTESAFKKLDEVYGSFEASSSKKKGFVLPRPKMTNADLGRLINSDEVQSVVKPINKEVKRREARKNPLKNAAAVLKLNPYFGTARRMAVLAEAARVKARKEKINSKRTKLSAEEASKIKAAGKAWYQTMISDSDYTEFDVFSKWLGVSQ

SEQ ID NO: 11459 - protein, 404 aa, Triticum aestivum
  misc_feature (1)..(404): Ceres Seq. ID no. 13654559
MATTARPLVSVKALDGDMATDAAGVPMPHVMKAPIRPDVITFVHRLVSCNSRQPYAVSRKAGHQTSAESWGTGRAVSRIPRVGGGGTHRAGQGAFGNMCRGGRMFAPTRIWRKWHRRVNVRLRRVAVASALAATAVPAIVTARGHRIESVPEFPLVVSDSAEGIEKTAQAIKVLKQLGAYADAEKAKLSVGIRPGKGKMRNRRYINRKGPLIVYGTEGSKIVKAFRNLPGVDVANVERLNLLDLAPGGHLGRFVIWTESAFKKLDEVYGSFEASSSKKKGFVLPRPKMTNADLGRLINSDEVQSVVKPINKEVKRREARKNPLKNAAAVLKLNPYFGTARRMAVLAEAARVKARKEKINSKRTKLSAEEASKIKAAGKAWYQTMISDSDYTEFDVFSKWLGVSQ

SEQ ID NO: 11460 - protein, 387 aa, Triticum aestivum
  misc_feature (1)..(387): Ceres Seq. ID no. 13654560
MATDAAGVPMPHVMKAPIRPDVITFVHRLVSCNSRQPYAVSRKAGHQTSAESWGTGRAVSRIPRVGGGGTHRAGQGAFGNMCRGGRMFAPTRIWRKWHRRVNVRLRRVAVASALAATAVPAIVTARGHRIESVPEFPLVVSDSAEGIEKTAQAIKVLKQLGAYADAEKAKLSVGIRPGKGKMRNRRYINRKGPLIVYGTEGSKIVKAFRNLPGVDVANVERLNLLDLAPGGHLGRFVIWTESAFKKLDEVYGSFEASSSKKKGFVLPRPKMTNADLGRLINSDEVQSVVKPINKEVKRREARKNPLKNAAAVLKLNPYFGTARRMAVLAEAARVKARKEKINSKRTKLSAEEASKIKAAGKAWYQTMISDSDYTEFDVFSKWLGVSQ

SEQ ID NO: 11461 - DNA, 1043 bp, Triticum aestivum
  misc_feature (1)..(1043): Ceres Seq. ID no. 13654578
atctctctccccttcccgtccccgcttgctcctcctgctcctgccgatcgctcatggattccaagccccaagccccgccgtcggagggcgcggcgtacccgcgcatgtccccggaggacctcgcgccgccgccgccgccggtcgtggcgcccgcgggctccaacccctacgtgctgtcctcgccctcctccggaccgcccgccaagagcaccaaggagaatctgagggagatgttcggctcggtggggaagaggttcagcgaggccgcgcgcaagaccgagggcatcgccggcgacgtctggcagcacttgaaaactgggcctagcattacggatgctgcaatggggaggatcgctcaggtatccaaggtcatatcggaagggggatacgacaagatattccagcagacgtttgagtgcttgcctgacgagaagctcaagaaggcgtacgcgtgctacctctcgacctctcatggtccgataatgggcgtcttatacgtctccaccgccaagcttgcattctgtagtgacagccccgtggcatatgtcactgaggataatcagaccgcgtcagccatttacaagatagttgtacctgtacctcacctgagatcagtcactcctaccgcaagtcaacagaaccctgcggagaggtacatccaggtcgtttctgtcgataaccatgacttctggttcatgggcttcgtgaactatgacagcgctgtgaagtgtctccaggatgctgctcgtggtggcgcctagacatcacttccccgtcgcatgtatccgttgtgatggcccatgttgatgtctatagaccattcttgtgtattttggttcaaatttctggcttaaataagcagtgcattcatgtatcagtattcagtagtgtggatacttttctggcccaagtgtgttgtaaatatcagaggaatcttaagctttgtttgctgccctcattcttgcactgcaaattatgtgtattatgagccaaagatgctcctgccagtgccttgataacttgaggttagtgcatgcttcaac

SEQ ID NO: 11462 - protein, 252 aa, Triticum aestivum
  misc_feature (1)..(252): Ceres Seq. ID no. 13654579
LSPLPVPACSSCSCRSLMDSKPQAPPSEGAAYPRMSPEDLAPPPPPVVAPAGSNPYVLSSPSSGPPAKSTKENLREMFGSVGKRFSEAARKTEGIAGDVWQHLKTGPSITDAAMGRIAQVSKVISEGGYDKIFQQTFECLPDEKLKKAYACYLSTSHGPIMGVLYVSTAKLAFCSDSPVAYVTEDNQTASAIYKIVVPVPHLRSVTPTASQQNPAERYIQVVSVDNHDFWFMGFVNYDSAVKCLQDAARGGA

SEQ ID NO: 11463 - protein, 235 aa, Triticum aestivum
  misc_feature (1)..(235): Ceres Seq. ID no. 13654580
MDSKPQAPPSEGAAYPRMSPEDLAPPPPPVVAPAGSNPYVLSSPSSGPPAKSTKENLREMFGSVGKRFSEAARKTEGIAGDVWQHLKTGPSITDAAMGRIAQVSKVISEGGYDKIFQQTFECLPDEKLKKAYACYLSTSHGPIMGVLYVSTAKLAFCSDSPVAYVTEDNQTASAIYKIVVPVPHLRSVTPTASQQNPAERYIQVVSVDNHDFWFMGFVNYDSAVKCLQDAARGGA

SEQ ID NO: 11464 - protein, 218 aa, Triticum aestivum
  misc_feature (1)..(218): Ceres Seq. ID no. 13654581
MSPEDLAPPPPPVVAPAGSNPYVLSSPSSGPPAKSTKENLREMFGSVGKRFSEAARKTEGIAGDVWQHLKTGPSITDAAMGRIAQVSKVISEGGYDKIFQQTFECLPDEKLKKAYACYLSTSHGPIMGVLYVSTAKLAFCSDSPVAYVTEDNQTASAIYKIVVPVPHLRSVTPTASQQNPAERYIQVVSVDNHDFWFMGFVNYDSAVKCLQDAARGGA

SEQ ID NO: 11465 - DNA, 1811 bp, Triticum aestivum
  misc_feature (1)..(1811): Ceres Seq. ID no. 13654583
atttctgccaaagtggaaccggggaggcagcgagactgggactggtgcgtagtggaggagctgatttctccaagcgggcagtggcaatggcgtgctacgccgctctcctgcaccagccgcccgcctcgccgtccccgtgcacctcaggccgcgccggctcctgccgtgtccgtccgcccccactcctccagcgccgagcccttcccctgtctgtgcgcgctcggatctccccccgctgctcctacgccgcagccggagaaagcgccggagcgggcgccggggaacagcccgcggcggcgctccggagagtgctggggacgccgggcgcccaccaggcgcccgcttgctacgacgcgctcagcgcccgcctcgtcgagcgcgcggggttcagggcctgcttcacgagcggcttctcaatatctgctgcaaggcttggattaccagatgttggtctcatctcctatggtgaaatgatagatcaagggcgtttaatcactgaagcagtatcgatacctgtcattggtgatgctgataatggttatggaaactgtatgaatgtcaagaggacagtgaaaggatttattaatgctggttttgctggaattattcttgaagatcaggtgtcaccaaaagcatgtggacatacacaaggaaggaaagttgtctcaagagaggaagcgattatgcacataaaagccgctgtagatgccaggaaggagagtggctctgacattgttattgtggcaaggacagattctcgtcaagctttgtctcttgatgaagcgttgtggagagcacgagcttttgctgatgctggagcagatgttctatttattgatgcccttgcctcaagggaagagatgatggcgttttgtgcagtttcacctggagttccaaaaatggccaacatgttagaaggtggtggtaaaactcctatattgagccctcttgaacttgaagaaattggttacaaaatcatagcctacccattatctctaattggggtatcaatgcgtgcaatggaggatgctcttgttgctataaaaggtggccgcatacctcctccaagtagcttgccatcatttgaggagatcaaggatacgctagggtttaaccgttattatgaagaggaaaagcgatacgttgcatcaccagctcaatcatccttttggagtgttataggtaattatgattatacaagtgaagctagcagttcaggagacaccaagtccaggactgagaaatcacaagaacctattattgacatactgccacagctctatgatcctggttccgctggaggcagaggtccttcaggtgggatgtggtcccgcacacttcgattgaagattacaggaagagatggggtccagaaaattgatgccaggatacctgctggattcttagaagggatgacaaaagttattccaggcctggctggaactaatatcatggaaaggcttcggaacgcgcctatggattcggacaacccccagaacgggcagatactgcttgattttgaggacggcaggggagataggatccaggttttcatcgcgtgagcgtgttgttcgttgttgtcgtcccggcatccgatactcagacgagcgtcatgttccgtttgagtagtataagcaaatggctgttacttggtagtagttggtaggcccttgctgcctacatccagttatgtaaactccgcatcatactgcatgcatccagaactagtcttcctgtaaccttcctcgtctcatggatgcggaagttaaattcgaataaaacaagttatggaaaaggtattcctctatgcg

SEQ ID NO: 11466 - protein, 519 aa, Triticum aestivum
  misc_feature (1)..(519): Ceres Seq. ID no. 13654584
FCQSGTGEAARLGLVRSGGADFSKRAVAMACYAALLHQPPASPSPCTSGRAGSCRVRPPPLLQRRALPLSVRARISPRCSYAAAGESAGAGAGEQPAAALRRVLGTPGAHQAPACYDALSARLVERAGFRACFTSGFSISAARLGLPDVGLISYGEMIDQGRLITEAVSIPVIGDADNGYGNCMNVKRTVKGFINAGFAGIILEDQVSPKACGHTQGRKVVSREEAIMHIKAAVDARKESGSDIVIVARTDSRQALSLDEALWRARAFADAGADVLFIDALASREEMMAFCAVSPGVPKMANMLEGGGKTPILSPLELEEIGYKIIAYPLSLIGVSMRAMEDALVAIKGGRIPPPSSLPSFEEIKDTLGFNRYYEEEKRYVASPAQSSFWSVIGNYDYTSEASSSGDTKSRTEKSQEPIIDILPQLYDPGSAGGRGPSGGMWSRTLRLKITGRDGVQKIDARIPAGFLEGMTKVIPGLAGTNIMERLRNAPMDSDNPQNGQILLDFEDGRGDRIQVFIA

SEQ ID NO: 11467 - protein, 491 aa, Triticum aestivum
  misc_feature (1)..(491): Ceres Seq. ID no. 13654585
MACYAALLHQPPASPSPCTSGRAGSCRVRPPPLLQRRALPLSVRARISPRCSYAAAGESAGAGAGEQPAAALRRVLGTPGAHQAPACYDALSARLVERAGFRACFTSGFSISAARLGLPDVGLISYGEMIDQGRLITEAVSIPVIGDADNGYGNCMNVKRTVKGFINAGFAGIILEDQVSPKACGHTQGRKVVSREEAIMHIKAAVDARKESGSDIVIVARTDSRQALSLDEALWRARAFADAGADVLFIDALASREEMMAFCAVSPGVPKMANMLEGGGKTPILSPLELEEIGYKIIAYPLSLIGVSMRAMEDALVAIKGGRIPPPSSLPSFEEIKDTLGFNRYYEEEKRYVASPAQSSFWSVIGNYDYTSEASSSGDTKSRTEKSQEPIIDILPQLYDPGSAGGRGPSGGMWSRTLRLKITGRDGVQKIDARIPAGFLEGMTKVIPGLAGTNIMERLRNAPMDSDNPQNGQILLDFEDGRGDRIQVFIA

SEQ ID NO: 11468 - protein, 363 aa, Triticum aestivum
  misc_feature (1)..(363): Ceres Seq. ID no. 13654586
MIDQGRLITEAVSIPVIGDADNGYGNCMNVKRTVKGFINAGFAGIILEDQVSPKACGHTQGRKVVSREEAIMHIKAAVDARKESGSDIVIVARTDSRQALSLDEALWRARAFADAGADVLFIDALASREEMMAFCAVSPGVPKMANMLEGGGKTPILSPLELEEIGYKIIAYPLSLIGVSMRAMEDALVAIKGGRIPPPSSLPSFEEIKDTLGFNRYYEEEKRYVASPAQSSFWSVIGNYDYTSEASSSGDTKSRTEKSQEPIIDILPQLYDPGSAGGRGPSGGMWSRTLRLKITGRDGVQKIDARIPAGFLEGMTKVIPGLAGTNIMERLRNAPMDSDNPQNGQILLDFEDGRGDRIQVFIA

SEQ ID NO: 11469 - DNA, 1241 bp, Triticum aestivum
  misc_feature (1)..(1241): Ceres Seq. ID no. 13654605
gttaccaccatcctcggcttctctgacgcgccatctccaccgtccgccgtcaatccccaccgcgccacagccgccgcccagatggccgcggctggcggcttctcccccctctccggcaccctcctccgccgccgcatacccctccaccatcaccgccgcttcctctccatcgcggccgctgcctcggaagcccccgcgcctgcccccaccccgtcccagccgccgccgccgccgcgtccacgcggaaaggggtacttccccaagaagaacgagatcctcgagctgacctgcgaggggctcgccttcaaggggaagggcgtctgcaaggtcgacggctcctccttcgtcctgctctgcgacggcgctctccccggcgagcgcctcgtggctcgcgtccgtcgcctccgccgcggcgccttcgccgaggccgccaagctcaagaccctctcgccccaccacgacgccgtcgaggccccctgccccctcgccgccgactgcggcggctgcaagagccagtccctcgcctactctgcgcaaatccaccacaagtacgtccaggtccgcgacctgctggtaaatttcggcaagtttgaccccaggaagctggagagctcggattcagacgccgtccttaagcccatcgtgccgtgcgacgagatatttcggtacaggaacaagatggagttctcgtttgggacgaagaggtggatgaaaagggagtggaaggaggagaaagaggaggtgtcgaagggggaagagttggagactgatggttattcacttggcctccatgcaccagggttctttgacaaggtgcttcacgtcgagacgtgcttgctgcacagtgagccggcagataagactaaagatgaagctagtgaagcaaatgaaaaaggagacatgggctttgatggagaatatgcacatgacactggtgatggtgaaacaatagaaggtggctatgactatgctgattacaacaacgatggctatgctgatggtggtgatgctggagcctacgaggattacgatgggattgattactaatatagtactaaaattctgagaaaacagcccaacaaaataagtcttggtcaaccggaaggggtttatttggacaatgtattatactacctccgtaccaaaatattagctgtttctttaggcgagttttgtagcacaaagaagttccaattaatgatataccgaggcactgcacagtgaagtactccctccgtccc

SEQ ID NO: 11470 - protein, 348 aa, Triticum aestivum
  misc_feature (1)..(348): Ceres Seq. ID no. 15219686
VTTILGFSDAPSPPSAVNPHRATAAAQMAAAGGFSPLSGTLLRRRIPLHHHRRFLSIAAAASEAPAPAPTPSQPPPPPRPRGKGYFPKKNEILELTCEGLAFKGKGVCKVDGSSFVLLCDGALPGERLVARVRRLRRGAFAEAAKLKTLSPHHDAVEAPCPLAADCGGCKSQSLAYSAQIHHKYVQVRDLLVNFGKFDPRKLESSDSDAVLKPIVPCDEIFRYRNKMEFSFGTKRWMKREWKEEKEEVSKGEELETDGYSLGLHAPGFFDKVLHVETCLLHSEPADKTKDEASEANEKGDMGFDGEYAHDTGDGETIEGGYDYADYNNDGYADGGDAGAYEDYDGIDY

SEQ ID NO: 11471 - protein, 321 aa, Triticum aestivum
  misc_feature (1)..(321): Ceres Seq. ID no. 15219687
MAAAGGFSPLSGTLLRRRIPLHHHRRFLSIAAAASEAPAPAPTPSQPPPPPRPRGKGYFPKKNEILELTCEGLAFKGKGVCKVDGSSFVLLCDGALPGERLVARVRRLRRGAFAEAAKLKTLSPHHDAVEAPCPLAADCGGCKSQSLAYSAQIHHKYVQVRDLLVNFGKFDPRKLESSDSDAVLKPIVPCDEIFRYRNKMEFSFGTKRWMKREWKEEKEEVSKGEELETDGYSLGLHAPGFFDKVLHVETCLLHSEPADKTKDEASEANEKGDMGFDGEYAHDTGDGETIEGGYDYADYNNDGYADGGDAGAYEDYDGIDY

SEQ ID NO: 11472 - DNA, 1549 bp, Triticum aestivum
  misc_feature (1)..(1549): Ceres Seq. ID no. 13654637
ctggtgtctccgacctgctccgtctccgcctccgcctccggcatcggcacggtgtcctaaggcgacgagatcgccgtgagatccagagccgccgcctgcgccgcagacgaatccactagcgcgtcactgccttccggccccccttcccgctgcaaagatggggaggataccgtctctgaagaacttcaatgcgttcccgcacgccgaagaccacctgctgaagaagacttactcgggtgctatagtgacgattctcgggctaattgttatggttacacttttcgcgcatgagctcacgttttaccttacaacctatacgatgcatcagatgtctgtagatctgaaacgaggagaaactctaccaattcatataaatgtatcatttccttctttaccatgtgaagtcttgagtgtggatgcaatcgacatgtccggcaaacatgaggttgacttgcatacaaatatttggaagcttcgtttggataagtatggccatatcattggtactgagtacttgtctgatctagttgaaaaggagcatggaactcatgatcatgaccatggccatgagcatgatgtagaaaagaagcctgagcacaccttcaacgaagatgcagataaaatgattaagagtgtcaaacttgcaatggaaaatggtgaaggatgccgagtgtatggtgctttggacgtgcagagggttgctggcaacttccatatatcggtgcatggtttaaatatttttgttgcaaatcagatttttgatgggtcaagccatgtcaatgttagccatgttatccatcgactgtcctttggtccagaataccctggaattcataatccacttgatgatacttcaaggatactgcacgacacaagtgggacattcaaatactatatcaaggttgttccaaccgagtacagatacctctcaaagggagtgttgccaacaaatcagttttccgtgacagagtattttgttcccattcgcccaactgataggtcctggccagccgtttacttcctgtatgatctctcaccaatcacagtcaccatcagagaagaaagacgtaacttcctacatttcataactcgcctttgtgcagttcttgggggtacatttgcaatgacaggaatgcttgaccggtggatgtacaggatcatcgagtctatctcgagctcaaaacctagaagtgggatgcggtaaccgggcatcccatgccgaaggaggctactagccagcctggtgaccagtcaagtcagtcgtcgacgatgttgttgtctcaaccaagtgatcaaagcacggtcacccccctgcgggctttcatgttttgtccagtccatgcatctataacttaaaagatatggttttagtcttatgattaatcatgttagattggcactagtggcaagtatacagttttgttatgaatgatgcaacgggaggcgccaacgatgtcatgtagcttgtacttaccatggaaaaaagcatatcctcagtatgacagtatgacaaatagcattaaatcaactttgaaagggaattaaaagc

SEQ ID NO: 11473 - protein, 348 aa, Triticum aestivum
  misc_feature (1)..(348): Ceres Seq. ID no. 13654638
MGRIPSLKNFNAFPHAEDHLLKKTYSGAIVTILGLIVMVTLFAHELTFYLTTYTMHQMSVDLKRGETLPIHINVSFPSLPCEVLSVDAIDMSGKHEVDLHTNIWKLRLDKYGHIIGTEYLSDLVEKEHGTHDHDHGHEHDVEKKPEHTFNEDADKMIKSVKLAMENGEGCRVYGALDVQRVAGNFHISVHGLNIFVANQIFDGSSHVNVSHVIHRLSFGPEYPGIHNPLDDTSRILHDTSGTFKYYIKVVPTEYRYLSKGVLPTNQFSVTEYFVPIRPTDRSWPAVYFLYDLSPITVTIREERRNFLHFITRLCAVLGGTFAMTGMLDRWMYRIIESISSSKPRSGMR

SEQ ID NO: 11474 - protein, 311 aa, Triticum aestivum
  misc_feature (1)..(311): Ceres Seq. ID no. 13654639
MVTLFAHELTFYLTTYTMHQMSVDLKRGETLPIHINVSFPSLPCEVLSVDAIDMSGKHEVDLHTNIWKLRLDKYGHIIGTEYLSDLVEKEHGTHDHDHGHEHDVEKKPEHTFNEDADKMIKSVKLAMENGEGCRVYGALDVQRVAGNFHISVHGLNIFVANQIFDGSSHVNVSHVIHRLSFGPEYPGIHNPLDDTSRILHDTSGTFKYYIKVVPTEYRYLSKGVLPTNQFSVTEYFVPIRPTDRSWPAVYFLYDLSPITVTIREERRNFLHFITRLCAVLGGTFAMTGMLDRWMYRIIESISSSKPRSGMR

SEQ ID NO: 11475 - protein, 294 aa, Triticum aestivum
  misc_feature (1)..(294): Ceres Seq. ID no. 13654640
MHQMSVDLKRGETLPIHINVSFPSLPCEVLSVDAIDMSGKHEVDLHTNIWKLRLDKYGHIIGTEYLSDLVEKEHGTHDHDHGHEHDVEKKPEHTFNEDADKMIKSVKLAMENGEGCRVYGALDVQRVAGNFHISVHGLNIFVANQIFDGSSHVNVSHVIHRLSFGPEYPGIHNPLDDTSRILHDTSGTFKYYIKVVPTEYRYLSKGVLPTNQFSVTEYFVPIRPTDRSWPAVYFLYDLSPITVTIREERRNFLHFITRLCAVLGGTFAMTGMLDRWMYRIIESISSSKPRSGMR

SEQ ID NO: 11476 - DNA, 1004 bp, Triticum aestivum
  misc_feature (1)..(1004): Ceres Seq. ID no. 13654659
ctgtcctcgttgtcattattgatcttcgtcttggtcgccctcccttcgcctgcgctcgcgcagcagcaacccgccgctccctccggctggccgtcgtccgtcccgctcccggcgcccgcaaattcttcctcccccctcgacatggcgtcctgcccttcggtcaagaacatcctcgtgctggacgcggaggggaagcgcgtggccgtcaagtactatgccgatgactggccctccgcgtcctccaagctggctttcgagaagtcgctcttcgtgaagacccagaagaccagcgccagagcagaggctgatgtggtaatgttcgatggctacatcattgtgtacaagttcatccaagatctccatttttttgtaactggaggagatgaggagaatgagctcattttagcgtcagttcttcagggattttctgatgctgttggcattcttctcagaaacaatgtagacaaaaggaccgcacttgaaaatctggatctcatctttttgtgccttgacgaagttgttgatggagggattgttctggaaacagatggaaatgtgatagccgagaaggtgtcaggccatggattggaaggagctgggtcgttcactgagcagacgataagccaagccctagcgacagcaagagagcacttcgcgaggtctcttctgaagtagtgtgtgtaggcatctttcgggttggcgatgcgcccagcattgaactcgtgtgtttcctcttgtagcacagtgcacctagtttgcaagaaagaaagaaagagcgagaaaatgacttgaatctttgcacgtgagttcgttcgttcgtctattgttgtggtgctcgtcgacattttgtcgcagagatgtactccctccgttcgaaattacttgtcttgaaaatggatgtatctagaactaaaattccgaacggagggagtatgtgcggcctaagtgcctaactggttaccagattcccttctaaggtctgtataagaaacttgtgatggtgc

SEQ ID NO: 11477 - protein, 224 aa, Triticum aestivum
  misc_feature (1)..(224): Ceres Seq. ID no. 13654660
LSSLSLLIFVLVALPSPALAQQQPAAPSGWPSSVPLPAPANSSSPLDMASCPSVKNILVLDAEGKRVAVKYYADDWPSASSKLAFEKSLFVKTQKTSARAEADVVMFDGYIIVYKFIQDLHFFVTGGDEENELILASVLQGFSDAVGILLRNNVDKRTALENLDLIFLCLDEVVDGGIVLETDGNVIAEKVSGHGLEGAGSFTEQTISQALATAREHFARSLLK

SEQ ID NO: 11478 - protein, 177 aa, Triticum aestivum
  misc_feature (1)..(177): Ceres Seq. ID no. 13654661
MASCPSVKNILVLDAEGKRVAVKYYADDWPSASSKLAFEKSLFVKTQKTSARAEADVVMFDGYIIVYKFIQDLHFFVTGGDEENELILASVLQGFSDAVGILLRNNVDKRTALENLDLIFLCLDEVVDGGIVLETDGNVIAEKVSGHGLEGAGSFTEQTISQALATAREHFARSLLK

SEQ ID NO: 11479 - protein, 119 aa, Triticum aestivum
  misc_feature (1)..(119): Ceres Seq. ID no. 13654662
MFDGYIIVYKFIQDLHFFVTGGDEENELILASVLQGFSDAVGILLRNNVDKRTALENLDLIFLCLDEVVDGGIVLETDGNVIAEKVSGHGLEGAGSFTEQTISQALATAREHFARSLLK

SEQ ID NO: 11480 - DNA, 613 bp, Triticum aestivum
  misc_feature (1)..(613): Ceres Seq. ID no. 13654722
acaataaccacaaccacagccagcaagatctagtcaaagaaacacatcaatccagagcgtccaccagagtcactaacttgtccagccgcagcaatggcggtgcggtggccatcgcccgccgtggccgcgttgtggatcggcgcgagcctcctagtcctgtgcacgctcatggcgtcgtcggcgtcagcccaggcgccgccgccacaggtgcgtaaggtgcccaagggcagcaacctggtggtgatcaagccgggggtcgggaagcgcaacagcaagttcacctgcaccgacaccaagaagaagcggcccgggtgcgaggccacctgccccagccgctgccccaaagagtgcctcgtcctctgcccatcctgcatgaccttctgcctgtgtgacttctacgcgggggcgtcgtgcggcgacccgcgcttcaccggcggcgacggcaacaacttctacttccacggcaagaagaaccaggacttctgcatcctctccgacgacgacctccacatcaacgcgcacttcatcggcaaccacaaccccgcgacgagccgcgacttcacctggatccaggccnnngntgtcatgttcgcccaccaccgcctccacctcg

SEQ ID NO: 11481 - protein, 173 aa, Triticum aestivum
  misc_feature (1)..(173): Ceres Seq. ID no. 13654723
  misc_feature (162)..(162): Xaa is any aa, unknown or other
  misc_feature (163)..(163): Xaa is any aa, unknown or other
MAVRWPSPAVAALWIGASLLVLCTLMASSASAQAPPPQVRKVPKGSNLVVIKPGVGKRNSKFTCTDTKKKRPGCEATCPSRCPKECLVLCPSCMTFCLCDFYAGASCGDPRFTGGDGNNFYFHGKKNQDFCILSDDDLHINAHFIGNHNPATSRDFTWIQAXXVMFAHHRLHL

SEQ ID NO: 11482 - protein, 148 aa, Triticum aestivum
  misc_feature (1)..(148): Ceres Seq. ID no. 13654724
  misc_feature (137)..(137): Xaa is any aa, unknown or other
  misc_feature (138)..(138): Xaa is any aa, unknown or other
MASSASAQAPPPQVRKVPKGSNLVVIKPGVGKRNSKFTCTDTKKKRPGCEATCPSRCPKECLVLCPSCMTFCLCDFYAGASCGDPRFTGGDGNNFYFHGKKNQDFCILSDDDLHINAHFIGNHNPATSRDFTWIQAXXVMFAHHRLHL

SEQ ID NO: 11483 - DNA, 1060 bp, Triticum aestivum
  misc_feature (1)..(1060): Ceres Seq. ID no. 13654738
gcttttaccttttaggacagaggagtaagcaagtgcagtggcagtggttggccgcagacagcagcagctcgcctccttccttccttcctcctcactcccccctatatacccgccaccctacccgtcggagggtgcgcgcagcggtggagctcggtggattgtcggggcaaatggattccagttccagggccgccctcttctgcttcctggccgtcgcctcctccctcctgcaccccgccagatctgacggggaggacaaccagctcctcaaggggatcaacagctacagagcttcactcaaggtcccggcgctcaccgagaacagcaatgccgactgcctggccgagcagctagcgaagaagttcaagggccaggagtgcaccaacaccaccggagccaacactgtccccggcaccgagccgcagttccccgactacccccagttcctcgaccgctgccacctcaacgcgtcggtaaccgaggacgggcaggtgatgccggcatgcgtgcccggactcgtggccgacgttgtgctgaccaactacaccaagtcccagtacaaccggttcctcaacgacaccaagtactccggcgtcgggatcgccaacgagggggactgggtggtcgtcgtcctcagcaccagcaccgactccggcgactactcccctgctcccccgggctccaactgggctccttcggtccagccgttcagctggatgattgtttcgctggtagggttcgtaattttgctgatgaagtgagaagataaatgttgtgttgctcatctcgcgtgctacaccgctgcaaatgagcgtgttgatcttatgcccgtgtcagtcgtttctgtatctttcagattgtcatttctactcggtccagttgacaccacagtacagtagcatatgcatgccacgaggttcgggatcaaaactttttttcttcagtattctcctttgaccacaattggcaacggctttatggatattgtggtcaggtgatgtgcattattgaaccacatctttcatctttgaacatttagctaaagccagaacttcaactt

SEQ ID NO: 11484 - protein, 252 aa, Triticum aestivum
  misc_feature (1)..(252): Ceres Seq. ID no. 13654739
FYLLGQRSKQVQWQWLAADSSSSPPSFLPPHSPLYTRHPTRRRVRAAVELGGLSGQMDSSSRAALFCFLAVASSLLHPARSDGEDNQLLKGINSYRASLKVPALTENSNADCLAEQLAKKFKGQECTNTTGANTVPGTEPQFPDYPQFLDRCHLNASVTEDGQVMPACVPGLVADVVLTNYTKSQYNRFLNDTKYSGVGIANEGDWVVVVLSTSTDSGDYSPAPPGSNWAPSVQPFSWMIVSLVGFVILLMK

SEQ ID NO: 11485 - protein, 196 aa, Triticum aestivum
  misc_feature (1)..(196): Ceres Seq. ID no. 13654740
MDSSSRAALFCFLAVASSLLHPARSDGEDNQLLKGINSYRASLKVPALTENSNADCLAEQLAKKFKGQECTNTTGANTVPGTEPQFPDYPQFLDRCHLNASVTEDGQVMPACVPGLVADVVLTNYTKSQYNRFLNDTKYSGVGIANEGDWVVVVLSTSTDSGDYSPAPPGSNWAPSVQPFSWMIVSLVGFVILLMK

SEQ ID NO: 11486 - DNA, 682 bp, Triticum aestivum
  misc_feature (1)..(682): Ceres Seq. ID no. 13654755
ctaccaaactctctgtggtgccgaggttaatcagtgtacagcaatggctgtggcctccatggttcatgcaccgtctctcctggcagtgcagaccttccgcggacagaagaatgctgccgctaaccgctcaccgagagcggcggctttcagagtccgggcggcgaagcttcctgccggagtccgggtgccaagggcgcagcccaagctgagtgagccgttcctggggttcaccaagaccgcggaggtctggaactccagggcctgcatgatgggcctcattgggaccttcatcgtggagctgatattgcacaaaggtgttcttgagataatcggtttcgaagtggggaaaggcctcgatattccactgtagtctgctctccctccttgcctataagatgttgatgctcgggagataagagccacaagaaagcgttaccaattatgcgcaaaaaaaaaaccgttaccaatggctatgctatgcatcatagcaaatatataatggagctctgagcatttcattgtgcttgctatttttcatttttacactcgtcttaccaaagtgatcgacagagtgatcttcaacacttgacaatattctgctgagatgggtgatagtttgtaccgttaatatgaaaacttgttcgttgttttgaaaagaaaaactgaagttgtccatgttttg

SEQ ID NO: 11487 - protein, 122 aa, Triticum aestivum
  misc_feature (1)..(122): Ceres Seq. ID no. 13654756
YQTLCGAEVNQCTAMAVASMVHAPSLLAVQTFRGQKNAAANRSPRAAAFRVRAAKLPAGVRVPRAQPKLSEPFLGFTKTAEVWNSRACMMGLIGTFIVELILHKGVLEIIGFEVGKGLDIPL

SEQ ID NO: 11488 - protein, 108 aa, Triticum aestivum
  misc_feature (1)..(108): Ceres Seq. ID no. 13654757
MAVASMVHAPSLLAVQTFRGQKNAAANRSPRAAAFRVRAAKLPAGVRVPRAQPKLSEPFLGFTKTAEVWNSRACMMGLIGTFIVELILHKGVLEIIGFEVGKGLDIPL

SEQ ID NO: 11489 - protein, 103 aa, Triticum aestivum
  misc_feature (1)..(103): Ceres Seq. ID no. 13654758
MVHAPSLLAVQTFRGQKNAAANRSPRAAAFRVRAAKLPAGVRVPRAQPKLSEPFLGFTKTAEVWNSRACMMGLIGTFIVELILHKGVLEIIGFEVGKGLDIPL

SEQ ID NO: 11490 - DNA, 622 bp, Triticum aestivum
  misc_feature (1)..(622): Ceres Seq. ID no. 13654829
atttgcggtcacgtcagtcattacttcgcaagatccgcatccaaacctgagctgtataaggtcgacgacggacaaggaaaagagatgccgttgaacaccatctgcgtacgtaagggtatggctgcttccttcttcctgagtctcgtcgtccccttggttctgcttcttctgccgctctcgcgctcggcgtcggtggtgacccatctccccggcttccatggccgccttccgttccacctggagaccgggtacgtcaacgtggacgaggagacgggaacggagctcttctactacttcgtggagtcggagaggagccccgacacggaccccgtcgtcctgtggctgacgggcgggcccggctgctctagcttgattttctacgaagttggtgaggccctcatcctccgttcctcgtctcctgtgggcgtattagctggctagaaggaagccgccatgctgtcaattactacatcagattaagataaagagtgaagttaacttctattagcctctaattcaaagctagatgagcaaatcgtccgagtttgcaaatgtgtatcaggttgtgttacaaagtttggcaccttttatccaaagttttaaatagccccatagctgggtt

SEQ ID NO: 11491 - protein, 146 aa, Triticum aestivum
  misc_feature (1)..(146): Ceres Seq. ID no. 13654830
ICGHVSHYFARSASKPELYKVDDGQGKEMPLNTICVRKGMAASFFLSLVVPLVLLLLPLSRSASVVTHLPGFHGRLPFHLETGYVNVDEETGTELFYYFVESERSPDTDPVVLWLTGGPGCSSLIFYEVGEALILRSSSPVGVLAG

SEQ ID NO: 11492 - protein, 118 aa, Triticum aestivum
  misc_feature (1)..(118): Ceres Seq. ID no. 13654831
MPLNTICVRKGMAASFFLSLVVPLVLLLLPLSRSASVVTHLPGFHGRLPFHLETGYVNVDEETGTELFYYFVESERSPDTDPVVLWLTGGPGCSSLIFYEVGEALILRSSSPVGVLAG

SEQ ID NO: 11493 - protein, 107 aa, Triticum aestivum
  misc_feature (1)..(107): Ceres Seq. ID no. 13654832
MAASFFLSLVVPLVLLLLPLSRSASVVTHLPGFHGRLPFHLETGYVNVDEETGTELFYYFVESERSPDTDPVVLWLTGGPGCSSLIFYEVGEALILRSSSPVGVLAG

SEQ ID NO: 11494 - DNA, 956 bp, Triticum aestivum
  misc_feature (1)..(956): Ceres Seq. ID no. 13654885
cctaaccaaaaagtcactggctagcttattcacatctcttttcttgagacattctcttgatccacatatttacctacctctctagctagaaacaaagcttgctcggcaacaatggctgcaggtggagcttctcttattgctgctgctgttttctccgtgctgatcatgtcttccctgggggatctgatgcctttatgcagcgattgcgagacgctgtgccgtaccaactgcaccgcggaggctgaagccaattgcgccaattactgcaacgacacccaagcaacagcagggtactgcgaaggttgcatgggcgcctacttcgaccagcactgcaatcccgagtgtctcaaaaattgcagcaaccgctgcaagaagaaggtgcttccgaggcctttatgcagcgactgcgacacggtatgcagtaccaagtgcgctgaggagcttgaaaccacctgcagccaagactgcgaccccaggcgcagcggtcaggcggcctgccagcgtcagctcttcaagcggtgcaacgcagagggtacctgctgcagtagcgacggcacatgcacttgtgactgcgagaccgaagctcgaaagcagtgcgtgggcgtcagcgacaactccaataattgcgaagtttgcaagcgcagccagttcgaccaggactgtcatcccacctgtaacaccgattgcaatggcaactgcaagaagaagaaagggtgccgcgggcacgcatagggaaaacatgtaactgggggccctgcattgcgtaggaaataacatggctccttgtagtcgtgcgtagatttcgatttctgtaaacgccacgacctggttttgtgggatggcacaggaggagtatgggtggtggcgcatcacccccagcttttggccgaggatttatattctgtatttctatttatgttttctgaacaatgaatcacaatgtgaaattatggttg

SEQ ID NO: 11495 - protein, 206 aa, Triticum aestivum
  misc_feature (1)..(206): Ceres Seq. ID no. 13654886
MAAGGASLIAAAVFSVLIMSSLGDLMPLCSDCETLCRTNCTAEAEANCANYCNDTQATAGYCEGCMGAYFDQHCNPECLKNCSNRCKKKVLPRPLCSDCDTVCSTKCAEELETTCSQDCDPRRSGQAACQRQLFKRCNAEGTCCSSDGTCTCDCETEARKQCVGVSDNSNNCEVCKRSQFDQDCHPTCNTDCNGNCKKKKGCRGHA

SEQ ID NO: 11496 - protein, 188 aa, Triticum aestivum
  misc_feature (1)..(188): Ceres Seq. ID no. 13654887
MSSLGDLMPLCSDCETLCRTNCTAEAEANCANYCNDTQATAGYCEGCMGAYFDQHCNPECLKNCSNRCKKKVLPRPLCSDCDTVCSTKCAEELETTCSQDCDPRRSGQAACQRQLFKRCNAEGTCCSSDGTCTCDCETEARKQCVGVSDNSNNCEVCKRSQFDQDCHPTCNTDCNGNCKKKKGCRGHA

SEQ ID NO: 11497 - protein, 181 aa, Triticum aestivum
  misc_feature (1)..(181): Ceres Seq. ID no. 13654888
MPLCSDCETLCRTNCTAEAEANCANYCNDTQATAGYCEGCMGAYFDQHCNPECLKNCSNRCKKKVLPRPLCSDCDTVCSTKCAEELETTCSQDCDPRRSGQAACQRQLFKRCNAEGTCCSSDGTCTCDCETEARKQCVGVSDNSNNCEVCKRSQFDQDCHPTCNTDCNGNCKKKKGCRGHA

SEQ ID NO: 11498 - DNA, 1550 bp, Triticum aestivum
  misc_feature (1)..(1550): Ceres Seq. ID no. 13654989
aagaagggaaagaatgacaccgctacccaaagcagccagccaagccaaagccaaccccagtcctagccactagccacaacgaacgaactcagacccagccagcctcgtggctccggttggactggccagtaccgttgccggacgctcctgatggggaactgcgccggcgtgcaggggaacgccgagatcaacccgaccttcagtgctcccaacacctcaggtaacaattccaagagcagcaacagcagcaatgcgactgatacaagcacttttggcaagagttcttcgtcgtcggtgccgccgactcctcggaccgagaaggagatcttgcagtcgtccaacctccgcaagttcaccttcagtgaactgagaagctccacaaggaacttccggactgacagcctgctcggggaggggggctttggctccgtcttcaaggggtggatcgacgagcgcacgtttacgccggtcaagcccggcaccgggatgatcgtcgccgtgaagaagctcaagctggacagtttccaggggcacaaagaatggctggctgaggtcaattacctggggcagctatcacaccccaatcttgtgaagctcatcgggtattgcttggaggacgagcagcggcttctcgtctacgaattcatgccgaagggtagcttggagcaccatcttttcaggagagctccacatttccagcccctctcatggagtttacggatgaaggttgctcttgaggctgccaggggacttgctttcctgcatagcgatgaagctaaagttatataccgtgatttcaagacctccaatgttcttcttgactcggaatataatgcaaaactctctgattttggcttggcaaaagatggcccgagtggcgataaaagtcatgtttctactagggtcatggggactcaaggatatgctgcccctgaatatctcgcaacaggccacttgaccacgaagagcgatgtctacacctatggtgttgttcttctagagttgctgaccgggcaacgagctctggacaagaaccgcccgcctggacagcataacctggtggagtgggcaagaccttacatcaacagcaagaggagggtcatccatgtcctggacccacgattggggtcgcaatattcgctccctgcggcgcagaaggcagcggcgcttgcgatgcagtgcctgtcaatggacgcccggtgcaggccggacatggatcaggtcgtgaccgcgctggaaaagcttccggaggtgaagaaaacatacaagtagggagggttgctgggttccatgtgtactcctttacctctctggagcatcgcctactccttgtaagcaacacttcagggagtagaaacagtgaagagaagccggacttgaggggaagactagcctttgaatctgtcaagagaatgtagaatatatatcgtcatgtgtacagctagctgttagactgttgttactttgctgtcagcctgacgcctgttttatatatttgcagtacaccggctttgtaaaacaagttgggaaacagttgtgtcttggtcttg

SEQ ID NO: 11499 - protein, 373 aa, Triticum aestivum
  misc_feature (1)..(373): Ceres Seq. ID no. 13654990
MGNCAGVQGNAEINPTFSAPNTSGNNSKSSNSSNATDTSTFGKSSSSSVPPTPRTEKEILQSSNLRKFTFSELRSSTRNFRTDSLLGEGGFGSVFKGWIDERTFTPVKPGTGMIVAVKKLKLDSFQGHKEWLAEVNYLGQLSHPNLVKLIGYCLEDEQRLLVYEFMPKGSLEHHLFRRAPHFQPLSWSLRMKVALEAARGLAFLHSDEAKVIYRDFKTSNVLLDSEYNAKLSDFGLAKDGPSGDKSHVSTRVMGTQGYAAPEYLATGHLTTKSDVYTYGVVLLELLTGQRALDKNRPPGQHNLVEWARPYINSKRRVIHVLDPRLGSQYSLPAAQKAAALAMQCLSMDARCRPDMDQVVTALEKLPEVKKTYK

SEQ ID NO: 11500 - protein, 261 aa, Triticum aestivum
  misc_feature (1)..(261): Ceres Seq. ID no. 13654991
MIVAVKKLKLDSFQGHKEWLAEVNYLGQLSHPNLVKLIGYCLEDEQRLLVYEFMPKGSLEHHLFRRAPHFQPLSWSLRMKVALEAARGLAFLHSDEAKVIYRDFKTSNVLLDSEYNAKLSDFGLAKDGPSGDKSHVSTRVMGTQGYAAPEYLATGHLTTKSDVYTYGVVLLELLTGQRALDKNRPPGQHNLVEWARPYINSKRRVIHVLDPRLGSQYSLPAAQKAAALAMQCLSMDARCRPDMDQVVTALEKLPEVKKTYK

SEQ ID NO: 11501 - protein, 208 aa, Triticum aestivum
  misc_feature (1)..(208): Ceres Seq. ID no. 13654992
MPKGSLEHHLFRRAPHFQPLSWSLRMKVALEAARGLAFLHSDEAKVIYRDFKTSNVLLDSEYNAKLSDFGLAKDGPSGDKSHVSTRVMGTQGYAAPEYLATGHLTTKSDVYTYGVVLLELLTGQRALDKNRPPGQHNLVEWARPYINSKRRVIHVLDPRLGSQYSLPAAQKAAALAMQCLSMDARCRPDMDQVVTALEKLPEVKKTYK

SEQ ID NO: 11502 - DNA, 912 bp, Triticum aestivum
  misc_feature (1)..(912): Ceres Seq. ID no. 13655002
aaccgaagcccactcgacggcattctcctccggcaagctccgcgcgaaaccctagccagccccgccggccgccgccaccgccgctcccctcccgtccacgctctcaaggccactccggccaccggaagccatggcgcagagggcggcgggcgcgcttctccggcggtccctcgggctcgcgccgccgacggcccccagggccctgagcaccagcaccgcggcgccggccgcggcggcggagggagaggccgcggctgccaaggcgaagaggagcaagaagaagaacctgttcgacgtggtgcagttcctgccggactggggcgtcggctacaaggtcgccaagaccacctggcgcgacgtctcctaccagatcaccaagatcaacctctacaaggacggccgccacgggaaggcgtgggggattcggcacaaggccggtgtgcaagtggccgacgctccgataaaactcagcggagtgaacaagcgtggttggaagtacataaaggcatcgcagaagacggtgcaggatacccccgcagcagagacgccagccgctgccactgccaccgccactgcttaattcgttacaagctagaacatttagaaggcggcaaaacgtgttcctgtagaagcgtagcgtcgaactgttcagacggtcggttgatctgccgtcttccactctttcatagtttccatgctttccagggttttaggcatagttgaaagggccccgaattgccatgtccgccacgctgtcttgctaaagatgatgtcgccgtcgaaaacatttgttttgtattttctacatttttgcaatgccgcgtttccatgagaaggaacaagtgcgtcgcctcggcattagtttggttggggtgggtctcatgtaataaaagttcatccttgctctggtcc

SEQ ID NO: 11503 - protein, 240 aa, Triticum aestivum
  misc_feature (1)..(240): Ceres Seq. ID no. 13655003
NRSPLDGILLRQAPRETLASPAGRRHRRSPPVHALKATPATGSHGAEGGGRASPAVPRARAADGPQGPEHQHRGAGRGGGGRGRGCQGEEEQEEEPVRRGAVPAGLGRRLQGRQDHLARRLLPDHQDQPLQGRPPREGVGDSAQGRCASGRRSDKTQRSEQAWLEVHKGIAEDGAGYPRSRDASRCHCHRHCLIRYKLEHLEGGKTCSCRSVASNCSDGRLICRLPLFHSFHAFQGFRHS

SEQ ID NO: 11504 - protein, 149 aa, Triticum aestivum
  misc_feature (1)..(149): Ceres Seq. ID no. 13655004
MAQRAAGALLRRSLGLAPPTAPRALSTSTAAPAAAAEGEAAAAKAKRSKKKNLFDVVQFLPDWGVGYKVAKTTWRDVSYQITKINLYKDGRHGKAWGIRHKAGVQVADAPIKLSGVNKRGWKYIKASQKTVQDTPAAETPAAATATATA

SEQ ID NO: 11505 - DNA, 861 bp, Triticum aestivum
  misc_feature (1)..(861): Ceres Seq. ID no. 13655072
ccgattcccatccagcgtacagactaggcgacccccgcttcccgtcccctctctcctccacacgcctctctccctctcccctcgtccgccgccgccgccgccgccaccatgggcaggggcaagttcaagggcaagccaaccggccgccgcaacttctccaccccggaggagatcgcttctggaacttctgggcgtccacgctcgtttaagaagaatgtagctgaagcagaagaggaagaggaagaagtagaagaatctgaggaggaagaatccgaagacgacggtgaagagaagaaacataaaggaactgaaggtgttattcaaatcgaaaatccaaacctggtgaaagcaaagaatataaaagccaaagaagctgatcttggaaagacaactgaactctcgaggcgtgagagagaggagattgagaaacaaaaatctcatgagcgctatatgaagcttcaggagcaagggaaaacagaacaggcgaagaaagatttggaacgtcttgctttaataaggcagcaaagagcagatgctgcaaagaaacgcgaagaggagaaagctgctaaagaacagaggaagaccgaagcgcgcaaataactgccaaggtggtggaggcatgagctaagctgagctgtgttggctggatatttatttctatgcatcttagtatatttaaaccctggtctctattccatcatctacatttccataaaaaccgtgcattgacaagtgtaaagtagtcctgtcggcgtggcttgctgtaaacttgagcttggcagggtacacatttagtgagatcagcttatgtgagatttgctttcactcaaaaattggtatggaaaataactgttgaaattt

SEQ ID NO: 11506 - protein, 163 aa, Triticum aestivum
  misc_feature (1)..(163): Ceres Seq. ID no. 13655073
MGRGKFKGKPTGRRNFSTPEEIASGTSGRPRSFKKNVAEAEEEEEEVEESEEEESEDDGEEKKHKGTEGVIQIENPNLVKAKNIKAKEADLGKTTELSRREREEIEKQKSHERYMKLQEQGKTEQAKKDLERLALIRQQRADAAKKREEEKAAKEQRKTEARK

SEQ ID NO: 11507 - DNA, 821 bp, Triticum aestivum
  misc_feature (1)..(821): Ceres Seq. ID no. 13655082
agaacatcctaatcgaaaaacaagaggaaacgagctagctagatagcatttggtacacagctacatacatatccggcacgagaggatgtcgttggtgaggttcttcgacaccctggccatggactcgtggaaccccttcggcaccatcttcggcaccacggcgtccagcggcaccgacgcctggctggccagcgacaccacggcgttcgccgacacctacatcgagacccgggagacggcggacgcctacgtcttcagcgccaggctccccgccggtgtcaccaaggaggaggtcaaggtggaggtggaggaggacggcaaggtgctggtcatcgccggcgagcggtgcctgcggagggaggccaagagcgaggcgcgccaccacatcgagcgcagcgtcgccaccttcttcggcaggttccacctccccgacgacgccgccttgggccaggtcagggccgccatggacgacgggggcgcgcagctcaccgtcactgtgcccagggtcggcgccgccgttgccgccgtgaccatgcccgagcctgccggggccatcgaggtcgtcgaggccagcccgtgctgattggctgattgcggcgtactccggtgccgactgcagacagagtgcagacatacgtgcggtaagttgccgctcgtatgatctgctcgatcgggtcctttgggtgtgattccacaaattgtggtgttcgatgtacgtaactacgtacttgagtcggtatgtggcttgctgttgtgacttgtgagtgaggtgcttgcatggttgcctgtactgttacttgttagttctcgtgttcacgctc

SEQ ID NO: 11508 - protein, 165 aa, Triticum aestivum
  misc_feature (1)..(165): Ceres Seq. ID no. 13655083
MSLVRFFDTLAMDSWNPFGTIFGTTASSGTDAWLASDTTAFADTYIETRETADAYVFSARLPAGVTKEEVKVEVEEDGKVLVIAGERCLRREAKSEARHHIERSVATFFGRFHLPDDAALGQVRAAMDDGGAQLTVTVPRVGAAVAAVTMPEPAGAIEVVEASPC

SEQ ID NO: 11509 - protein, 154 aa, Triticum aestivum
  misc_feature (1)..(154): Ceres Seq. ID no. 13655084
MDSWNPFGTIFGTTASSGTDAWLASDTTAFADTYIETRETADAYVFSARLPAGVTKEEVKVEVEEDGKVLVIAGERCLRREAKSEARHHIERSVATFFGRFHLPDDAALGQVRAAMDDGGAQLTVTVPRVGAAVAAVTMPEPAGAIEVVEASPC

SEQ ID NO: 11510 - DNA, 1540 bp, Triticum aestivum
  misc_feature (1)..(1540): Ceres Seq. ID no. 13655089
attcccattcccattcccattccacttccatttccatttcgtcccgtccccattcattcattcgttaccagagagacgagacgacgactaccgggagcgaggggcagagttcggatctctattccggagatttttgtctagttggtggtgaaggaggatgttgagggctgtggcgaggtgctgcgggcactggccgccgggcgcggcggcggcggacggcatgctctggcagacggagctgcggccgcacgcggcgggggagttctccatggccgccgcgcaggccaacctcgtcatggaggaccaggcgcaggtgctcgcctccccctccgccacgctcgtcggcgtctacgacggccacggcggccccgacgcctcccgcttcctccgctccgccctcttcccccacgtccaacgcttcgccagggagcaggggggcgtgaccgcggaggcgatccggagggcgttcggcgcggcggaggaggacttcctgcacgaggtccgccaggcctggcccaagcgcccgcggatggccgccgtcggctcctgctgcctgctcggggccatcgcgggggacacgctctacgtcgccaacctcggcgactcccgcgccgtcctcggccgccgcgtcgtcggcggcggggtggccgtcgccgagcgcctctccaccgaccacaacgtcgcctccgaggaggtccggatggaggtctcctcgcacaacccggacgacgcgcagatcgtggtgcacaccaggggggcctggaggatcaaggggataattcaggtgtcaagatccattggtgatgtatacttgaagaaaccggagtatagcttggacccattatttcggcagatcggccctgttattgcattgaagaggcctgctcttagcgctgaaccacaaatccatgttcgcaagctcaaaccaaacgatcagtttataatatttgcctcggacggtctttgggagcatctcagcgatgatgatgctgtgcaaattgtcttcaagaacccaagaacgggtatagcaaaccgattagtgcggtccgccttgaaggaggccacgaagaagagagaggtcagtgtgcatgacctgaggacgatagagcggggcgtgcggcgccatttccacgacgacatcagcgtcgtcgtggtgtacctcgaccggcaccgcggtcgccgtcagaccagggtggtggactcgagcagcaactgcaccagcgcccccgtcgacatctactcctcctccagctccatccagtcggtgcagccacgtcaggcttaccgtgactccggttaatagaccagataagacgggactccagttagtagaccagataagacgggcagcagaagctcagactatatgatcatggtggtaaacggtggtagggttgcagatcagcaacgcagactgcaacccgcaagctgcagtggcagcgtccgaaagagatgcgcggaatgtacataagtagtgcgggcgcgtggaacttttgtcagaagagatgattttttcgtatgtaattgcagaatttgactc

SEQ ID NO: 11511 - protein, 380 aa, Triticum aestivum
  misc_feature (1)..(380): Ceres Seq. ID no. 13655090
MLRAVARCCGHWPPGAAAADGMLWQTELRPHAAGEFSMAAAQANLVMEDQAQVLASPSATLVGVYDGHGGPDASRFLRSALFPHVQRFAREQGGVTAEAIRRAFGAAEEDFLHEVRQAWPKRPRMAAVGSCCLLGAIAGDTLYVANLGDSRAVLGRRVVGGGVAVAERLSTDHNVASEEVRMEVSSHNPDDAQIVVHTRGAWRIKGIIQVSRSIGDVYLKKPEYSLDPLFRQIGPVIALKRPALSAEPQIHVRKLKPNDQFIIFASDGLWEHLSDDDAVQIVFKNPRTGIANRLVRSALKEATKKREVSVHDLRTIERGVRRHFHDDISVVVVYLDRHRGRRQTRVVDSSSNCTSAPVDIYSSSSSIQSVQPRQAYRDSG

SEQ ID NO: 11512 - protein, 359 aa, Triticum aestivum
  misc_feature (1)..(359): Ceres Seq. ID no. 13655091
MLWQTELRPHAAGEFSMAAAQANLVMEDQAQVLASPSATLVGVYDGHGGPDASRFLRSALFPHVQRFAREQGGVTAEAIRRAFGAAEEDFLHEVRQAWPKRPRMAAVGSCCLLGAIAGDTLYVANLGDSRAVLGRRVVGGGVAVAERLSTDHNVASEEVRMEVSSHNPDDAQIVVHTRGAWRIKGIIQVSRSIGDVYLKKPEYSLDPLFRQIGPVIALKRPALSAEPQIHVRKLKPNDQFIIFASDGLWEHLSDDDAVQIVFKNPRTGIANRLVRSALKEATKKREVSVHDLRTIERGVRRHFHDDISVVVVYLDRHRGRRQTRVVDSSSNCTSAPVDIYSSSSSIQSVQPRQAYRDSG

SEQ ID NO: 11513 - protein, 343 aa, Triticum aestivum
  misc_feature (1)..(343): Ceres Seq. ID no. 13655092
MAAAQANLVMEDQAQVLASPSATLVGVYDGHGGPDASRFLRSALFPHVQRFAREQGGVTAEAIRRAFGAAEEDFLHEVRQAWPKRPRMAAVGSCCLLGAIAGDTLYVANLGDSRAVLGRRVVGGGVAVAERLSTDHNVASEEVRMEVSSHNPDDAQIVVHTRGAWRIKGIIQVSRSIGDVYLKKPEYSLDPLFRQIGPVIALKRPALSAEPQIHVRKLKPNDQFIIFASDGLWEHLSDDDAVQIVFKNPRTGIANRLVRSALKEATKKREVSVHDLRTIERGVRRHFHDDISVVVVYLDRHRGRRQTRVVDSSSNCTSAPVDIYSSSSSIQSVQPRQAYRDSG

SEQ ID NO: 11514 - DNA, 1237 bp, Triticum aestivum
  misc_feature (1)..(1237): Ceres Seq. ID no. 13655117
gttcatttgcagggggctggatcccaggggcagagttgcggtcctccatagctgacggggaagaagcatgggatctggagcaggagccctgctggcgcttgtggcagcatgtctagcgcttgccccgccctgcgctctggcttcttctcgcaagtttggtctggatattgcgcaaccaaaattactgaactccacaaatggttcatttactccaagctcacatgttgattttgacccttcaaaatcaaagcgactctcgtggcatccaagggtcttcttgtatgaaggttttctctctcacatggagtgtgaccacttagtatctatggcacatggtaagatagggtcatctgtacttgttaatgatggtgctacaaatatttcccagaacaatattgatgcaggcctcatatttcgcctggctgatagcaaagacatagttgtttcgaagattgaagataggatatcattatggagttttattccaaaagagcatggggagagcatgcagattttgaagtatggagcaaaccaaagtgaccctaacaaggaagaaactcaatcgagcagtggtgccaataggcttgtgaccattttgatgtatctttctgatatcaagcaaggtggtgaaactgttttccccagatctgagctgaaggatactcaagccaaggaagggacaccttctgaatgtgctggttatgcagtgaaacctgtcaagggcaacacagttctgctgttcaattcaaggcctgacagagtcgccgacaaggacagtcagtacgagttctgtcctgtcgtcgaagtggagaaatggcttgccataaaacatatgtatgcaagcaagattgataaatcaaaaccttcgccggcatccgaggatgatgattgcaccgatgaagatggtaactgtgtcagttgggccgctgccggcgaatgcgacaagaatcctgtgtttatgattggcagttcagactactatggcacttgcaggaagagctgccatgcgtgctagatttttttttttttgttttcgtgcattgcccttagagatgtctcttagcattttcgttgtttaatacaggcattggtgttgtaagtggaaaatgattcagcaaactgtgcaatgcccgcagataatctttactcttgtcaggaatgtagtaagtacataggtattggattggctactcttataaagttatgaaaaatgattctgacctcatcttgttctgtc

SEQ ID NO: 11515 - protein, 315 aa, Triticum aestivum
  misc_feature (1)..(315): Ceres Seq. ID no. 13655118
MGSGAGALLALVAACLALAPPCALASSRKFGLDIAQPKLLNSTNGSFTPSSHVDFDPSKSKRLSWHPRVFLYEGFLSHMECDHLVSMAHGKIGSSVLVNDGATNISQNNIDAGLIFRLADSKDIVVSKIEDRISLWSFIPKEHGESMQILKYGANQSDPNKEETQSSSGANRLVTILMYLSDIKQGGETVFPRSELKDTQAKEGTPSECAGYAVKPVKGNTVLLFNSRPDRVADKDSQYEFCPVVEVEKWLAIKHMYASKIDKSKPSPASEDDDCTDEDGNCVSWAAAGECDKNPVFMIGSSDYYGTCRKSCHAC

SEQ ID NO: 11516 - protein, 237 aa, Triticum aestivum
  misc_feature (1)..(237): Ceres Seq. ID no. 13655119
MECDHLVSMAHGKIGSSVLVNDGATNISQNNIDAGLIFRLADSKDIVVSKIEDRISLWSFIPKEHGESMQILKYGANQSDPNKEETQSSSGANRLVTILMYLSDIKQGGETVFPRSELKDTQAKEGTPSECAGYAVKPVKGNTVLLFNSRPDRVADKDSQYEFCPVVEVEKWLAIKHMYASKIDKSKPSPASEDDDCTDEDGNCVSWAAAGECDKNPVFMIGSSDYYGTCRKSCHAC

SEQ ID NO: 11517 - protein, 229 aa, Triticum aestivum
  misc_feature (1)..(229): Ceres Seq. ID no. 13655120
MAHGKIGSSVLVNDGATNISQNNIDAGLIFRLADSKDIVVSKIEDRISLWSFIPKEHGESMQILKYGANQSDPNKEETQSSSGANRLVTILMYLSDIKQGGETVFPRSELKDTQAKEGTPSECAGYAVKPVKGNTVLLFNSRPDRVADKDSQYEFCPVVEVEKWLAIKHMYASKIDKSKPSPASEDDDCTDEDGNCVSWAAAGECDKNPVFMIGSSDYYGTCRKSCHAC

SEQ ID NO: 11518 - DNA, 1230 bp, Triticum aestivum
  misc_feature (1)..(1230): Ceres Seq. ID no. 13655124
acacccttccagctcgcgacgccacctgagacctgaccacctcggctgctactgctagacgggcacggcctcgccgactccttcttccatcagggttcgacagctcacccttttggatccaagttcaggtttgatctgtgaggaagttcaactctgcagtgctgttccgaatcggaagcttgatcatggaaggagccactcccacttccgctccctcgagcacaaggattgctgtggtcaccggcgggagcaaagggatcgggctggaggcgtgcaagcagctggcaggcggcggcgccatcaccgttgttctgacggccaggaacgagacgaggggaacagcggcggtcgagcagatcaagcggctggggcacgcagatgtcatctttcatcagctggacatcacggatgcttccagcatcgctcgactcgcagatttcctcaagacccgtttcgggaagcttgacatcctggtgaataacgccgcgacggatgggattgagcatgtcattgatccagtttatggcttaacgcccggcgatgaaacgttcaatggcatggacgcgggccagaggatcaattggatgtggaccagctgccgccagacgtacgagaccgcgaaacagggcctgcagacaaactactacggcacgaagcgggtgacggaggctctcctgcccctgctccgatcctcgtccgacggaaggatcgtcaacgtctcctccaacttcggattgctcagctttttcaggaacgaggagctgaagcaggagctgaacgacgtcgacagcctgaccgagkgagaggctggacgagctgctggccatgttcctcaaggacttcgaggccggcggcgcggaggcgcgcgggtggccggccgagttctcggcgtacaaggtggccaaggccgccatgaacgcctactcgagaatcctggccaagaggcacccggagctgcgcgtcaactgcgcgcaccccggctacgtgaagacggatatcaccaggaactccgggatcctgacgccggaggagggcgcgcgcaacatcaccagcgttgcgctgctgccggaaggcgggcccaccggcaagtacttctccgaaggcgaggaggcatccttcgtgtgaaagagcatctgtagtactactgttttgttgcgcttatctgtggtgtgtggtgggataatctgcaaagtcgagttcaaaaaaaggaataaagttacgttagtttgg

SEQ ID NO: 11519 - protein, 317 aa, Triticum aestivum
  misc_feature (1)..(317): Ceres Seq. ID no. 15219205
  misc_feature (206)..(206): Xaa is any aa, unknown or other
MEGATPTSAPSSTRIAVVTGGSKGIGLEACKQLAGGGAITVVLTARNETRGTAAVEQIKRLGHADVIFHQLDITDASSIARLADFLKTRFGKLDILVNNAATDGIEHVIDPVYGLTPGDETFNGMDAGQRINWMWTSCRQTYETAKQGLQTNYYGTKRVTEALLPLLRSSSDGRIVNVSSNFGLLSFFRNEELKQELNDVDSLTEXEAGRAAGHVPQGLRGRRRGGARVAGRVLGVQGGQGRHERLLENPGQEAPGAARQLRAPRLREDGYHQELRDPDAGGGRAQHHQRCAAAGRRAHRQVLLRRRGGILRVKEHL

SEQ ID NO: 11520 - protein, 193 aa, Triticum aestivum
  misc_feature (1)..(193): Ceres Seq. ID no. 15219206
  misc_feature (82)..(82): Xaa is any aa, unknown or other
MDAGQRINWMWTSCRQTYETAKQGLQTNYYGTKRVTEALLPLLRSSSDGRIVNVSSNFGLLSFFRNEELKQELNDVDSLTEXEAGRAAGHVPQGLRGRRRGGARVAGRVLGVQGGQGRHERLLENPGQEAPGAARQLRAPRLREDGYHQELRDPDAGGGRAQHHQRCAAAGRRAHRQVLLRRRGGILRVKEHL

SEQ ID NO: 11521 - protein, 184 aa, Triticum aestivum
  misc_feature (1)..(184): Ceres Seq. ID no. 15219207
  misc_feature (73)..(73): Xaa is any aa, unknown or other
MWTSCRQTYETAKQGLQTNYYGTKRVTEALLPLLRSSSDGRIVNVSSNFGLLSFFRNEELKQELNDVDSLTEXEAGRAAGHVPQGLRGRRRGGARVAGRVLGVQGGQGRHERLLENPGQEAPGAARQLRAPRLREDGYHQELRDPDAGGGRAQHHQRCAAAGRRAHRQVLLRRRGGILRVKEHL

SEQ ID NO: 11522 - DNA, 1438 bp, Triticum aestivum
  misc_feature (1)..(1438): Ceres Seq. ID no. 13655131
gtcggtcacgcgcttctcttctccctcagatcagatgagagcagagcagagcagagaatgattgattgattgattgattgattgattgcagaagaggacgggcgagctagggttccttctccttccttccttgggacgaccagagccatggacatggaggattcctcctcctgctcctcctcctcgccggcgccggcggcggacttggtcgactacctgggtcccgacacctccgtcaccgtcttcaccatgctccaccaccccgccgacctcgcacgcgcatccgccgtctcccgatcctggcgacaattcgttatcgacaaccagttcagcaagctgcagtgcctgcgggcctgcccggagctctccaccttcacccaagtcgacatcaccaccacctccggctccagaaccccggcacgccgggaccaggacaccaccaccgggtcgagcgccgaggacgagaagctccacagggtgtacacgcacctcggccacggcctcctctcgccctacaagcccagggactgcatcatccactgcatcggcgcctccagcaccgacaacttccccgacgagaccatcgagaacaccctcgagcccgtcgaccacctcgagtccaacaggccctcctactggtccagcggcggccagagggaccccgccgtgcccgagtgcctcatatatcgcctccaggccgatctctgcctcatccaagagatcaagctgcagccattcaaagcgtttttccagcatggcgatcccatatattcgccaaagagcatccgcatccagatgggctatccaaggtcaccgctacgccctgaagcacttgtctgtgatgaaaatgaaggccagttgattgatgatagaaactacgtctggacctacacatctccagaattcccaatgctgcaggaaaatgttttgcaatcctttaagttaccacggccggttctgtgtattggcggggtggtgaaggttgagcttcttgggagagttcagaaacaggcaatcgatggcctctactacatatgcatatctcatgtccaaatagtggggaaggcactgtcccgagacctgggggttgttcctcgcgggaacggcctggtcctgaactactatctggatccccgtacatgcggcgttccccgccgtgaaccgtcacgggacgatgggcgcagcaggtggcagggcctggcgtcaaggatctggcattctggcacggcgcgagggataggaggtctgaaccaaacgctgttgagtagactgtttggcggtccgttgcggctcgtggtcgtagcggacgaatcggaaggggaggaggaggaggatcttccttagaaggaaggaaggagctcaagggaggagggtcttatttgatttgatttgatcttctgcacaaaagaaacatgtgatagttacatatataagagtg

SEQ ID NO: 11523 - protein, 398 aa, Triticum aestivum
  misc_feature (1)..(398): Ceres Seq. ID no. 15219208
MDMEDSSSCSSSSPAPAADLVDYLGPDTSVTVFTMLHHPADLARASAVSRSWRQFVIDNQFSKLQCLRACPELSTFTQVDITTTSGSRTPARRDQDTTTGSSAEDEKLHRVYTHLGHGLLSPYKPRDCIIHCIGASSTDNFPDETIENTLEPVDHLESNRPSYWSSGGQRDPAVPECLIYRLQADLCLIQEIKLQPFKAFFQHGDPIYSPKSIRIQMGYPRSPLRPEALVCDENEGQLIDDRNYVWTYTSPEFPMLQENVLQSFKLPRPVLCIGGVVKVELLGRVQKQAIDGLYYICISHVQIVGKALSRDLGVVPRGNGLVLNYYLDPRTCGVPRREPSRDDGRSRWQGLASRIWHSGTARGIGGLNQTLLSRLFGGPLRLVVVADESEGEEEEDLP

SEQ ID NO: 11524 - protein, 396 aa, Triticum aestivum
  misc_feature (1)..(396): Ceres Seq. ID no. 15219209
MEDSSSCSSSSPAPAADLVDYLGPDTSVTVFTMLHHPADLARASAVSRSWRQFVIDNQFSKLQCLRACPELSTFTQVDITTTSGSRTPARRDQDTTTGSSAEDEKLHRVYTHLGHGLLSPYKPRDCIIHCIGASSTDNFPDETIENTLEPVDHLESNRPSYWSSGGQRDPAVPECLIYRLQADLCLIQEIKLQPFKAFFQHGDPIYSPKSIRIQMGYPRSPLRPEALVCDENEGQLIDDRNYVWTYTSPEFPMLQENVLQSFKLPRPVLCIGGVVKVELLGRVQKQAIDGLYYICISHVQIVGKALSRDLGVVPRGNGLVLNYYLDPRTCGVPRREPSRDDGRSRWQGLASRIWHSGTARGIGGLNQTLLSRLFGGPLRLVVVADESEGEEEEDLP

SEQ ID NO: 11525 - protein, 364 aa, Triticum aestivum
  misc_feature (1)..(364): Ceres Seq. ID no. 15219210
MLHHPADLARASAVSRSWRQFVIDNQFSKLQCLRACPELSTFTQVDITTTSGSRTPARRDQDTTTGSSAEDEKLHRVYTHLGHGLLSPYKPRDCIIHCIGASSTDNFPDETIENTLEPVDHLESNRPSYWSSGGQRDPAVPECLIYRLQADLCLIQEIKLQPFKAFFQHGDPIYSPKSIRIQMGYPRSPLRPEALVCDENEGQLIDDRNYVWTYTSPEFPMLQENVLQSFKLPRPVLCIGGVVKVELLGRVQKQAIDGLYYICISHVQIVGKALSRDLGVVPRGNGLVLNYYLDPRTCGVPRREPSRDDGRSRWQGLASRIWHSGTARGIGGLNQTLLSRLFGGPLRLVVVADESEGEEEEDLP

SEQ ID NO: 11526 - DNA, 1276 bp, Triticum aestivum
  misc_feature (1)..(1276): Ceres Seq. ID no. 13655193
ttttttctactgctctcgccgctggaacctgacggaaaaaccctacctcgccgtcgccccatcgtcgaacttcccgatggcgtcgaggtgcgcggcgaggcttccgcacccgccgtgcgcggcgccgcagcacggttgggcgagctcgcgggtctcggcacgcccggcgcaatccggcgcgtcaagagggcgtgccgtcgcgtgcgccgtcagcttcaggccatgtatcgacattcacaaggggaaagttaaacagattgttggctctactctccgggatgcatcggatgatggcactgcactggtgacgaactttgaatcagacaagtctccagcagaatttgcaaatatttataaagaagatggacttgttggtggacatgtaataatgcttggcggagaccctgcaagccgttctgctgccctggaagcactgcatgcatatcctggtggtttgcaagttggaggtggaataaatttggagaatgcaatgtcataccttaatgaaggagcaagtcacgtgattgtaacttcttatgtgtttagtgatggcaaaatgaacattgaaaggctaacgcaacttgtcgagcttgttgggaaacaaaggcttattttggacctgagttgtcggaaaaaggatggcagatatgccattgtgactgacagatggcagaagttcagtgatgtctttgtggatgggccaacattagaacgtcttgctgcatatgcagatgagtttttggttcatggagttgatgtggagggcaaaaggttaggaattgacgaggaacttgtggaactattgggaagccattcacctatcccgacaacatatgctgggggtgtgtcaacgatggacgacctggagaggatcaagaaagcagggaaaggtcgagtcgatgtcactgtcgggagtgccctagacatattcgggggagatttgccctacgatactgttgtccgttggcacaaggagcaaaacctggttagccaacggtgaagaaatcagatgatctttttatagagcaaatgatcgaagttcagctcatgtgtgatccccacctgaccatggtcaggtcaggttatagagctttattgtttgctggacattgtagtgtgaaccgcgtagtgtgaatgtgtcttgtgtgacatgtcaaagctgaagcggaggtgtcaactcagtgtcgtagaggaccacccggtattcagatactgttcttcacattctgtttgtattgtagtactggtaatggtgaataaacaggggttgaactgc

SEQ ID NO: 11527 - protein, 332 aa, Triticum aestivum
  misc_feature (1)..(332): Ceres Seq. ID no. 13655194
FFYCSRRWNLTEKPYLAVAPSSNFPMASRCAARLPHPPCAAPQHGWASSRVSARPAQSGASRGRAVACAVSFRPCIDIHKGKVKQIVGSTLRDASDDGTALVTNFESDKSPAEFANIYKEDGLVGGHVIMLGGDPASRSAALEALHAYPGGLQVGGGINLENAMSYLNEGASHVIVTSYVFSDGKMNIERLTQLVELVGKQRLILDLSCRKKDGRYAIVTDRWQKFSDVFVDGPTLERLAAYADEFLVHGVDVEGKRLGIDEELVELLGSHSPIPTTYAGGVSTMDDLERIKKAGKGRVDVTVGSALDIFGGDLPYDTVVRWHKEQNLVSQR

SEQ ID NO: 11528 - protein, 307 aa, Triticum aestivum
  misc_feature (1)..(307): Ceres Seq. ID no. 13655195
MASRCAARLPHPPCAAPQHGWASSRVSARPAQSGASRGRAVACAVSFRPCIDIHKGKVKQIVGSTLRDASDDGTALVTNFESDKSPAEFANIYKEDGLVGGHVIMLGGDPASRSAALEALHAYPGGLQVGGGINLENAMSYLNEGASHVIVTSYVFSDGKMNIERLTQLVELVGKQRLILDLSCRKKDGRYAIVTDRWQKFSDVFVDGPTLERLAAYADEFLVHGVDVEGKRLGIDEELVELLGSHSPIPTTYAGGVSTMDDLERIKKAGKGRVDVTVGSALDIFGGDLPYDTVVRWHKEQNLVSQR

SEQ ID NO: 11529 - protein, 203 aa, Triticum aestivum
  misc_feature (1)..(203): Ceres Seq. ID no. 13655196
MLGGDPASRSAALEALHAYPGGLQVGGGINLENAMSYLNEGASHVIVTSYVFSDGKMNIERLTQLVELVGKQRLILDLSCRKKDGRYAIVTDRWQKFSDVFVDGPTLERLAAYADEFLVHGVDVEGKRLGIDEELVELLGSHSPIPTTYAGGVSTMDDLERIKKAGKGRVDVTVGSALDIFGGDLPYDTVVRWHKEQNLVSQR

SEQ ID NO: 11530 - DNA, 890 bp, Triticum aestivum
  misc_feature (1)..(890): Ceres Seq. ID no. 13655197
cagatttacagagttctagaatagaagatgatctggtggttacctctctattatttactcgaatgactgtacttatatcttacgttcaaactttacccgatcttggtttagtttccatctccaatcagattaatggtttgcggaccaaagccaatgttttatggagttcttattcctaatttagttatacatttcatttgtagtttcttggtagataataagcagtggcagatgaaccaataagttatctgtgcccatgctttattgtaagcgttaaatttgctctctggtattactttcaatgtgttatccatacccatgctttttgcggttaattatcatgtcttatcaacttatgcagagtccatgatatcatacagtttgaagtcaaaaaattcatgatatgggtgatatggaaaagtcattgccttctttgctggaacattccctgattgcctggacttcttgggtcaatcgctggacgccacccccgtctcctggacgtcatgacgccgccgatttccttgacgccgcgtgccaccgatcttctataactcaatttctccaatttctctcggctgtgagctcatatatatttttgagttgtgaacatattatgtaaactcaacactttgttttgtgacaagtgaactcatttcatattcatctatcaatcatggttgaagtgtctaaaaaaaaaaaaaaaaaaaaaaaaaaaaaaaaaaaaaaaaaaaaaaaaaaaaaaaaaaaaaaaaccaaaaaaaaaaaaaaaaaggtttatcaaaaccgccaacctcaaggggggccccgaaaccaaattccccaaaaaggaagccaaataacccgcgctaattgcccgccttttaaaaacgccgaaatggaaaaaaccc

SEQ ID NO: 11531 - protein, 72 aa, Triticum aestivum
  misc_feature (1)..(72): Ceres Seq. ID no. 15219719
MGDMEKSLPSLLEHSLIAWTSWVNRWTPPPSPGRHDAADFLDAACHRSSITQFLQFLSAVSSYIFLSCEHIM

SEQ ID NO: 11532 - protein, 71 aa, Triticum aestivum
  misc_feature (1)..(71): Ceres Seq. ID no. 15219720
MVEVSKKKKKKKKKKKKKKKKKKKKKTKKKKKKVYQNRQPQGGPRNQIPQKGSQITRANCPPFKNAEMEKT

SEQ ID NO: 11533 - protein, 69 aa, Triticum aestivum
  misc_feature (1)..(69): Ceres Seq. ID no. 15219721
MEKSLPSLLEHSLIAWTSWVNRWTPPPSPGRHDAADFLDAACHRSSITQFLQFLSAVSSYIFLSCEHIM

SEQ ID NO: 11534 - DNA, 1264 bp, Triticum aestivum
  misc_feature (1)..(1264): Ceres Seq. ID no. 13655237
aaggattcatctcgtttacctcttctctgcaaggatccctcgagtattcccctcaagctcctcagaaatggcgaccggaagtaatagtagtagccaagagagcaagcagccaggccccgagctgcccaagcagctgccgttcgattttctcaagaaaatcaccaacgatttcggccaagaccggaagataagcggaagccccttcggcacactctacaaggggattgtgccagatgacggcagagtgattgccgtgaagaaacttcaggagaacgcgccaatgccagcagataagcagttcaacagagaggtccagaatgtgatgtccctcaagcatgagaacatagtggagcttgtcgggttctgctgcgaaacgcagaagaaactggtgcagtttgataagagatacatccaggcggacatcaccgaaagcttaatctgctatgagtatttacctaatgggagccttcaggagaatctttttgagcccaaggggtccactaaaccagaaattggttgggacgtacgcttcaaaataatcaaggggatttgccaaggcttacgttttctacacaagttggatattcccattgtccatatggatttgaagcctgagaatatactgttggatgcaaatatggtgccaaagatagcggattttgcactctcaagggtctttggccaagaacaaaccagactctgcacgcaaacagttgtcggatcatatgggtacatggctccagaatatctttacagaggtgaaatatcagcccagtcagacatatacagtttaggcctagtgataattgagatcaccactggagagcagaatcctcgcgaaaaagaccaaccatctgcaagaagttttgttgataaagtgcgtaaagaatggacgctggagaacataacatccaaatattcatcactggatcatgaaagcctccaacaagttaaaacatgcattgatatcgggtcaaactgtgttgagattgataggacaaaaagacctcgcatagaagaaattgttgactcgctcaacggactacgttcaagccaaaaagttaccgaggtctcccgtccgcctacaactggcaagaagctaatgggctccatttttggtctgaagaaatgaaacatgcacgcctgttactgctggaagattgtaactttaatttggaaataggagcctttgttgccatctcgtcctggaagcatttaagtgtaattttcttatgtgtaatatgtctttttattactattagtc

SEQ ID NO: 11535 - protein, 376 aa, Triticum aestivum
  misc_feature (1)..(376): Ceres Seq. ID no. 13655238
RIHLVYLFSARIPRVFPSSSSEMATGSNSSSQESKQPGPELPKQLPFDFLKKITNDFGQDRKISGSPFGTLYKGIVPDDGRVIAVKKLQENAPMPADKQFNREVQNVMSLKHENIVELVGFCCETQKKLVQFDKRYIQADITESLICYEYLPNGSLQENLFEPKGSTKPEIGWDVRFKIIKGICQGLRFLHKLDIPIVHMDLKPENILLDANMVPKIADFALSRVFGQEQTRLCTQTVVGSYGYMAPEYLYRGEISAQSDIYSLGLVIIEITTGEQNPREKDQPSARSFVDKVRKEWTLENITSKYSSLDHESLQQVKTCIDIGSNCVEIDRTKRPRIEEIVDSLNGLRSSQKVTEVSRPPTTGKKLMGSIFGLKK

SEQ ID NO: 11536 - protein, 354 aa, Triticum aestivum
  misc_feature (1)..(354): Ceres Seq. ID no. 13655239
MATGSNSSSQESKQPGPELPKQLPFDFLKKITNDFGQDRKISGSPFGTLYKGIVPDDGRVIAVKKLQENAPMPADKQFNREVQNVMSLKHENIVELVGFCCETQKKLVQFDKRYIQADITESLICYEYLPNGSLQENLFEPKGSTKPEIGWDVRFKIIKGICQGLRFLHKLDIPIVHMDLKPENILLDANMVPKIADFALSRVFGQEQTRLCTQTVVGSYGYMAPEYLYRGEISAQSDIYSLGLVIIEITTGEQNPREKDQPSARSFVDKVRKEWTLENITSKYSSLDHESLQQVKTCIDIGSNCVEIDRTKRPRIEEIVDSLNGLRSSQKVTEVSRPPTTGKKLMGSIFGLKK

SEQ ID NO: 11537 - protein, 283 aa, Triticum aestivum
  misc_feature (1)..(283): Ceres Seq. ID no. 13655240
MPADKQFNREVQNVMSLKHENIVELVGFCCETQKKLVQFDKRYIQADITESLICYEYLPNGSLQENLFEPKGSTKPEIGWDVRFKIIKGICQGLRFLHKLDIPIVHMDLKPENILLDANMVPKIADFALSRVFGQEQTRLCTQTVVGSYGYMAPEYLYRGEISAQSDIYSLGLVIIEITTGEQNPREKDQPSARSFVDKVRKEWTLENITSKYSSLDHESLQQVKTCIDIGSNCVEIDRTKRPRIEEIVDSLNGLRSSQKVTEVSRPPTTGKKLMGSIFGLKK

SEQ ID NO: 11538 - DNA, 1653 bp, Triticum aestivum
  misc_feature (1)..(1653): Ceres Seq. ID no. 13655244
aaaaaaactctccaagcgaatcccatttccgccggtcctcccttcgccaagccatcggcgactgctgcagcacagcctcctccccctcctcatggccgacccctccttctcctcccccacggcggcctccgcaggcgacgccctccccgcgccggcggcttccgacgcgccggaggtgaccctccccgccgccgcccccgacctggacaaggagttcgggttccagcgggcggagctcggtaaggagaagctcgccgggacggtgggcttccacgagcgccacgtgttcctctgctacaagggccctgaggagtggccatcccacgtcgaggcctccgagtccgaccacctcccccgcctcctcgccgccgccatcaaggcccgcaagcccaatctgaagaagagcaccaaactgacaatttgtgaaggagaagatggcactgagtcatctcttggagacgtgttgatctttcctgatatgatccgatacagagagctgacccaccttgatgtcgacaactttgtggatgaagtactcgtgaaagatactgaatggcttcctggatctcctgaggctataaaaggttcctatgtttttgtctgctgccatggaagcagggataaaaggtgtggtgtttgcggtcctgctctgattacaaggttcaaggaagggattgaaggacaaggtcttcatggtcaggtggctgttagtgcatgctcacacgttggaggtcacaagtatgcaggaaatgtcatcatattcagtccagatgccaagggagaagtgactggtcattggtatggttatgttgctcctgatgatgtgcctgtgttactgcgtcaacatatcggacaaggagagatcgtgggccatctatggaggggccagttgggtttgtctgaagagcagcagaagaaagctctggagcttaggcgcgcgacgaatggcctgactgaggaagaatcaagcgccaaagaatcccctgaagcaaatggagccaacggtgctgcttgcaaccctgcacctgcaggtggatgctgccagggcaatggaggaggtttaacctgctgccaaagtgatctgccagcaggaaaacaggataagagcgtcccagctgagcagaaccacaagagctctacgacagagagtgacaaagaaaacggtgctgccagcaagaaggggcgcatgaagatttgccggatgcccacctggttcgagacctgggacaagtccgacacctacaccactcttgctgttgttgcttctgctgcaaccgtgttcgccgccttcaggtgctacaaggccatgaactgaaccctcaaaacaaggccaggttctttgcaccaaggacagtctaccgcagtaaaacaatccgatttgaaaataatatactgcctgtgcatatcaagataatatgcgttaggactttagaaagtacagtagctgatctggagatggcgatgaaaatctgttatgcgtaatgccctcatgtactaaaagtctaaaactcgtaagtttgaagttccccacgccttggctgcatggctgtggctgtggtgttcagcgtgatgatgatgttatgctcgtttggctggaactgggatgcttgcgttagaaaaactgtgcattgctggcatttgcttctttgaagc

SEQ ID NO: 11539 - protein, 437 aa, Triticum aestivum
  misc_feature (1)..(437): Ceres Seq. ID no. 13655245
KKLSKRIPFPPVLPSPSHRRLLQHSLLPLLMADPSFSSPTAASAGDALPAPAASDAPEVTLPAAAPDLDKEFGFQRAELGKEKLAGTVGFHERHVFLCYKGPEEWPSHVEASESDHLPRLLAAAIKARKPNLKKSTKLTICEGEDGTESSLGDVLIFPDMIRYRELTHLDVDNFVDEVLVKDTEWLPGSPEAIKGSYVFVCCHGSRDKRCGVCGPALITRFKEGIEGQGLHGQVAVSACSHVGGHKYAGNVIIFSPDAKGEVTGHWYGYVAPDDVPVLLRQHIGQGEIVGHLWRGQLGLSEEQQKKALELRRATNGLTEEESSAKESPEANGANGAACNPAPAGGCCQGNGGGLTCCQSDLPAGKQDKSVPAEQNHKSSTTESDKENGAASKKGRMKICRMPTWFETWDKSDTYTTLAVVASAATVFAAFRCYKAMN

SEQ ID NO: 11540 - protein, 407 aa, Triticum aestivum
  misc_feature (1)..(407): Ceres Seq. ID no. 13655246
MADPSFSSPTAASAGDALPAPAASDAPEVTLPAAAPDLDKEFGFQRAELGKEKLAGTVGFHERHVFLCYKGPEEWPSHVEASESDHLPRLLAAAIKARKPNLKKSTKLTICEGEDGTESSLGDVLIFPDMIRYRELTHLDVDNFVDEVLVKDTEWLPGSPEAIKGSYVFVCCHGSRDKRCGVCGPALITRFKEGIEGQGLHGQVAVSACSHVGGHKYAGNVIIFSPDAKGEVTGHWYGYVAPDDVPVLLRQHIGQGEIVGHLWRGQLGLSEEQQKKALELRRATNGLTEEESSAKESPEANGANGAACNPAPAGGCCQGNGGGLTCCQSDLPAGKQDKSVPAEQNHKSSTTESDKENGAASKKGRMKICRMPTWFETWDKSDTYTTLAVVASAATVFAAFRCYKAMN

SEQ ID NO: 11541 - protein, 278 aa, Triticum aestivum
  misc_feature (1)..(278): Ceres Seq. ID no. 13655247
MIRYRELTHLDVDNFVDEVLVKDTEWLPGSPEAIKGSYVFVCCHGSRDKRCGVCGPALITRFKEGIEGQGLHGQVAVSACSHVGGHKYAGNVIIFSPDAKGEVTGHWYGYVAPDDVPVLLRQHIGQGEIVGHLWRGQLGLSEEQQKKALELRRATNGLTEEESSAKESPEANGANGAACNPAPAGGCCQGNGGGLTCCQSDLPAGKQDKSVPAEQNHKSSTTESDKENGAASKKGRMKICRMPTWFETWDKSDTYTTLAVVASAATVFAAFRCYKAMN

SEQ ID NO: 11542 - DNA, 836 bp, Triticum aestivum
  misc_feature (1)..(836): Ceres Seq. ID no. 13655262
aacatcctaatcgaaaaaaaaagaatactagtcgctggacctcatcgatggccgtccggtgtcacgctgctgctaccttggtctcgtcccgagcgcacctgtcctcgtacctcccgcccctcctcccctccgcgcgaccccgacccaggacgacccgcagcggcggcggcagctacaggcgggccgccgttcgcgccatgggcgccgcgccgtcttcgccctcgccgtccggacaagccccagggaaagcggataacgcgtctctgagtgatgaggagttgaagaagcgcctcacaaaagaacagtattacgtcactcggcagaagggaactgagagggcattcacaggggaatactggaacactaaaaccccaggcatctaccattgcatctgctgtgacacccctctgtttgagtcatcaaccaagtttgatagtggtactggatggccgtcctattaccagccggttggcgacaatgtgaaaagcaagcttgatatgtcgatcttcttcatgcctcggaccgagtccctgtgtgccgtctgcgacgctcacctggggcatgttttcgacgacgggccaccgccgactgggaagagatattgcatcaacagcgcgtctctgaagtttaagccccagtagtccctggaagaagaatcaagatgcaagcaccagtgcgtcccatgtaaattttggttttggtatgaactatttccagtgtagtagcctagtccgcccggtctgcgcatgtaaattgataatttccaggtttgtaatttgtaaagccatttgtccgaaacatctgcatgttcctccatgagcagtaccgtttggccc

SEQ ID NO: 11543 - protein, 212 aa, Triticum aestivum
  misc_feature (1)..(212): Ceres Seq. ID no. 15219722
HPNRKKKNTSRWTSSMAVRCHAAATLVSSRAHLSSYLPPLLPSARPRPRTTRSGGGSYRRAAVRAMGAAPSSPSPSGQAPGKADNASLSDEELKKRLTKEQYYVTRQKGTERAFTGEYWNTKTPGIYHCICCDTPLFESSTKFDSGTGWPSYYQPVGDNVKSKLDMSIFFMPRTESLCAVCDAHLGHVFDDGPPPTGKRYCINSASLKFKPQ

SEQ ID NO: 11544 - protein, 197 aa, Triticum aestivum
  misc_feature (1)..(197): Ceres Seq. ID no. 15219723
MAVRCHAAATLVSSRAHLSSYLPPLLPSARPRPRTTRSGGGSYRRAAVRAMGAAPSSPSPSGQAPGKADNASLSDEELKKRLTKEQYYVTRQKGTERAFTGEYWNTKTPGIYHCICCDTPLFESSTKFDSGTGWPSYYQPVGDNVKSKLDMSIFFMPRTESLCAVCDAHLGHVFDDGPPPTGKRYCINSASLKFKPQ

SEQ ID NO: 11545 - protein, 147 aa, Triticum aestivum
  misc_feature (1)..(147): Ceres Seq. ID no. 15219724
MGAAPSSPSPSGQAPGKADNASLSDEELKKRLTKEQYYVTRQKGTERAFTGEYWNTKTPGIYHCICCDTPLFESSTKFDSGTGWPSYYQPVGDNVKSKLDMSIFFMPRTESLCAVCDAHLGHVFDDGPPPTGKRYCINSASLKFKPQ

SEQ ID NO: 11546 - DNA, 1451 bp, Triticum aestivum
  misc_feature (1)..(1451): Ceres Seq. ID no. 13655338
aaaatttggtccagcgaacgcagagcggataccaaccaggtgagccatcaaagccgcttctcttcccctaaaacctagcccgcaaatcccaatccagcccacgcgcctcccccccaaaccctcgtccccaagctcgcgaacctcgccgccgccaccgcccgcaccaccaccggccgctccgcgcgaccgcccaccatggcgcgtaacgaggagaaggcgcagtccatgctgaaccgcttcatcacgatgaagcaggaggagaagcgcaagccccgcgagcgccggccgtacctcgcctccgagtgccgggacctcgctgacgccgaccgctggcgtggagagatcctgcgcgagatcggcgtcaaggtcgccgagatccagaacgagggcctcggggagcaccgcctccgagacctcaacgacgagatcaacaagctcctccgcgagcgcagccactgggagcgccgcatcctcgagctcggaggccgcgactactctcgcagctccaacgccgccctcatgaccgacctcgacggcaacatcgtcgccatccccaacccctccggccggggcccaggctaccgctactttggcgctgccaagaagctccccggcgtccgtgagctatttgacaagccacctgaggtccgcaagcgccgcacccgctatgagatccacaagcgcatcaatgccgggtactacggatactatgacgatgaggacggtgtgcttgagccccttgaggctgctgccgagaagcgcatgcgggacgaggttgtcacggagtggcaccgggtggagcgtgtgcggcgggaggccatgaagaatgtggtgagtggcgaggtggctgcagcaggtgggcgtggtggggaagctgctagggaggtgctgttcgaggaggtggaggaggaggttgaggaggagaggaggctggaggaagagaggatggaaagagagaagggggaagaggctgggagggagtttgtcgcacatgtgccgctccctgatgagaaggagattgagcggatggtgctagagaagaagaagaaggagctgctcagcaagtacacaagtgataccctgcaaggcgagcagaaggaggctaaggagatgctcaatgtgcaacgctaggagagatgttggccattgctgaatccttcacggtattgagacgagtgaagtgcgaggagcaatatgtgcagtgctggacaagcgttgacgcaaccctagaagatctgatgctgaaaacgctgaagggcttcgctgcaatcatgttgatcgatgtgatgtttattaccctagaatgattgatgccaaaagggtaaacctgagatagtggtggtgaaccgtcactgtgcatggatgtgctgtattcactggcactgtacaagtacatccattggctacgcatatatctaaaaaactactagaccataatgaaagcaattctg

SEQ ID NO: 11547 - protein, 311 aa, Triticum aestivum
  misc_feature (1)..(311): Ceres Seq. ID no. 13655339
MARNEEKAQSMLNRFITMKQEEKRKPRERRPYLASECRDLADADRWRGEILREIGVKVAEIQNEGLGEHRLRDLNDEINKLLRERSHWERRILELGGRDYSRSSNAALMTDLDGNIVAIPNPSGRGPGYRYFGAAKKLPGVRELFDKPPEVRKRRTRYEIHKRINAGYYGYYDDEDGVLEPLEAAAEKRMRDEVVTEWHRVERVRREAMKNVVSGEVAAAGGRGGEAAREVLFEEVEEEVEEERRLEEERMEREKGEEAGREFVAHVPLPDEKEIERMVLEKKKKELLSKYTSDTLQGEQKEAKEMLNVQR

SEQ ID NO: 11548 - protein, 301 aa, Triticum aestivum
  misc_feature (1)..(301): Ceres Seq. ID no. 13655340
MLNRFITMKQEEKRKPRERRPYLASECRDLADADRWRGEILREIGVKVAEIQNEGLGEHRLRDLNDEINKLLRERSHWERRILELGGRDYSRSSNAALMTDLDGNIVAIPNPSGRGPGYRYFGAAKKLPGVRELFDKPPEVRKRRTRYEIHKRINAGYYGYYDDEDGVLEPLEAAAEKRMRDEVVTEWHRVERVRREAMKNVVSGEVAAAGGRGGEAAREVLFEEVEEEVEEERRLEEERMEREKGEEAGREFVAHVPLPDEKEIERMVLEKKKKELLSKYTSDTLQGEQKEAKEMLNVQR

SEQ ID NO: 11549 - protein, 294 aa, Triticum aestivum
  misc_feature (1)..(294): Ceres Seq. ID no. 13655341
MKQEEKRKPRERRPYLASECRDLADADRWRGEILREIGVKVAEIQNEGLGEHRLRDLNDEINKLLRERSHWERRILELGGRDYSRSSNAALMTDLDGNIVAIPNPSGRGPGYRYFGAAKKLPGVRELFDKPPEVRKRRTRYEIHKRINAGYYGYYDDEDGVLEPLEAAAEKRMRDEVVTEWHRVERVRREAMKNVVSGEVAAAGGRGGEAAREVLFEEVEEEVEEERRLEEERMEREKGEEAGREFVAHVPLPDEKEIERMVLEKKKKELLSKYTSDTLQGEQKEAKEMLNVQR

SEQ ID NO: 11550 - DNA, 719 bp, Triticum aestivum
  misc_feature (1)..(719): Ceres Seq. ID no. 13655353
ccattgactctctcaatcgaaacccagttctgcgtgggccgggagggttggagtggggagccgacgaggcggcagcggagggggatcgccggagacgggatggacgtgccgtggctgctggtggcgcacgggtccgtgacggcgctggtggttgtgtcgtttctctgcgggcagtggcccatcttcgagggcaccttcgttcagagcatcaaccacttcctcacctccggagcctaccgccactttctgtgcgcgctgcacgcctcctcccgttccctcacaccgcctcttccgcttctcacttagtgaagattgtttgcgcaggcggctcgtgcaggcggcgtgcggtactggagccagggatctcgtgctcggcgtcgagcagtactgctgcgaccgccctaaccctatcctgcaggtgcacgtggtgctgagtatctatgtgtgttgtaacgcctgctcatatcatgaaaagttagggtgtttgattttgatgctatgttatgcgagattgttgcttgggattggctgatatgatattgctctcttatgctgagttgaatcaaccaaggtagagagtttattgaatcagaatgtggtcggttgaatagagaaagagtttgtcaggggttttgggtctgttgatgatgaatggatgaatgttgagcgatttggtggttggttgtctacagacagttatgagatatgctttgttgtgg

SEQ ID NO: 11551 - protein, 143 aa, Triticum aestivum
  misc_feature (1)..(143): Ceres Seq. ID no. 13655354
IDSLNRNPVLRGPGGLEWGADEAAAEGDRRRRDGRAVAAGGARVRDGAGGCVVSLRAVAHLRGHLRSEHQPLPHLRSLPPLSVRAARLLPFPHTASSASHLVKIVCAGGSCRRRAVLEPGISCSASSSTAATALTLSCRCTWC

SEQ ID NO: 11552 - protein, 101 aa, Triticum aestivum
  misc_feature (1)..(101): Ceres Seq. ID no. 13655355
PLTLSIETQFCVGREGWSGEPTRRQRRGIAGDGMDVPWLLVAHGSVTALVVVSFLCGQWPIFEGTFVQSINHFLTSGAYRHFLCALHASSRSLTPPLPLLT

SEQ ID NO: 11553 - protein, 68 aa, Triticum aestivum
  misc_feature (1)..(68): Ceres Seq. ID no. 13655356
MDVPWLLVAHGSVTALVVVSFLCGQWPIFEGTFVQSINHFLTSGAYRHFLCALHASSRSLTPPLPLLT

SEQ ID NO: 11554 - DNA, 1169 bp, Triticum aestivum
  misc_feature (1)..(1169): Ceres Seq. ID no. 13655404
ccagctctagcagtcccggctttccctgctcgcctcgcagtcgccgccgccgccgccagccatgggtcgcaccaaggacgagctcctcgcgcgcctcgaggagcttaagattgatttcaagcgctacgaccacccggttgtgctgacggtcgaggaacaggccaaacatgtgggaagttttggaggtgctttgaccaagaatctgcttctgaaggacaagaagcatcgcttgtacattgtttctgcacttgctgacaccaaagttgacatgaaaattctgtcccagcgtcttggcttgggaaaaggtggtgtgcgaatggctcctgaggagaatttgcgtcaagtgcttcaggtaccgttaggatgtgttactccgtttgcgctattcaatgagtccgcgagtgccgtctcattattactggaccaagggttcaagtctaaacagagctgctacttccatccactgacaaatgatgtgactattgccctcagttcaagcaacctggacaagtttctcctctccattgggaagcaaccagcttatgtagacttggaggcctcaccagtggtaggtaaagataatccccctgatctagcagatcttgtgccttctggtgcactctgttcctcagaagaatcagttgagaatccgactcctaaagatgctcctcaagtcaacgtacccaaacagaaaacgtgtctaccagaagtgaaggctaagcccaaagttcagaacaagggtgcagaaagttcagagagtaaagttcctactaataatggcgcaaatgttgagatatttgcaagtgatgtgcttgaggtcatcttcccattgttcctgtctgagacatcaaagaaattgaatattaaacaggaagagcttactcaaattttaaaattagatgactttaaacgacgagctgctccagatctggagagtgcaacgaatatgttcaaaaacatggcatacagtgcaggatttcacgctggcttcgataccatgctcaagtcgggtttaggtgggatgccctctcggaaatagtgggttaattcgatatagaagactgtgagttgattcagtcaatttttgtatgccccttggtgtaaaatcaaatcataccatatagtacttattatgttgaatgattcgattgaatgtatcaccttaagcc

SEQ ID NO: 11555 - protein, 325 aa, Triticum aestivum
  misc_feature (1)..(325): Ceres Seq. ID no. 13655405
MGRTKDELLARLEELKIDFKRYDHPVVLTVEEQAKHVGSFGGALTKNLLLKDKKHRLYIVSALADTKVDMKILSQRLGLGKGGVRMAPEENLRQVLQVPLGCVTPFALFNESASAVSLLLDQGFKSKQSCYFHPLTNDVTIALSSSNLDKFLLSIGKQPAYVDLEASPVVGKDNPPDLADLVPSGALCSSEESVENPTPKDAPQVNVPKQKTCLPEVKAKPKVQNKGAESSESKVPTNNGANVEIFASDVLEVIFPLFLSETSKKLNIKQEELTQILKLDDFKRRAAPDLESATNMFKNMAYSAGFHAGFDTMLKSGLGGMPSRK

SEQ ID NO: 11556 - protein, 256 aa, Triticum aestivum
  misc_feature (1)..(256): Ceres Seq. ID no. 13655406
MKILSQRLGLGKGGVRMAPEENLRQVLQVPLGCVTPFALFNESASAVSLLLDQGFKSKQSCYFHPLTNDVTIALSSSNLDKFLLSIGKQPAYVDLEASPVVGKDNPPDLADLVPSGALCSSEESVENPTPKDAPQVNVPKQKTCLPEVKAKPKVQNKGAESSESKVPTNNGANVEIFASDVLEVIFPLFLSETSKKLNIKQEELTQILKLDDFKRRAAPDLESATNMFKNMAYSAGFHAGFDTMLKSGLGGMPSRK

SEQ ID NO: 11557 - protein, 240 aa, Triticum aestivum
  misc_feature (1)..(240): Ceres Seq. ID no. 13655407
MAPEENLRQVLQVPLGCVTPFALFNESASAVSLLLDQGFKSKQSCYFHPLTNDVTIALSSSNLDKFLLSIGKQPAYVDLEASPVVGKDNPPDLADLVPSGALCSSEESVENPTPKDAPQVNVPKQKTCLPEVKAKPKVQNKGAESSESKVPTNNGANVEIFASDVLEVIFPLFLSETSKKLNIKQEELTQILKLDDFKRRAAPDLESATNMFKNMAYSAGFHAGFDTMLKSGLGGMPSRK

SEQ ID NO: 11558 - DNA, 1126 bp, Triticum aestivum
  misc_feature (1)..(1126): Ceres Seq. ID no. 13655422
gtcggcttcttgatcggggttggttgggtgttgtatgagagggagtgagcgggcggcggtgtcagcgtcaacgtcggggatgagctgcaacggctgccgcgtgctgcgcaagggctgcaacgacgcctgcgtgctgcgcccctgcctgctctggatcgaggccgccgacgcgcagggccacgccaccctcttcgccgccaagttcttcggccgcgccggcctcatgtccttcctcaccgctgtccccgagcagcagcgcccaggtacgtacggacggaagggagatcgatggtcttcttcttggcacgacggttcatcggtagcactatatatgttgatcttctttggctgatgtttgcatggtgtttgctgtgggttgcagccgtgttccagtcgctgctgtacgaggcggcggggcggacgatcaacccggtgagcggcgcggtggggctgctctgggcggggagctggcacctctgcgaggcggcggtccagaccgtgctccggggcggcgccatccgcccgctgccggagctcgcgggcggcgtcccggaaggcggcgtcggtggcagcgatctgttcgcctcctcttccaggcgggccgtggtggggtgctccacgtattcggcggcgaagcgggtaacgccgaggaagacctgggcgccggaggccgcgtcccagcaccaggagcccccgtgcgacctcgggcttttcctcacccccggatcggccgccgcggcggagggggagcgacgggtgaggcgtgccggcacgccgtcgatgagctccgacggctccgtgaccacgagcgccggcgccggcgagaaggagccggagctgctgaatctttttgtttaatgaagctagttattaatctgcgcgttcattcaccgtagtagtaccgcgcgatcgaccgatcgatcgatgcgctgctcgctcgctggcgctggaaccagctgaactttttggtagcctccctctcgtcccaccggcgacgcgccccttgattcttttttgggcgtgcatgaaccgccggctcggtgtgacacggagatgactagatgagaccgccccggccggctttgttccttgtctactccgataatagtaccgctgctttctaagc

SEQ ID NO: 11559 - protein, 189 aa, Triticum aestivum
  misc_feature (1)..(189): Ceres Seq. ID no. 13655423
MVFFLARRFIGSTIYVDLLWLMFAWCLLWVAAVFQSLLYEAAGRTINPVSGAVGLLWAGSWHLCEAAVQTVLRGGAIRPLPELAGGVPEGGVGGSDLFASSSRRAVVGCSTYSAAKRVTPRKTWAPEAASQHQEPPCDLGLFLTPGSAAAAEGERRVRRAGTPSMSSDGSVTTSAGAGEKEPELLNLFV

SEQ ID NO: 11560 - protein, 178 aa, Triticum aestivum
  misc_feature (1)..(178): Ceres Seq. ID no. 13655424
MVFAVGCSRVPVAAVRGGGADDQPGERRGGAALGGELAPLRGGGPDRAPGRRHPPAAGARGRRPGRRRRWQRSVRLLFQAGRGGVLHVFGGEAGNAEEDLGAGGRVPAPGAPVRPRAFPHPRIGRRGGGGATGEACRHAVDELRRLRDHERRRRREGAGAAESFCLMKLVINLRVHSP

SEQ ID NO: 11561 - protein, 168 aa, Triticum aestivum
  misc_feature (1)..(168): Ceres Seq. ID no. 13655425
MFAWCLLWVAAVFQSLLYEAAGRTINPVSGAVGLLWAGSWHLCEAAVQTVLRGGAIRPLPELAGGVPEGGVGGSDLFASSSRRAVVGCSTYSAAKRVTPRKTWAPEAASQHQEPPCDLGLFLTPGSAAAAEGERRVRRAGTPSMSSDGSVTTSAGAGEKEPELLNLFV

SEQ ID NO: 11562 - DNA, 1469 bp, Triticum aestivum
  misc_feature (1)..(1469): Ceres Seq. ID no. 13655454
acattttttcttacgacggcgttgctcttttttcttacgatggctccatgaagggatgaggtgatatgggttccctcttccctccatggccgctgccttccaccgttcgtcctctcccggccgctcgtcgccgaccccgggagcaccaccacgcgcccctcgccgttccgtcctcctcgtctcatcacgtccgtctccctcctccctcttcttcgcgcagtgagctccgtctcacccaaactgacctagcccgggcgcacacgccggcgtcgaggcgtgccgtgctccgtccaagaactgccccggaagccgatgccgcggcggccctcatggtcgtccgcgcggaggccggcgacttcgcgcgggctcagtccatctgggcgcagctcctgctcagctccgccgcgccgtgcctggccgccgcagcgcccagcctcctcccggcgtacgcgcgtctcggtcgctacgacgaggtcctcctcgccgcgcgggagctctccgcgcgcgaccccgccgcggcgcgggacctctacccgctcgccgtctcctgcctcggcgccgccggcgagctcgccctcatggaggacgccgtgcaggagatggcccgcgccggcctccgcgtcgactccgccaccggcaacgccttcgtgcggcactacgcggcctccggcaccgtaccggagatggaggcggcggtcggccggctcaagaagtccggcctcctcatctccgtcgacgccatccgcgccgtcgcttcagcgtacatcgccaaccggaagtactacaagctcggcgagttcgtcaggggcgtcggcctcggccgccgggacgccggcaacctgctctggaacctctacctcctctccttcgcggccaacttcaagatgaagtcgctgcagcgcgccttcctggagatgaccgccgccgggtgccggccggacctcaccaccttcaacatccgcgccgccgccttctccaagatgtgcatgttctgggacctccacctcaccgccgagcacatgcgccgcgacggcgtcgcgccggacctcgtcacgcacggctgcttcgtggacgcctacatggagcgccggctcgcgcgcaacctctccttcgcgttccgccggctggacggctcaggcgagcccgtggtggccacggacggcgtcgtgttcgaggcgttcggcaaggggggcttccacaccacctccgaggggctgctagaggcggccggcgggaagcggcgatggacgtaccacgacttgctcggcgtctacctgaggaagcagcacaggagaaaccaaatcttttggaactactgatcttcaccagtacagcactgttacactagtgcaacaaggtagtagtaccagatgctacgatgtacagggatgatgttatgcttagaaacaaaatcatagatgtaatggaactatggaagagtctttgtaaagatgattgtgccaaatttg

SEQ ID NO: 11563 - protein, 417 aa, Triticum aestivum
  misc_feature (1)..(417): Ceres Seq. ID no. 13655455
MGSLFPPWPLPSTVRPLPAARRRPREHHHAPLAVPSSSSHHVRLPPPSSSRSELRLTQTDLARAHTPASRRAVLRPRTAPEADAAAALMVVRAEAGDFARAQSIWAQLLLSSAAPCLAAAAPSLLPAYARLGRYDEVLLAARELSARDPAAARDLYPLAVSCLGAAGELALMEDAVQEMARAGLRVDSATGNAFVRHYAASGTVPEMEAAVGRLKKSGLLISVDAIRAVASAYIANRKYYKLGEFVRGVGLGRRDAGNLLWNLYLLSFAANFKMKSLQRAFLEMTAAGCRPDLTTFNIRAAAFSKMCMFWDLHLTAEHMRRDGVAPDLVTHGCFVDAYMERRLARNLSFAFRRLDGSGEPVVATDGVVFEAFGKGGFHTTSEGLLEAAGGKRRWTYHDLLGVYLRKQHRRNQIFWNY

SEQ ID NO: 11564 - protein, 329 aa, Triticum aestivum
  misc_feature (1)..(329): Ceres Seq. ID no. 13655456
MVVRAEAGDFARAQSIWAQLLLSSAAPCLAAAAPSLLPAYARLGRYDEVLLAARELSARDPAAARDLYPLAVSCLGAAGELALMEDAVQEMARAGLRVDSATGNAFVRHYAASGTVPEMEAAVGRLKKSGLLISVDAIRAVASAYIANRKYYKLGEFVRGVGLGRRDAGNLLWNLYLLSFAANFKMKSLQRAFLEMTAAGCRPDLTTFNIRAAAFSKMCMFWDLHLTAEHMRRDGVAPDLVTHGCFVDAYMERRLARNLSFAFRRLDGSGEPVVATDGVVFEAFGKGGFHTTSEGLLEAAGGKRRWTYHDLLGVYLRKQHRRNQIFWNY

SEQ ID NO: 11565 - protein, 246 aa, Triticum aestivum
  misc_feature (1)..(246): Ceres Seq. ID no. 13655457
MEDAVQEMARAGLRVDSATGNAFVRHYAASGTVPEMEAAVGRLKKSGLLISVDAIRAVASAYIANRKYYKLGEFVRGVGLGRRDAGNLLWNLYLLSFAANFKMKSLQRAFLEMTAAGCRPDLTTFNIRAAAFSKMCMFWDLHLTAEHMRRDGVAPDLVTHGCFVDAYMERRLARNLSFAFRRLDGSGEPVVATDGVVFEAFGKGGFHTTSEGLLEAAGGKRRWTYHDLLGVYLRKQHRRNQIFWNY

SEQ ID NO: 11566 - DNA, 681 bp, Triticum aestivum
  misc_feature (1)..(681): Ceres Seq. ID no. 13655489
atctctgtccatacggagtgtcgggctttgaatagtgcaaactttttgtgctcacacactattctagatagacaacctccatggctgctgctcctgctactcaacctcgtgtcatggtgttacccttccctgcacagggccatgtcatcccgctaatggagctgtctcgcaagctcgccgggcacggcgtcgaggtggacttcgtgaacaccgagttcaaccacgacctcgtcatggaagcaatggcagagaagggagcaattcctgatgggatccacatgctcaccgttccggacggcctgggccccggagacgaccacgcggacatcggcaagtttgtcaaggacctgcccgccgccatgtccggccgcctggaggagatgatccggtcgaggaagatcaagtgggtgatcgtggatgtgtccatgagctgggcactgcaggtggccaccacggcgggtgcccgtgttgcctcgttctcgacctactccgcggccgtgtttgctctcaggatgaacctccccaaattgatacaggacggtgttcttgatgaaagtggggatgtgaaggggcaggagcagatcaagatgatgccgcccatcgacgcgtcggagatcccctnngtcagcctggccagcaccagcgcccctgagaggcgcagaaacaatatcgagaacgtcc

SEQ ID NO: 11567 - protein, 200 aa, Triticum aestivum
  misc_feature (1)..(200): Ceres Seq. ID no. 13655490
  misc_feature (181)..(181): Xaa is any aa, unknown or other
MAAAPATQPRVMVLPFPAQGHVIPLMELSRKLAGHGVEVDFVNTEFNHDLVMEAMAEKGAIPDGIHMLTVPDGLGPGDDHADIGKFVKDLPAAMSGRLEEMIRSRKIKWVIVDVSMSWALQVATTAGARVASFSTYSAAVFALRMNLPKLIQDGVLDESGDVKGQEQIKMMPPIDASEIPXVSLASTSAPERRRNNIENV

SEQ ID NO: 11568 - protein, 189 aa, Triticum aestivum
  misc_feature (1)..(189): Ceres Seq. ID no. 13655491
  misc_feature (170)..(170): Xaa is any aa, unknown or other
MVLPFPAQGHVIPLMELSRKLAGHGVEVDFVNTEFNHDLVMEAMAEKGAIPDGIHMLTVPDGLGPGDDHADIGKFVKDLPAAMSGRLEEMIRSRKIKWVIVDVSMSWALQVATTAGARVASFSTYSAAVFALRMNLPKLIQDGVLDESGDVKGQEQIKMMPPIDASEIPXVSLASTSAPERRRNNIENV

SEQ ID NO: 11569 - protein, 175 aa, Triticum aestivum
  misc_feature (1)..(175): Ceres Seq. ID no. 13655492
  misc_feature (156)..(156): Xaa is any aa, unknown or other
MELSRKLAGHGVEVDFVNTEFNHDLVMEAMAEKGAIPDGIHMLTVPDGLGPGDDHADIGKFVKDLPAAMSGRLEEMIRSRKIKWVIVDVSMSWALQVATTAGARVASFSTYSAAVFALRMNLPKLIQDGVLDESGDVKGQEQIKMMPPIDASEIPXVSLASTSAPERRRNNIENV

SEQ ID NO: 11570 - DNA, 1238 bp, Triticum aestivum
  misc_feature (1)..(1238): Ceres Seq. ID no. 13655494
gcacacggagcagcaaccgaaggggggaagaagagccgtcgccggagaagaccaaggggaagagcctctgccgccgccagagctagcgtcaccggtgcctcgccgcccctccgtcggcgcgctgccctccccttggtccgctgcagccatcatctcctctctgcaccttcagccgggagcccatccggagcagctgtagattggatgtggagattggcgaatctggatacgatggagctggagatcctgggcatgaacttcggctgcgtcctctcggcgctgtcggacgccaagatcccggagaaagaatgcctgctcccgctcgtctccaagctcctcggctactgcatcgttgccgcctccaccaccgtcaagctcccgcagatactaaagattttgaagcatggaagtgttagaggacttagtgtagcctcctttgagcttgagctcattggctacacaattgctctggcatattgtattcataaaggactgcccttttcagcttatggagagctagcttttctgctgatccaagcaattatcttgattggaatcatttactattactcgccaccaatgggaagcaaaacatggatgaaagctttgctatattgtggactagctccaactgttttggctggaaaaattgatccaggtctttttgaaatcctttatgcttcacagcatgccatcttcttttgtgctagagtaccgcagatatggaaaaatttcacaaataagagcactggcgagctgagcttcctgacttctttcatgaacttcgctggttcccttgtaagagtttttaccagcatccaggagaagactccgttaagtgtacttatgggctctgtaatcggcatcgtgacaaacggtacgattttgggtcagatagcgatgtaccaaaagcctgtgccaaagaaaggaaagaaagaagaatagggcgtgagaactcttgctgctggtttacaattttgctccagggctattcttggagcaacatgcaccacttaccaggacttcatgacaaaaacagtagggagaaaattcatgcagacttgggtgatgatggaaacaataggatatttcttggtttgtaatttttcgaagtatcgtaaaatgactggctgtgtagttttcaattgccaccttggttagttttctctgtgcaactgtttaatgatgctagaaagatgtatatccatttttatgtttgaatattatttgttgttttt

SEQ ID NO: 11571 - protein, 314 aa, Triticum aestivum
  misc_feature (1)..(314): Ceres Seq. ID no. 13655495
AHGAATEGGKKSRRRRRPRGRASAAARASVTGASPPLRRRAALPLVRCSHHLLSAPSAGSPSGAAVDWMWRLANLDTMELEILGMNFGCVLSALSDAKIPEKECLLPLVSKLLGYCIVAASTTVKLPQILKILKHGSVRGLSVASFELELIGYTIALAYCIHKGLPFSAYGELAFLLIQAIILIGIIYYYSPPMGSKTWMKALLYCGLAPTVLAGKIDPGLFEILYASQHAIFFCARVPQIWKNFTNKSTGELSFLTSFMNFAGSLVRVFTSIQEKTPLSVLMGSVIGIVTNGTILGQIAMYQKPVPKKGKKEE

SEQ ID NO: 11572 - protein, 246 aa, Triticum aestivum
  misc_feature (1)..(246): Ceres Seq. ID no. 13655496
MWRLANLDTMELEILGMNFGCVLSALSDAKIPEKECLLPLVSKLLGYCIVAASTTVKLPQILKILKHGSVRGLSVASFELELIGYTIALAYCIHKGLPFSAYGELAFLLIQAIILIGIIYYYSPPMGSKTWMKALLYCGLAPTVLAGKIDPGLFEILYASQHAIFFCARVPQIWKNFTNKSTGELSFLTSFMNFAGSLVRVFTSIQEKTPLSVLMGSVIGIVTNGTILGQIAMYQKPVPKKGKKEE

SEQ ID NO: 11573 - protein, 237 aa, Triticum aestivum
  misc_feature (1)..(237): Ceres Seq. ID no. 13655497
MELEILGMNFGCVLSALSDAKIPEKECLLPLVSKLLGYCIVAASTTVKLPQILKILKHGSVRGLSVASFELELIGYTIALAYCIHKGLPFSAYGELAFLLIQAIILIGIIYYYSPPMGSKTWMKALLYCGLAPTVLAGKIDPGLFEILYASQHAIFFCARVPQIWKNFTNKSTGELSFLTSFMNFAGSLVRVFTSIQEKTPLSVLMGSVIGIVTNGTILGQIAMYQKPVPKKGKKEE

SEQ ID NO: 11574 - DNA, 1612 bp, Triticum aestivum
  misc_feature (1)..(1612): Ceres Seq. ID no. 13655506
agaacatcctaatcgaaaattttccgcaagcaagcaagccgtatatgcacgcattatctcttcttcttcttcttcttcttcttcttcttctacctcttcttctccttctccttgtaggtggcagcgcctaccaagctcttttccgccggtgaccattccagtagtccatcacatgggtcaagacgagcgccagcatccagagctgccggacatggagaaggagctctctgccgacgcggtagcctgcgaccactgcagcggcccacaggcggtggtgtactgccgggccgacagcgccaggctctgcctgccgtgcgaccgccacgtgcacgccgccaacgcggtctgctcccgccacctgcgcgccccgctctgcgccgcatgccgcgcaaccggggccgtcttccgccacgccggtcccgaattcctctgctccaactgcgacttcgggaggagccgggacgccgagctgccgctgcacgaccgctgcacagtccaggggtacacgggacgaccctccgcgcacgacctcgccgctcttctcggggtccccgacttcgacaagccctcggccggcaaagccgacgactgttggtgggccatttgggaggagccccaggtgttcagcctggaggatctcatcgtgcccaccacttctagccatggcttccagcccctcgtcacgccgtcctcgcccaagatccacaactcacccgatggaaagaccaacgatgaggtcatacggcagttacgtgagctcgccgaggtcgacatgggcggcggtcagataacacctcgtgaggaggcagagcaagctgctcatctgttgccttccaggacagagtcacagcacaccactggaaatggcgatttcggcacagataacagccatgaggttgcaaccatgccamcccctagttatgagaacggcggatggaacaataacgattatcatgccctaaatggtgcctgcaagaccgagcacgaacaagagcaggctccagcaagctcagctgaagcatgcttgtcatcgtttgttcagatgtcagaactttgccccagcatgagcaatggtagcatgatggacgatggccagcaggcaaatcctggtactggcatgccaatgcaagctttccccaaaagaagtggctttgatgttgttgctggccctgaccgcgacattgtcatttcccgctataaagaaaagaggaggacaagaagattcgacaaacaggtgcgatatgagtcccgcaaagctcgtgcagacagcaggttgaggatcaaggggcgttttgcaaaggcaaatcagagttaagccttgactttgcagtatattttgcatcttggacagaaggaataacactaattaggagtgagtgcagatgatacataaggcgtgaacattttgtttgccttcagttcggcagatggtagttcatgtacaatctgaataatgtatgttgccaacatatgggctatattaatgttttgaggggagttgttcttagtccaacccttgtatatagtttccatctatgaactctgtaaaagtactacaggcaagtgagagtgacagtatgccatttttgcatggtttagtgaattttgtctc

SEQ ID NO: 11575 - protein, 437 aa, Triticum aestivum
  misc_feature (1)..(437): Ceres Seq. ID no. 15219746
  misc_feature (304)..(304): Xaa is any aa, unknown or other
EHPNRKFSASKQAVYARIISSSSSSSSSSSTSSSPSPCRWQRLPSSFPPVTIPVVHHMGQDERQHPELPDMEKELSADAVACDHCSGPQAVVYCRADSARLCLPCDRHVHAANAVCSRHLRAPLCAACRATGAVFRHAGPEFLCSNCDFGRSRDAELPLHDRCTVQGYTGRPSAHDLAALLGVPDFDKPSAGKADDCWWAIWEEPQVFSLEDLIVPTTSSHGFQPLVTPSSPKIHNSPDGKTNDEVIRQLRELAEVDMGGGQITPREEAEQAAHLLPSRTESQHTTGNGDFGTDNSHEVATMPXPSYENGGWNNNDYHALNGACKTEHEQEQAPASSAEACLSSFVQMSELCPSMSNGSMMDDGQQANPGTGMPMQAFPKRSGFDVVAGPDRDIVISRYKEKRRTRRFDKQVRYESRKARADSRLRIKGRFAKANQS

SEQ ID NO: 11576 - protein, 380 aa, Triticum aestivum
  misc_feature (1)..(380): Ceres Seq. ID no. 15219747
  misc_feature (247)..(247): Xaa is any aa, unknown or other
MGQDERQHPELPDMEKELSADAVACDHCSGPQAVVYCRADSARLCLPCDRHVHAANAVCSRHLRAPLCAACRATGAVFRHAGPEFLCSNCDFGRSRDAELPLHDRCTVQGYTGRPSAHDLAALLGVPDFDKPSAGKADDCWWAIWEEPQVFSLEDLIVPTTSSHGFQPLVTPSSPKIHNSPDGKTNDEVIRQLRELAEVDMGGGQITPREEAEQAAHLLPSRTESQHTTGNGDFGTDNSHEVATMPXPSYENGGWNNNDYHALNGACKTEHEQEQAPASSAEACLSSFVQMSELCPSMSNGSMMDDGQQANPGTGMPMQAFPKRSGFDVVAGPDRDIVISRYKEKRRTRRFDKQVRYESRKARADSRLRIKGRFAKANQS

SEQ ID NO: 11577 - protein, 367 aa, Triticum aestivum
  misc_feature (1)..(367): Ceres Seq. ID no. 15219748
  misc_feature (234)..(234): Xaa is any aa, unknown or other
MEKELSADAVACDHCSGPQAVVYCRADSARLCLPCDRHVHAANAVCSRHLRAPLCAACRATGAVFRHAGPEFLCSNCDFGRSRDAELPLHDRCTVQGYTGRPSAHDLAALLGVPDFDKPSAGKADDCWWAIWEEPQVFSLEDLIVPTTSSHGFQPLVTPSSPKIHNSPDGKTNDEVIRQLRELAEVDMGGGQITPREEAEQAAHLLPSRTESQHTTGNGDFGTDNSHEVATMPXPSYENGGWNNNDYHALNGACKTEHEQEQAPASSAEACLSSFVQMSELCPSMSNGSMMDDGQQANPGTGMPMQAFPKRSGFDVVAGPDRDIVISRYKEKRRTRRFDKQVRYESRKARADSRLRIKGRFAKANQS

SEQ ID NO: 11578 - DNA, 658 bp, Triticum aestivum
  misc_feature (1)..(658): Ceres Seq. ID no. 13655523
gtgccaagaaaggatatattcaggcgcagttctactcagatggtgaacgatccatacaccctggtgatagccctcaatagctcgggttctgcagaaggtgaactttatgtggatgatgggaaaagttatgattatcagcaaggggcattcatccatcggcgttttgtatttgcagacaataaactaacttcaatcaatattgcgcctgatagtctgggcaagaaggtgtattcaactgagtgtgtgattgaaagaattatagtgcttgggttatcatcgggagcaaagaaggctatcattgaacctgggaaccaagaagtggaaattgatctgggaccgattagtttaaggagtggttcaaagtctgttgcgccaacagtcaggaggcccaatgttcgtgttgtagatgattggacgataaggatcgcatgatatgcagcccattcacatctggagcctgatgtctccattgttcgctgtcaggctataaactcgagcaatgctagaagcgtagtttcagactcgtaaatgttatctgtggacacccaaatttcattgtttcagacttccagtggacccaaaatttctgcaggtgcctggtacgcatgctgtttgtactcccaattttgacataagtcgtgacataaattgctgatgc

SEQ ID NO: 11579 - protein, 143 aa, Triticum aestivum
  misc_feature (1)..(143): Ceres Seq. ID no. 13655524
VPRKDIFRRSSTQMVNDPYTLVIALNSSGSAEGELYVDDGKSYDYQQGAFIHRRFVFADNKLTSINIAPDSLGKKVYSTECVIERIIVLGLSSGAKKAIIEPGNQEVEIDLGPISLRSGSKSVAPTVRRPNVRVVDDWTIRIA

SEQ ID NO: 11580 - protein, 130 aa, Triticum aestivum
  misc_feature (1)..(130): Ceres Seq. ID no. 13655525
MVNDPYTLVIALNSSGSAEGELYVDDGKSYDYQQGAFIHRRFVFADNKLTSINIAPDSLGKKVYSTECVIERIIVLGLSSGAKKAIIEPGNQEVEIDLGPISLRSGSKSVAPTVRRPNVRVVDDWTIRIA

SEQ ID NO: 11581 - DNA, 667 bp, Triticum aestivum
  misc_feature (1)..(667): Ceres Seq. ID no. 13655537
acagtctcacacccgccgctcagccgtaacttcacaaagatgctgaggtccaccggccgccttctgctgctcgcgctagcggcgagccacctgctgctcaccgccgccggcgctggctgcgagccgagcggcacgctccggccgacccagagccacgcgtgccaggactgctgcaaggccgggcaggcgtacccgacgtacaggtgctcgccgccggtctcctcgtccacccgggcggtcatgactctgaacgacttcgacgcgggcggcgacggcggggacccgtccgagtgcgacggcgcgttccaccgcagctcggagcgcgtggcggcgctgtccacggggtggtacagcgggggctcccgctgcggcaagagcatacggatccgggccaacggcaggtccgtgctcgccaaggtcgtcgacgagtgcgacaccgtgaacgggtgcgaccgcgagcacgccttccagccgccgtgccgcaacaacgtcgtcgacgcctcccaggcggtctgggacgcgctgggcatcaccggggaggaggtcggcgagtacaacgtcacttggtcagatgcatgacctatatatgtgcatggacgaatagagtgtacacgcggacccaaaatgaataaacggaatttataagggccgcctatttaacagggct

SEQ ID NO: 11582 - protein, 192 aa, Triticum aestivum
  misc_feature (1)..(192): Ceres Seq. ID no. 13655538
TVSHPPLSRNFTKMLRSTGRLLLLALAASHLLLTAAGAGCEPSGTLRPTQSHACQDCCKAGQAYPTYRCSPPVSSSTRAVMTLNDFDAGGDGGDPSECDGAFHRSSERVAALSTGWYSGGSRCGKSIRIRANGRSVLAKVVDECDTVNGCDREHAFQPPCRNNVVDASQAVWDALGITGEEVGEYNVTWSDA

SEQ ID NO: 11583 - protein, 179 aa, Triticum aestivum
  misc_feature (1)..(179): Ceres Seq. ID no. 13655539
MLRSTGRLLLLALAASHLLLTAAGAGCEPSGTLRPTQSHACQDCCKAGQAYPTYRCSPPVSSSTRAVMTLNDFDAGGDGGDPSECDGAFHRSSERVAALSTGWYSGGSRCGKSIRIRANGRSVLAKVVDECDTVNGCDREHAFQPPCRNNVVDASQAVWDALGITGEEVGEYNVTWSDA

SEQ ID NO: 11584 - protein, 112 aa, Triticum aestivum
  misc_feature (1)..(112): Ceres Seq. ID no. 13655540
MTLNDFDAGGDGGDPSECDGAFHRSSERVAALSTGWYSGGSRCGKSIRIRANGRSVLAKVVDECDTVNGCDREHAFQPPCRNNVVDASQAVWDALGITGEEVGEYNVTWSDA

SEQ ID NO: 11585 - DNA, 1623 bp, Triticum aestivum
  misc_feature (1)..(1623): Ceres Seq. ID no. 13655660
aaaaaccctccttcgcccattcattccccactcctttcgccccaaaccccctccacccgccgcattcccatggctaccaccgccgcggctgccgccgccgccgccgccaccgcctccacccgggcaaacagcctctcccgcatcttctcctcctcctcgccaatcgtacaaccacccaagcgcaatcccaagaccaagagcgcgccgaagccgaagccgacgccgaaaccgcccgccgccgatgccgtctccatcgcggacgagaagcccccgaagcccctcggcgcacagcccgccgccaaaggtgattccgacgggaagcacaagctcccgaagccccttgggcttctcgtcaaggccctcagccggcagcgcgaccctgacaagctgatctccggcttcatccaagcgtcaaccgtgtcgtcgcgcttccgcgaccggcaccgcgtgttcgagatagcggtgagccgcctcacttccctcggccgccaagacggcatcgaggccatcatcgaagcgcagatgcccttcctcgagacctcagccgagggattcgcctcgcgcctcatccgcctctacggccgtgcctccatgccatcccacgcggccgcaaccttccataaacttcccgcgcagcataaatccaacatgacattcaactcccttctttcctgttacgccgatgccggagattttgacgggctcactgctgcattccaggagatcccagccacttacccctcgattgttcccaccgtatactcttacaacgtactcatccacgcattgtgccggaagcccgacgtctcagctgctcttgacgctgtccatctcatggagaagatcggtgtttcacctgacattattactttcaacacgctgttgaatgggttttgcaacaatggccgcttggatgaagcagagacagtatgggagatgatcaaggagaggaatttggagcctgacgccaagtgctacaatgccaagctgcggggtttggttgcagaagggaggattgatgatgcagctgctgtgctggagggattggagaaggatgggccaaaacccgatacagtatcctacaatgagttgattcgaggatattgcaaagccgggaagttacaggaggccaagaagctgtatgatgatttggtaaaaaatgagtgtgccccaaataagggaacatatgagactcttctgccacaccttctgcaggctggggagctggattgtgcactgacgtactgttataaaatctttagtcataaaaggaaccttagagtggagtgtggtgtgctgcaggatgtagtgaatgcattggtagatgtattgagggtggaggaggctgccaagattattgtgctggggcggaagaagtactacccccgaaagggtttgaggatgcctgatagtacaaaaaggcagtgaattaagagctgaaactgatgaggaagaagcaatatcagaagaagagtgtgaagtggagcacgagactgaaaaataaattcataggtcagacttttactgatgcatgccaaatttcaccatggcctggtttactctgttcctctgttggcatgatacaacaaaaagtgcaagttaaagtagtggttaaactagtcc

SEQ ID NO: 11586 - protein, 475 aa, Triticum aestivum
  misc_feature (1)..(475): Ceres Seq. ID no. 13655661
KNPPSPIHSPLLSPQTPSTRRIPMATTAAAAAAAAATASTRANSLSRIFSSSSPIVQPPKRNPKTKSAPKPKPTPKPPAADAVSIADEKPPKPLGAQPAAKGDSDGKHKLPKPLGLLVKALSRQRDPDKLISGFIQASTVSSRFRDRHRVFEIAVSRLTSLGRQDGIEAIIEAQMPFLETSAEGFASRLIRLYGRASMPSHAAATFHKLPAQHKSNMTFNSLLSCYADAGDFDGLTAAFQEIPATYPSIVPTVYSYNVLIHALCRKPDVSAALDAVHLMEKIGVSPDIITFNTLLNGFCNNGRLDEAETVWEMIKERNLEPDAKCYNAKLRGLVAEGRIDDAAAVLEGLEKDGPKPDTVSYNELIRGYCKAGKLQEAKKLYDDLVKNECAPNKGTYETLLPHLLQAGELDCALTYCYKIFSHKRNLRVECGVLQDVVNALVDVLRVEEAAKIIVLGRKKYYPRKGLRMPDSTKRQ

SEQ ID NO: 11587 - protein, 452 aa, Triticum aestivum
  misc_feature (1)..(452): Ceres Seq. ID no. 13655662
MATTAAAAAAAAATASTRANSLSRIFSSSSPIVQPPKRNPKTKSAPKPKPTPKPPAADAVSIADEKPPKPLGAQPAAKGDSDGKHKLPKPLGLLVKALSRQRDPDKLISGFIQASTVSSRFRDRHRVFEIAVSRLTSLGRQDGIEAIIEAQMPFLETSAEGFASRLIRLYGRASMPSHAAATFHKLPAQHKSNMTFNSLLSCYADAGDFDGLTAAFQEIPATYPSIVPTVYSYNVLIHALCRKPDVSAALDAVHLMEKIGVSPDIITFNTLLNGFCNNGRLDEAETVWEMIKERNLEPDAKCYNAKLRGLVAEGRIDDAAAVLEGLEKDGPKPDTVSYNELIRGYCKAGKLQEAKKLYDDLVKNECAPNKGTYETLLPHLLQAGELDCALTYCYKIFSHKRNLRVECGVLQDVVNALVDVLRVEEAAKIIVLGRKKYYPRKGLRMPDSTKRQ

SEQ ID NO: 11588 - protein, 301 aa, Triticum aestivum
  misc_feature (1)..(301): Ceres Seq. ID no. 13655663
MPFLETSAEGFASRLIRLYGRASMPSHAAATFHKLPAQHKSNMTFNSLLSCYADAGDFDGLTAAFQEIPATYPSIVPTVYSYNVLIHALCRKPDVSAALDAVHLMEKIGVSPDIITFNTLLNGFCNNGRLDEAETVWEMIKERNLEPDAKCYNAKLRGLVAEGRIDDAAAVLEGLEKDGPKPDTVSYNELIRGYCKAGKLQEAKKLYDDLVKNECAPNKGTYETLLPHLLQAGELDCALTYCYKIFSHKRNLRVECGVLQDVVNALVDVLRVEEAAKIIVLGRKKYYPRKGLRMPDSTKRQ

SEQ ID NO: 11589 - DNA, 767 bp, Triticum aestivum
  misc_feature (1)..(767): Ceres Seq. ID no. 13655675
aagagaatggagaacagggtaatattacaggaatggtttgaccgcgttgactcggagaaaagtggaagcataacagcggtacagctgaagactgctcttgctgtgggcaacctggaatttccgctctcagttgttcagcaaatgatcaggatgtacgatttcgacaggaatggtactatgagctttcaagaatttgttgcactcaacaacttccttcttaaggttcaacatgcattttctgatctagagaggggtcgtggttttcttgtacctgatgatgtatttgaggctttgggaaaaattggtttcatgctggattctcctgctttttactctgtctgcgagagctttgatcaaagtaaaaatgggaggtttcggctggatgacttaatatcaatctgtatattcttacaatcagcacggaacctatttaattcatttgatacagctaaacaaggcagagttactctcgatctgaatcaatttgtctattgtactgccaattgcagaatatgattcaactatatgacggtttgagaagatgattcacaaatactgcactttgtaataccataaagtcatcttagagtaagttaagttgtgatggtgttgtataagatgaaaacatctcgggtttggatactatttgtcatctgtctgcaaaatactgtggttttttttttctttccagatgatgtaattttgtttataaaacgtaagttgttataaaacatcttgagttatgataacttgtgaagttgattccg

SEQ ID NO: 11590 - protein, 171 aa, Triticum aestivum
  misc_feature (1)..(171): Ceres Seq. ID no. 13655676
KRMENRVILQEWFDRVDSEKSGSITAVQLKTALAVGNLEFPLSVVQQMIRMYDFDRNGTMSFQEFVALNNFLLKVQHAFSDLERGRGFLVPDDVFEALGKIGFMLDSPAFYSVCESFDQSKNGRFRLDDLISICIFLQSARNLFNSFDTAKQGRVTLDLNQFVYCTANCRI

SEQ ID NO: 11591 - protein, 169 aa, Triticum aestivum
  misc_feature (1)..(169): Ceres Seq. ID no. 13655677
MENRVILQEWFDRVDSEKSGSITAVQLKTALAVGNLEFPLSVVQQMIRMYDFDRNGTMSFQEFVALNNFLLKVQHAFSDLERGRGFLVPDDVFEALGKIGFMLDSPAFYSVCESFDQSKNGRFRLDDLISICIFLQSARNLFNSFDTAKQGRVTLDLNQFVYCTANCRI

SEQ ID NO: 11592 - protein, 124 aa, Triticum aestivum
  misc_feature (1)..(124): Ceres Seq. ID no. 13655678
MIRMYDFDRNGTMSFQEFVALNNFLLKVQHAFSDLERGRGFLVPDDVFEALGKIGFMLDSPAFYSVCESFDQSKNGRFRLDDLISICIFLQSARNLFNSFDTAKQGRVTLDLNQFVYCTANCRI

SEQ ID NO: 11593 - DNA, 1593 bp, Triticum aestivum
  misc_feature (1)..(1593): Ceres Seq. ID no. 13655712
ctctcagtttctctctcacacacagctctctctctctctctctccttctctccctctctcaaatactccccatgcccatcgccgtcctcctttgaagaagccaatggccagcaatggcatggcgtcctctccctccgccttcttccctccgaatttcctcctccacatgcagcaagcaccaccgcagcatgacccccaagaacaccaccagcagcaccaccaccaccaccatgagcaccacctccctcctccccatccccagcacaaccccttcctcccctccccccaatgcccctccctccaggacttccgtggcggtctgtcgccaatgctggggaagcgcccggcgatgtacgggggcggcggcgacgggggctgcggcggcgacgaggtgaccggcggaggcgcgaacgaggaggagacgtcggacgacgggtcgcagctgggcggcgagaagaagcggcggctgaacgtggagcaggtgcggacgctggagaagaacttcgaggtggccaacaagctggagccggagcgcaagatgcagctggcccgcgcgctggggctgcagccgcggcaggtggccatctggttccagaaccgccgcgcccggtggaagacaaagcagctggagaaggactacgacgtgctcaagcgccagttcgacgccgtcaaggccgagaacgacgccctcctctcccacaacaagaagctccagtccgagatactgggactgaagggatgcagggaggcggcgtcggagctgatcaacctcaacaaggagacggaggcgtcctgcagcaaccgcagcgagaacagctccgagatcaacctcgacatctcgcgcacgccgccgtccgacggccccatggacgctccgccctcgcaccagcagggcggcgggggcgggggcatgatccccttctacccctccgtcgcgcgccccgcgggcgtcgacatcgaccatctcctccacgcctccgtccccaagatggagcaccaccacggcggccccgacacgcccagcttcggcaacctgctgtgcggcgtcgacgagccgccgccgttctggccgtgggcggatcaccagcagttcaactgatcgcccggtcggtcgatcgggacgatatatatctttgttgcagtcaatgacgtctgctttgcttgcatggtcagcaatgagcgtgcataaatattcgatgcgtttggattcttgatgaggacgtacgtacggtggagacggttgtacatgcatgtttgatgagaggcaagttcagttcatccatgaggtacctactgaagacgatggtgatgcgatttgagtcatggatcgatcgagttgatgatgaatagtggggctacgtgtaggggaataagtccggtgtgtgtgaagcgtgtgtaggtagattttggagttgaatagtacctacctttggtattcttattattttttcttgttttttcatttttcctcttccttttgttcccatacataaatttgtgaattgtgaggcggtgttgatccgttgttgtataggttaatggtgcatgtggtgcttattccccctatttatatatggattatgtgaagactgt

SEQ ID NO: 11594 - protein, 365 aa, Triticum aestivum
  misc_feature (1)..(365): Ceres Seq. ID no. 13655713
SQFLSHTQLSLSLSPSLPLSNTPHAHRRPPLKKPMASNGMASSPSAFFPPNFLLHMQQAPPQHDPQEHHQQHHHHHHEHHLPPPHPQHNPFLPSPQCPSLQDFRGGLSPMLGKRPAMYGGGGDGGCGGDEVTGGGANEEETSDDGSQLGGEKKRRLNVEQVRTLEKNFEVANKLEPERKMQLARALGLQPRQVAIWFQNRRARWKTKQLEKDYDVLKRQFDAVKAENDALLSHNKKLQSEILGLKGCREAASELINLNKETEASCSNRSENSSEINLDISRTPPSDGPMDAPPSHQQGGGGGGMIPFYPSVARPAGVDIDHLLHASVPKMEHHHGGPDTPSFGNLLCGVDEPPPFWPWADHQQFN

SEQ ID NO: 11595 - protein, 331 aa, Triticum aestivum
  misc_feature (1)..(331): Ceres Seq. ID no. 13655714
MASNGMASSPSAFFPPNFLLHMQQAPPQHDPQEHHQQHHHHHHEHHLPPPHPQHNPFLPSPQCPSLQDFRGGLSPMLGKRPAMYGGGGDGGCGGDEVTGGGANEEETSDDGSQLGGEKKRRLNVEQVRTLEKNFEVANKLEPERKMQLARALGLQPRQVAIWFQNRRARWKTKQLEKDYDVLKRQFDAVKAENDALLSHNKKLQSEILGLKGCREAASELINLNKETEASCSNRSENSSEINLDISRTPPSDGPMDAPPSHQQGGGGGGMIPFYPSVARPAGVDIDHLLHASVPKMEHHHGGPDTPSFGNLLCGVDEPPPFWPWADHQQFN

SEQ ID NO: 11596 - protein, 326 aa, Triticum aestivum
  misc_feature (1)..(326): Ceres Seq. ID no. 13655715
MASSPSAFFPPNFLLHMQQAPPQHDPQEHHQQHHHHHHEHHLPPPHPQHNPFLPSPQCPSLQDFRGGLSPMLGKRPAMYGGGGDGGCGGDEVTGGGANEEETSDDGSQLGGEKKRRLNVEQVRTLEKNFEVANKLEPERKMQLARALGLQPRQVAIWFQNRRARWKTKQLEKDYDVLKRQFDAVKAENDALLSHNKKLQSEILGLKGCREAASELINLNKETEASCSNRSENSSEINLDISRTPPSDGPMDAPPSHQQGGGGGGMIPFYPSVARPAGVDIDHLLHASVPKMEHHHGGPDTPSFGNLLCGVDEPPPFWPWADHQQFN

SEQ ID NO: 11597 - DNA, 1241 bp, Triticum aestivum
  misc_feature (1)..(1241): Ceres Seq. ID no. 13655720
gtccgtgtccaaaaccgagcaaaacctcaaagcgcagacaagagaaggtcgctcgccaccgaggggaatggcggcgccgccggacagcaagtctgataaatccccagaggagctcctgtgcgcggcggcggaggccggtaacgacgatgctatcgccgagatcatttcctctggcgccgaccccacctacttcgacgcctccggcatgacgccactcatgcgcgcggcctccggcggccacgccgctgccgcgcggctcctgctcgatgccggcgcgccctggaacgcgctctcccccgaaggtctctccgcgggtgaccttacctccgaccccgccacatacgacctgctcctcgaccacgccctgcgctccgagctcatcctcggcaccgtcgcccgccgccaggcggcctccgcgaactcctccgacggcgtccccgccgagacctacctcgactcgagggtttcgttcagcgaggaccgggtgatggatgcggagagcaaggcggtgatgatggagtgggagcgtccgctgatggaggcgcacgcgcgggcggtgtgcgccgccggcggcggcaaggtgctcaacgtggggttcgggatggggctcgtggaccaggcgatacagaggtacgagcccgaggagcacaccatcatcgaggcccacccggaggtttacgcccggatgctcaagcttgggtggggtgagaagaagaacgtcaggatcctcttcgggcgatggcaggatgtgatcccgcagctcggctcgtatgatggtatattcttcgacacctacggggagtactacgaggacatgagggagttccacgagcacctcccgaagctgctgaatccgggaggggtctactcctacttcaatgggctgtgcggcgacaatgccttcttccacgtggtgtactgccagctggtggcgatggagctggcgagcctcgggtactcgacgcagttcgtccctctccccgtcagggactgcctcaaggcggaggtgtgggagggggtgaagcagaagtactggcagctcgacacctaccacctcccggtctgccaggccgaatctgaatcagagtagaatttctaccgtgttgctactgatcgagttttcgctagctcttcgctgctgctgtaagtttgttcaggtcttcaggatcaggtcaagcttgcctgcgtgcgtgtttgtggattgcagtcgatgatagaactcccgtggaaaatttggttcc

SEQ ID NO: 11598 - protein, 362 aa, Triticum aestivum
  misc_feature (1)..(362): Ceres Seq. ID no. 13655721
SVSKTEQNLKAQTREGRSPPRGMAAPPDSKSDKSPEELLCAAAEAGNDDAIAEIISSGADPTYFDASGMTPLMRAASGGHAAAARLLLDAGAPWNALSPEGLSAGDLTSDPATYDLLLDHALRSELILGTVARRQAASANSSDGVPAETYLDSRVSFSEDRVMDAESKAVMMEWERPLMEAHARAVCAAGGGKVLNVGFGMGLVDQAIQRYEPEEHTIIEAHPEVYARMLKLGWGEKKNVRILFGRWQDVIPQLGSYDGIFFDTYGEYYEDMREFHEHLPKLLNPGGVYSYFNGLCGDNAFFHVVYCQLVAMELASLGYSTQFVPLPVRDCLKAEVWEGVKQKYWQLDTYHLPVCQAESESE

SEQ ID NO: 11599 - protein, 340 aa, Triticum aestivum
  misc_feature (1)..(340): Ceres Seq. ID no. 13655722
MAAPPDSKSDKSPEELLCAAAEAGNDDAIAEIISSGADPTYFDASGMTPLMRAASGGHAAAARLLLDAGAPWNALSPEGLSAGDLTSDPATYDLLLDHALRSELILGTVARRQAASANSSDGVPAETYLDSRVSFSEDRVMDAESKAVMMEWERPLMEAHARAVCAAGGGKVLNVGFGMGLVDQAIQRYEPEEHTIIEAHPEVYARMLKLGWGEKKNVRILFGRWQDVIPQLGSYDGIFFDTYGEYYEDMREFHEHLPKLLNPGGVYSYFNGLCGDNAFFHVVYCQLVAMELASLGYSTQFVPLPVRDCLKAEVWEGVKQKYWQLDTYHLPVCQAESESE

SEQ ID NO: 11600 - protein, 294 aa, Triticum aestivum
  misc_feature (1)..(294): Ceres Seq. ID no. 13655723
MTPLMRAASGGHAAAARLLLDAGAPWNALSPEGLSAGDLTSDPATYDLLLDHALRSELILGTVARRQAASANSSDGVPAETYLDSRVSFSEDRVMDAESKAVMMEWERPLMEAHARAVCAAGGGKVLNVGFGMGLVDQAIQRYEPEEHTIIEAHPEVYARMLKLGWGEKKNVRILFGRWQDVIPQLGSYDGIFFDTYGEYYEDMREFHEHLPKLLNPGGVYSYFNGLCGDNAFFHVVYCQLVAMELASLGYSTQFVPLPVRDCLKAEVWEGVKQKYWQLDTYHLPVCQAESESE

SEQ ID NO: 11601 - DNA, 1732 bp, Triticum aestivum
  misc_feature (1)..(1732): Ceres Seq. ID no. 13655724
cacagatagcctagagagacagggtccgcaaagcaagcaccgcccggcaaaggcaagaaagagccatccatccatccatcatccccttcctcgtgcgctgctgcctcttgcttctttcttcttcgtctagtaccaagctcaagctagatagatatccatggtttttctctccttgcttgcttgcgaattgctgcaggttgtaagtagataggtgttatacgtagtaggagctactagtagataggcggcgggtgggagaggagatgaagctccatctcctgctgaaggtcctgttcggccccgtgccggtctacttctcggcgctggccatcctcatcctgctgaccaacgcgcagtacttcgggctcggcggcgtcggcgtgccgcgcgccaccaagctggcctcctccacgcaggtggtgagcgtgatgaagtactgcgacatcttccgcggcgagtgggtgcccgacgcggaggcgccctactacaaccacaagacgtgcggcatgatccaggagcaccagaactgcctcaagtacggccgaccggacctcggcttcctcaagtggcgctggaggccgtccggctgcgagctgccgcgcttcgaccccgtccagttcctgcagttcgtccgccacaagtccctcgccttcgtcggggactccctggctcgcaaccatatgcagtccttgctctgcctcctctcacaggtggcgtatcccaaggacatctcggcgaacccgacggaccagaacaaggtgtaccactaccgggcgtacaacttcaccatcaacatgttctggtcgccgttcctggtgcgggcgcgggagcccgaccacgacgacccggcgcacacggggcactacagcctctacctggacgagccggacgacaagtgggtgtcgcaggtgccccggttcgactacgtgctggtgtcggcggccaactggttctcccgcccctcgctcttctacgagaagcggcggctgatcgggtgcagcttctgcagccggcagtacggcgtgccggacctgacgctctactactcgcagcgcaaggcgtggcgggtggcgctgcgggcgatcaacgccctggagggcaaggtgaaggcgcgggtgattgtgcggatgctgtcgcccatgtcgcacttcgagaacgggacctgggaccagggcggcaactgcaagcgcacggaaccggtccggagcaaccagacggtgatggaggggcgggacctgcagttctacacggcgcagatggaggagtaccgcgcggcggagaagaccgcgcggacaaaggggctgcggctgatgctcatggacgccacggccgccatgctgatgcggcccgacggccaccccagccggtacgggcactggcccaacgagaaggtgcagctctacaacgactgcatccattggtgcctccccggccccatcgacatctggaacgacctcttgttccagatgatgctcgtctagcccagtcccgttcccgtccatcggcacacagatctgatcaaaggatatgctccaaggcaattttgataatgaattgttccatctcatctcatctccctcctttcattcttccctactactaccagtcgatccgctttccattcctttgattgatgggtgtggtggtggtaactattgacgacgccaacttttttgtcggtcgtcacggaaagagtgagcaaaagaagctcctctccccttttcttcgtttg

SEQ ID NO: 11602 - protein, 405 aa, Triticum aestivum
  misc_feature (1)..(405): Ceres Seq. ID no. 15219769
MKLHLLLKVLFGPVPVYFSALAILILLTNAQYFGLGGVGVPRATKLASSTQVVSVMKYCDIFRGEWVPDAEAPYYNHKTCGMIQEHQNCLKYGRPDLGFLKWRWRPSGCELPRFDPVQFLQFVRHKSLAFVGDSLARNHMQSLLCLLSQVAYPKDISANPTDQNKVYHYRAYNFTINMFWSPFLVRAREPDHDDPAHTGHYSLYLDEPDDKWVSQVPRFDYVLVSAANWFSRPSLFYEKRRLIGCSFCSRQYGVPDLTLYYSQRKAWRVALRAINALEGKVKARVIVRMLSPMSHFENGTWDQGGNCKRTEPVRSNQTVMEGRDLQFYTAQMEEYRAAEKTARTKGLRLMLMDATAAMLMRPDGHPSRYGHWPNEKVQLYNDCIHWCLPGPIDIWNDLLFQMMLV

SEQ ID NO: 11603 - protein, 350 aa, Triticum aestivum
  misc_feature (1)..(350): Ceres Seq. ID no. 15219770
MKYCDIFRGEWVPDAEAPYYNHKTCGMIQEHQNCLKYGRPDLGFLKWRWRPSGCELPRFDPVQFLQFVRHKSLAFVGDSLARNHMQSLLCLLSQVAYPKDISANPTDQNKVYHYRAYNFTINMFWSPFLVRAREPDHDDPAHTGHYSLYLDEPDDKWVSQVPRFDYVLVSAANWFSRPSLFYEKRRLIGCSFCSRQYGVPDLTLYYSQRKAWRVALRAINALEGKVKARVIVRMLSPMSHFENGTWDQGGNCKRTEPVRSNQTVMEGRDLQFYTAQMEEYRAAEKTARTKGLRLMLMDATAAMLMRPDGHPSRYGHWPNEKVQLYNDCIHWCLPGPIDIWNDLLFQMMLV

SEQ ID NO: 11604 - protein, 324 aa, Triticum aestivum
  misc_feature (1)..(324): Ceres Seq. ID no. 15219771
MIQEHQNCLKYGRPDLGFLKWRWRPSGCELPRFDPVQFLQFVRHKSLAFVGDSLARNHMQSLLCLLSQVAYPKDISANPTDQNKVYHYRAYNFTINMFWSPFLVRAREPDHDDPAHTGHYSLYLDEPDDKWVSQVPRFDYVLVSAANWFSRPSLFYEKRRLIGCSFCSRQYGVPDLTLYYSQRKAWRVALRAINALEGKVKARVIVRMLSPMSHFENGTWDQGGNCKRTEPVRSNQTVMEGRDLQFYTAQMEEYRAAEKTARTKGLRLMLMDATAAMLMRPDGHPSRYGHWPNEKVQLYNDCIHWCLPGPIDIWNDLLFQMMLV

SEQ ID NO: 11605 - DNA, 2306 bp, Triticum aestivum
  misc_feature (1)..(2306): Ceres Seq. ID no. 13655755
atccctctcccaactccaaaccatctccgccgccgccgccgaacaccacctccaccgcccacgaaatcttctccccgaagacgcgcgaaccccgccggagacgagaggcatggacgccaagtcggtgacgccgggcgccgtggctctcatcctcgccaaccccacgccggagtcgcccgacgacgtgccggagatcgtcgtgcaggtcctcgacctcaagcccatcggctcccgcttcactttcatggccagcgacggggaggcgaaggtcaaggcgatcctctccacccacttcgcgtcggaggtccactccggcaagctccagaacctcggcctcgtccgcatcctcaactacacgtgcaacgacatcccacaaaagacggacaagatggtgatcatcaccaagtgcgaggtcgtgtcccaggcgctcgacgccgagatcaagagcgaggtcaggatagaagagccagcggctctcatgaagcccaaggaggaggctgcggtcctctccaagcccattggcggggccccggctgcgattatgctgaagccgaggcatgacgtgaagtccgcgtcccagattgttagcgagcagcgcggaaatgctgctcccgctgctcgcttggccatgacgagacgggtgcatcctctgatctccctgaacccctaccaggggaactgggtcatcaaagtgcgggtcacaagcaagggcaacctcaggtcatacaggaatgcccgtggagaaggccatgtcttcaacgtagagctcactgatgaggatggcacccagatccaggccaccatgttcaacgagcctgcaaagaagttctatcccgtgtttgagcttgggaaggtctactacatctccaaggggtcgctcagaattgcgaacaagcagttcaagacagtccagaatgactatgagatgaccctgaatgagaatgctgttgttgaagaagctgagggtgaatctttcattccaccagtgcaatacaactttgtcaagattgatatgctggggccatatgttggtggcagggagttagtagatatcattggtgttgttcagagtgtatcacctactttgagtatcagaagaaagatcgacaatgagtcaatcccaaagcgtgacattgttgttgcagatgactcgaacaaaactgtcaccatttctctttggaatgatcttgccaccactgtcggtgaggaactcttggacatggttgactctgcacctatcattgcagtcaagagcctgaaggtgtctgactttcaaggtgtgtctgtttctacagtaggcaaaagcacacttgtgattaacccagagttgcctgagactgagaagcttagagcttggtatgaatctgaaggcaagggtactgccttggcatcagttggtgctggaatgggtgcatccaacgctggtggcttgagatcaatgtactctgacagagtttttctgtctcacatcacaagtgaccctaacttgggccaggataagcctgttttcttcagcctgtatgccaacataagcaacatcaagcctgaccagaccatgtggtaccgcgcttgcaccacctgtaacaagaaggtgactgaggcacttggatcaggattctggtgtgaagggtgccagaagaactatgagcagtgctcattgaggtacatcatggtgatcaaggtctctgatcccactggtgaggcctggctgtctcttttcaatgaccaagcagagagaatcgtcggctgcagcgcagatgagcttgatcggatcaggaaagaggagggcgatgacatgttccagctcaagctgaaggaagccacctggattcctcacctgttccgtgtcagcgtcgtgcagaacgagtacatgggcgagaagaggcagcgaatcaccgtgaggagcgagtcaccggtcgactacgccgctgaagccaggtaccagctcgaggagatcgccaagctcacctccagctagaagaagatgcaagaggagtatgcctgctcccctcgaggagattcccaagctcaccgctgcctgctgggagaagatgctccccttgaggagatagatatccaggctcatcgcactagacggagccatgttttggccccaagtttcctgaagtgtagtgctgcttcagccgtgtctttctgccgtgtcgctcctcaaatgtagtggtaacttaaaacgtgttatatatgtagatgtttgattcggaggacatcggggtattcttctgttctactatctgtttgatctgcaaccttctgcatatgacaaggatgtatgcagatccactgcc

SEQ ID NO: 11606 - protein, 658 aa, Triticum aestivum
  misc_feature (1)..(658): Ceres Seq. ID no. 13655756
SLSQLQTISAAAAEHHLHRPRNLLPEDARTPPETRGMDAKSVTPGAVALILANPTPESPDDVPEIVVQVLDLKPIGSRFTFMASDGEAKVKAILSTHFASEVHSGKLQNLGLVRILNYTCNDIPQKTDKMVIITKCEVVSQALDAEIKSEVRIEEPAALMKPKEEAAVLSKPIGGAPAAIMLKPRHDVKSASQIVSEQRGNAAPAARLAMTRRVHPLISLNPYQGNWVIKVRVTSKGNLRSYRNARGEGHVFNVELTDEDGTQIQATMFNEPAKKFYPVFELGKVYYISKGSLRIANKQFKTVQNDYEMTLNENAVVEEAEGESFIPPVQYNFVKIDMLGPYVGGRELVDIIGVVQSVSPTLSIRRKIDNESIPKRDIVVADDSNKTVTISLWNDLATTVGEELLDMVDSAPIIAVKSLKVSDFQGVSVSTVGKSTLVINPELPETEKLRAWYESEGKGTALASVGAGMGASNAGGLRSMYSDRVFLSHITSDPNLGQDKPVFFSLYANISNIKPDQTMWYRACTTCNKKVTEALGSGFWCEGCQKNYEQCSLRYIMVIKVSDPTGEAWLSLFNDQAERIVGCSADELDRIRKEEGDDMFQLKLKEATWIPHLFRVSVVQNEYMGEKRQRITVRSESPVDYAAEARYQLEEIAKLTSS

SEQ ID NO: 11607 - protein, 622 aa, Triticum aestivum
  misc_feature (1)..(622): Ceres Seq. ID no. 13655757
MDAKSVTPGAVALILANPTPESPDDVPEIVVQVLDLKPIGSRFTFMASDGEAKVKAILSTHFASEVHSGKLQNLGLVRILNYTCNDIPQKTDKMVIITKCEVVSQALDAEIKSEVRIEEPAALMKPKEEAAVLSKPIGGAPAAIMLKPRHDVKSASQIVSEQRGNAAPAARLAMTRRVHPLISLNPYQGNWVIKVRVTSKGNLRSYRNARGEGHVFNVELTDEDGTQIQATMFNEPAKKFYPVFELGKVYYISKGSLRIANKQFKTVQNDYEMTLNENAVVEEAEGESFIPPVQYNFVKIDMLGPYVGGRELVDIIGVVQSVSPTLSIRRKIDNESIPKRDIVVADDSNKTVTISLWNDLATTVGEELLDMVDSAPIIAVKSLKVSDFQGVSVSTVGKSTLVINPELPETEKLRAWYESEGKGTALASVGAGMGASNAGGLRSMYSDRVFLSHITSDPNLGQDKPVFFSLYANISNIKPDQTMWYRACTTCNKKVTEALGSGFWCEGCQKNYEQCSLRYIMVIKVSDPTGEAWLSLFNDQAERIVGCSADELDRIRKEEGDDMFQLKLKEATWIPHLFRVSVVQNEYMGEKRQRITVRSESPVDYAAEARYQLEEIAKLTSS

SEQ ID NO: 11608 - protein, 577 aa, Triticum aestivum
  misc_feature (1)..(577): Ceres Seq. ID no. 13655758
MASDGEAKVKAILSTHFASEVHSGKLQNLGLVRILNYTCNDIPQKTDKMVIITKCEVVSQALDAEIKSEVRIEEPAALMKPKEEAAVLSKPIGGAPAAIMLKPRHDVKSASQIVSEQRGNAAPAARLAMTRRVHPLISLNPYQGNWVIKVRVTSKGNLRSYRNARGEGHVFNVELTDEDGTQIQATMFNEPAKKFYPVFELGKVYYISKGSLRIANKQFKTVQNDYEMTLNENAVVEEAEGESFIPPVQYNFVKIDMLGPYVGGRELVDIIGVVQSVSPTLSIRRKIDNESIPKRDIVVADDSNKTVTISLWNDLATTVGEELLDMVDSAPIIAVKSLKVSDFQGVSVSTVGKSTLVINPELPETEKLRAWYESEGKGTALASVGAGMGASNAGGLRSMYSDRVFLSHITSDPNLGQDKPVFFSLYANISNIKPDQTMWYRACTTCNKKVTEALGSGFWCEGCQKNYEQCSLRYIMVIKVSDPTGEAWLSLFNDQAERIVGCSADELDRIRKEEGDDMFQLKLKEATWIPHLFRVSVVQNEYMGEKRQRITVRSESPVDYAAEARYQLEEIAKLTSS

SEQ ID NO: 11609 - DNA, 1237 bp, Triticum aestivum
  misc_feature (1)..(1237): Ceres Seq. ID no. 13655808
cctagaacatcctaatcgaaaagattacaataataaacacacatgacacatctcctctctcgctctccctcccaggcagcatccaaagaagcggctagctttgctgctgctgctccaaccgaaaaggcgaggggagacggaggaggggcggccgtggggaggagcgtgaggccgcgagctccagctccagctcaaccctgaagaagaaggcctctccccttcccccgagctcaagcccagagcaaagctcacttatgtctgcctatggagtcatctacaactgatgccggtgataagcatttggagagctacctgacattgggtttgacagtatcgcagtcaaagaaagggaataccaagtttccaaaggtcctgtcgcttcttgccacatatctgggcagatcagttcagaagaatgaagaattactaggttcaaatggaataaaggaggcagccaccatctttcatggccagaaggtgccagatctcagtatacagctctatgcagaacgcatcttcaagtatgctgagtgcagtccatcctgctttgtgttggcacttrtctacatggagagatatctacagcagccaaatgtgtacatgacgcccttcagcgttcatcgcttgctgattacaagtgtggtggttgctgccaaattcacagatgacgcgtttttcaacaatgcattctacgctagagtgggaggaatccgcacaatcgagatgaatcggcttgaactggatttgttatttaatctggacttcaggctgaaagtgaacctagagacgtttgggagctactgcttgcaactggagaaacatgcaccggtgtcaccagagagactgccggttcaggttcatcgtgtcaatggatctaaagatttgagctatagcaacagcagcgccgacgagttttgccagagcaagcttgtaagctacagcagccaggctctccaaggatgcagctgaccaatctatttatggcctaaagttttgcaaagcatgtgacctgattactgataattcttttagatctgacatttgtgcattcagattgcattaagttgttctgagggtgtttgattagtagggattcgattctgctttacttgtgtaacactgtaattcttgcaaaccactttgtttaaaatgttcacaatctagttgggaaacaccaggtctgaatattattcagtcctgtgattccaatgccgcggttttaccggatctgctgccc

SEQ ID NO: 11610 - protein, 234 aa, Triticum aestivum
  misc_feature (1)..(234): Ceres Seq. ID no. 15220555
  misc_feature (100)..(100): Xaa is any aa, unknown or other
MESSTTDAGDKHLESYLTLGLTVSQSKKGNTKFPKVLSLLATYLGRSVQKNEELLGSNGIKEAATIFHGQKVPDLSIQLYAERIFKYAECSPSCFVLALXYMERYLQQPNVYMTPFSVHRLLITSVVVAAKFTDDAFFNNAFYARVGGIRTIEMNRLELDLLFNLDFRLKVNLETFGSYCLQLEKHAPVSPERLPVQVHRVNGSKDLSYSNSSADEFCQSKLVSYSSQALQGCS

SEQ ID NO: 11611 - protein, 133 aa, Triticum aestivum
  misc_feature (1)..(133): Ceres Seq. ID no. 15220556
MERYLQQPNVYMTPFSVHRLLITSVVVAAKFTDDAFFNNAFYARVGGIRTIEMNRLELDLLFNLDFRLKVNLETFGSYCLQLEKHAPVSPERLPVQVHRVNGSKDLSYSNSSADEFCQSKLVSYSSQALQGCS

SEQ ID NO: 11612 - protein, 122 aa, Triticum aestivum
  misc_feature (1)..(122): Ceres Seq. ID no. 15220557
MTPFSVHRLLITSVVVAAKFTDDAFFNNAFYARVGGIRTIEMNRLELDLLFNLDFRLKVNLETFGSYCLQLEKHAPVSPERLPVQVHRVNGSKDLSYSNSSADEFCQSKLVSYSSQALQGCS

SEQ ID NO: 11613 - DNA, 1456 bp, Triticum aestivum
  misc_feature (1)..(1456): Ceres Seq. ID no. 13655812
aacggtagcatcgctcgtgatagcactgcaacctgggaaccactttctttacattgctctcagtcgagtcaccacttgccagcgatggagagctgcagcttggtcgacacggccgccgccgctctctgctcgacaccgggcgcgcgccgccgcggccgcgccgggagcgccgcgaggttcttcaactgctccagctcctccagagagcacggggtgagcgcgtcctactccatcggccggatgctgagcggggtgaggtcggcggcgcggaggaagctgttcaggagcgagcccgagtggatgggcgtcaactggccggactccatcggccaccattggtggacatccctggagaacaacttcgtgctcgaggcctccgaggacgagtacggcggggtcgtcgtcgacgccgacaggctgccgtccgacgaggccgccttcgcccggtcgctagcggcgtccctctcctactggcagtccgtgggaaagaaaggggtgtggctgaaattgccagtggatcgatctgagtttgttccaatagcagtcaaggaaggattcaagtaccaccacgcggaggaggcctacttgatgctgacgtactggatccccgacgagccgtctctgctcccagcgaacgcttctcatcaggtcggcgtcgggggcttcgtgatcaatgatcaaatggaggtcctagtggtgcaagagaagtatcgcggctgggcgttggatggtgtctggaaactccccacggggttcattcaggagtcagaagaaatatacacgggagccatcagagaggtgcaggaagaaacaggggttgacactgaattcgtggatgtggttgccttcaggcacgcgcacaacgtggcgtttcagaagtcggacctgttcttcatctgcatgctgaggcctctgtcgagcgcgatcaagatcgacgaaacagagattcaggcagcaaagtggatgccgctggaggagttcgtgaagcagccgttcatccaggaggaccacatgttccagaagatcatggacatctgcatccagcggctgaggaagtgctactgcggcctcacggcgcacaacgtcgtctccaagttcgacggcaggcagtccaccctctactacaacgtgggcgagcccgaggatgtcaactgcgacgctgcctgacgggtcgccggattctttttttctttgctctgcgaccgtctaggcgttgtgcggtgcaaagttgtagcattaaggaggcaactggattggcctctgtatatacgtgtaggagactgtaattagacatgggcgggacgggttagctctgtcgcgtagtaatgtgtactactattcgtcagtgtaccggtggtggcaattatctagaagaaatggcagtgatctggaagatatatctttctttcagtttcagtgtattgtgcactttgaaaagaccatgtttctccacgct

SEQ ID NO: 11614 - protein, 388 aa, Triticum aestivum
  misc_feature (1)..(388): Ceres Seq. ID no. 15220558
NGSIARDSTATWEPLSLHCSQSSHHLPAMESCSLVDTAAAALCSTPGARRRGRAGSAARFFNCSSSSREHGVSASYSIGRMLSGVRSAARRKLFRSEPEWMGVNWPDSIGHHWWTSLENNFVLEASEDEYGGVVVDADRLPSDEAAFARSLAASLSYWQSVGKKGVWLKLPVDRSEFVPIAVKEGFKYHHAEEAYLMLTYWIPDEPSLLPANASHQVGVGGFVINDQMEVLVVQEKYRGWALDGVWKLPTGFIQESEEIYTGAIREVQEETGVDTEFVDVVAFRHAHNVAFQKSDLFFICMLRPLSSAIKIDETEIQAAKWMPLEEFVKQPFIQEDHMFQKIMDICIQRLRKCYCGLTAHNVVSKFDGRQSTLYYNVGEPEDVNCDAA

SEQ ID NO: 11615 - protein, 360 aa, Triticum aestivum
  misc_feature (1)..(360): Ceres Seq. ID no. 15220559
MESCSLVDTAAAALCSTPGARRRGRAGSAARFFNCSSSSREHGVSASYSIGRMLSGVRSAARRKLFRSEPEWMGVNWPDSIGHHWWTSLENNFVLEASEDEYGGVVVDADRLPSDEAAFARSLAASLSYWQSVGKKGVWLKLPVDRSEFVPIAVKEGFKYHHAEEAYLMLTYWIPDEPSLLPANASHQVGVGGFVINDQMEVLVVQEKYRGWALDGVWKLPTGFIQESEEIYTGAIREVQEETGVDTEFVDVVAFRHAHNVAFQKSDLFFICMLRPLSSAIKIDETEIQAAKWMPLEEFVKQPFIQEDHMFQKIMDICIQRLRKCYCGLTAHNVVSKFDGRQSTLYYNVGEPEDVNCDAA

SEQ ID NO: 11616 - protein, 308 aa, Triticum aestivum
  misc_feature (1)..(308): Ceres Seq. ID no. 15220560
MLSGVRSAARRKLFRSEPEWMGVNWPDSIGHHWWTSLENNFVLEASEDEYGGVVVDADRLPSDEAAFARSLAASLSYWQSVGKKGVWLKLPVDRSEFVPIAVKEGFKYHHAEEAYLMLTYWIPDEPSLLPANASHQVGVGGFVINDQMEVLVVQEKYRGWALDGVWKLPTGFIQESEEIYTGAIREVQEETGVDTEFVDVVAFRHAHNVAFQKSDLFFICMLRPLSSAIKIDETEIQAAKWMPLEEFVKQPFIQEDHMFQKIMDICIQRLRKCYCGLTAHNVVSKFDGRQSTLYYNVGEPEDVNCDAA

SEQ ID NO: 11617 - DNA, 1783 bp, Triticum aestivum
  misc_feature (1)..(1783): Ceres Seq. ID no. 13655852
cccgaatccaaatccgccattgcacagccggaccagtgccactcgaaccccacgtaccctctctatcccaaccctagcgcggcggcggcgtcgatggcgtcgatggcgtcgatcccgtctgacgaggtctccgagaacggccacggcaacggaaacggcccatccccgccgcgcgccaagcgcccccgcgcagcgttgatctcggccgcccagatccgcgacgagttcgcgcatcacgaccccgcagttgcccgcgtcaacaacggcagcttcggctgctgcccggcctccgtgctcgaagcgcaggcgcgctggcagcgcctcttcctcgctcagcccgacgccttctacttcgacggccttcagccggggctccgccgctcccgcgcagccgtcgcggcccttgtcaacgctggggacgtctccgagatttccctcgtcgacaacgctaccaccgctgctgcaatcgtgctgcagcatgccgcctggagctttgccgaggggcacttcgctcgtggcgacgctgtgctcatgctccattacgcctacggagcagtaaagaaatctatccaggcctacgttgcccgcgcgggcgccactgtcgtcgaggtacccctcccgttcccggtcacctcccctgacgccattattgcggagttccatgctgcgctcgctgttgccaaggccggtggtcgtaaggtccggcttgctgtcattgatcacatcacctccatgcccagtgttctcattccagtcaaggagctagttgccatttgtcgccatgagggtgtcgacaaagtttttgttgatgctgcacactctgttgggcaagtccctgtcgatgtgcgagacattggggcggatttctacactagcaacctccacaagtggttcttttgccccccggccgtggctttcttacacacccgcaagggtggcccgataacctctcagctccaccaccctgttgtgtcacatgaatatggcaacgggctacctatggagagtggatggattgggacacgggattacagtgcccagatcgtcgttcctgaagctattcactttgtgaaccgatttgaaggtgggattgaggggatacgcagccggaaccatgagaaggtaattgagatggggaggatgcttgccgaagcatgggggacagttcttggatcaccaccagtaatgtgtggaagcatggctatggtagggatgcctagttgtctttgcattgagagtgacgatgatgcactgagagtgcggaccatgttgaggaaggatttcaaagttgaggtgcctatatactacaatagcagacaggttaaagtgcaagagatggcaaaggataatagtagtgatccagtgacggggtatgtaagaatctcacaccaggtttacaatgtcaaggaggagtatgagaggctgagagatgctgtcaataagcttgttgctgaggggttcaccagtgccgaattgaggccagctgagaagcaagaagctctggcttgatgacgtggcatctagccagcactccatccgaagatggattaattagttgtggatctgtgccagaagcctgtgctgcaccgagatcgagttctttggtagcccgctcaatggcatcgccatttgatgtagtgtactttcacatactgacaaatgttgtatttgagcttgcaataacgtgcactggaatggaatgtatgtcttctcccttcacttgcatttttgagctgtaatgtaagaataatgatctgaatgcaaggagacttgcatgctttct

SEQ ID NO: 11618 - protein, 502 aa, Triticum aestivum
  misc_feature (1)..(502): Ceres Seq. ID no. 13655853
PESKSAIAQPDQCHSNPTYPLYPNPSAAAASMASMASIPSDEVSENGHGNGNGPSPPRAKRPRAALISAAQIRDEFAHHDPAVARVNNGSFGCCPASVLEAQARWQRLFLAQPDAFYFDGLQPGLRRSRAAVAALVNAGDVSEISLVDNATTAAAIVLQHAAWSFAEGHFARGDAVLMLHYAYGAVKKSIQAYVARAGATVVEVPLPFPVTSPDAIIAEFHAALAVAKAGGRKVRLAVIDHITSMPSVLIPVKELVAICRHEGVDKVFVDAAHSVGQVPVDVRDIGADFYTSNLHKWFFCPPAVAFLHTRKGGPITSQLHHPVVSHEYGNGLPMESGWIGTRDYSAQIVVPEAIHFVNRFEGGIEGIRSRNHEKVIEMGRMLAEAWGTVLGSPPVMCGSMAMVGMPSCLCIESDDDALRVRTMLRKDFKVEVPIYYNSRQVKVQEMAKDNSSDPVTGYVRISHQVYNVKEEYERLRDAVNKLVAEGFTSAELRPAEKQEALA

SEQ ID NO: 11619 - protein, 471 aa, Triticum aestivum
  misc_feature (1)..(471): Ceres Seq. ID no. 13655854
MASMASIPSDEVSENGHGNGNGPSPPRAKRPRAALISAAQIRDEFAHHDPAVARVNNGSFGCCPASVLEAQARWQRLFLAQPDAFYFDGLQPGLRRSRAAVAALVNAGDVSEISLVDNATTAAAIVLQHAAWSFAEGHFARGDAVLMLHYAYGAVKKSIQAYVARAGATVVEVPLPFPVTSPDAIIAEFHAALAVAKAGGRKVRLAVIDHITSMPSVLIPVKELVAICRHEGVDKVFVDAAHSVGQVPVDVRDIGADFYTSNLHKWFFCPPAVAFLHTRKGGPITSQLHHPVVSHEYGNGLPMESGWIGTRDYSAQIVVPEAIHFVNRFEGGIEGIRSRNHEKVIEMGRMLAEAWGTVLGSPPVMCGSMAMVGMPSCLCIESDDDALRVRTMLRKDFKVEVPIYYNSRQVKVQEMAKDNSSDPVTGYVRISHQVYNVKEEYERLRDAVNKLVAEGFTSAELRPAEKQEALA

SEQ ID NO: 11620 - protein, 468 aa, Triticum aestivum
  misc_feature (1)..(468): Ceres Seq. ID no. 13655855
MASIPSDEVSENGHGNGNGPSPPRAKRPRAALISAAQIRDEFAHHDPAVARVNNGSFGCCPASVLEAQARWQRLFLAQPDAFYFDGLQPGLRRSRAAVAALVNAGDVSEISLVDNATTAAAIVLQHAAWSFAEGHFARGDAVLMLHYAYGAVKKSIQAYVARAGATVVEVPLPFPVTSPDAIIAEFHAALAVAKAGGRKVRLAVIDHITSMPSVLIPVKELVAICRHEGVDKVFVDAAHSVGQVPVDVRDIGADFYTSNLHKWFFCPPAVAFLHTRKGGPITSQLHHPVVSHEYGNGLPMESGWIGTRDYSAQIVVPEAIHFVNRFEGGIEGIRSRNHEKVIEMGRMLAEAWGTVLGSPPVMCGSMAMVGMPSCLCIESDDDALRVRTMLRKDFKVEVPIYYNSRQVKVQEMAKDNSSDPVTGYVRISHQVYNVKEEYERLRDAVNKLVAEGFTSAELRPAEKQEALA

SEQ ID NO: 11621 - DNA, 1367 bp, Triticum aestivum
  misc_feature (1)..(1367): Ceres Seq. ID no. 13655881
gctctctcgcatcccgatctcccctgctgctttcttctcctcctcatcccaaaccctagcccccctccgcctcggccaccgcttcgtcgccatggccgccgccgccgcggaggagttcgtgaagggtcgcgtcttccccaacggcgtcgcggtcatcaccctcgaccgccccaaggccctcaacgccatgaacctcgaaatggaccttaggtacaagacatttcttgatgactgggaaacaaatccaaacgtgaagtgcattcttgtggaaagcagttctccgcgtgccttctcagctgggatggatattaagggcgttgcagcggaaattcaaaaggacaagagcacatcacttgtgcaaaaggtcttcacagctgagtactctttgatttgcaagatacatgagtatgcaaaaccttatatatgcttgatggatggtgtgaccatggggtttggaattggattgtctggacatgggcgctaccgcattattacggagagaacactgctggccatgccggaaaatggtattggcttgttcccagatgttggctttgcttacatcggtgcaaaagcgccaggagggggtgcagtcggagcttaccttgggatgacaggaaaaagaatatcttcacctgctgatgctctattcattggtctcggaacccattatgtaccttccggggacttgggttcactcaaggaatccctcctgagtgctaacttcrctgctgatcctcacaaagatgttgagtcactcctgactgggtacaagaaggagcctgagtcggtgccccaattagaaaagcttttaccggatatcgtttcttcttttggtcctgataaatcagctactgaatctgtggaagagctaaagaagcgtactcaaaatggtgatgccacagtgtcagaatgggccaatgatgctttagcaggacttaagaaaggtgctccgttttctctttgtttaacacagaaacatttctctcgagttgcatcatcatatgggaacaatgaaaattatctatctaagttggctggtgttatgaaattggagtaccgtattgccttgagatcgtcggttcgaaatgattttgctgaaggcgtacgcgctgtcttagttgacaaggaccagaatccaaaatggagtccagcaactctggaagaggtaaacatggatgaggtcgaatcagtgtttgaaccattagctgccgatgctgagttgaatgtgtgattttctgtagcagcccagaatgctgtgaccacctgaacaccctttgtccttccgatgatgtaataggaaattactacaaacctacacacggctatccattgagccaataaatttgcctggagtgcatcgtctg

SEQ ID NO: 11622 - protein, 410 aa, Triticum aestivum
  misc_feature (1)..(410): Ceres Seq. ID no. 15219778
  misc_feature (243)..(243): Xaa is any aa, unknown or other
LSRIPISPAAFFSSSSQTLAPLRLGHRFVAMAAAAAEEFVKGRVFPNGVAVITLDRPKALNAMNLEMDLRYKTFLDDWETNPNVKCILVESSSPRAFSAGMDIKGVAAEIQKDKSTSLVQKVFTAEYSLICKIHEYAKPYICLMDGVTMGFGIGLSGHGRYRIITERTLLAMPENGIGLFPDVGFAYIGAKAPGGGAVGAYLGMTGKRISSPADALFIGLGTHYVPSGDLGSLKESLLSANFXADPHKDVESLLTGYKKEPESVPQLEKLLPDIVSSFGPDKSATESVEELKKRTQNGDATVSEWANDALAGLKKGAPFSLCLTQKHFSRVASSYGNNENYLSKLAGVMKLEYRIALRSSVRNDFAEGVRAVLVDKDQNPKWSPATLEEVNMDEVESVFEPLAADAELNV

SEQ ID NO: 11623 - protein, 380 aa, Triticum aestivum
  misc_feature (1)..(380): Ceres Seq. ID no. 15219779
  misc_feature (213)..(213): Xaa is any aa, unknown or other
MAAAAAEEFVKGRVFPNGVAVITLDRPKALNAMNLEMDLRYKTFLDDWETNPNVKCILVESSSPRAFSAGMDIKGVAAEIQKDKSTSLVQKVFTAEYSLICKIHEYAKPYICLMDGVTMGFGIGLSGHGRYRIITERTLLAMPENGIGLFPDVGFAYIGAKAPGGGAVGAYLGMTGKRISSPADALFIGLGTHYVPSGDLGSLKESLLSANFXADPHKDVESLLTGYKKEPESVPQLEKLLPDIVSSFGPDKSATESVEELKKRTQNGDATVSEWANDALAGLKKGAPFSLCLTQKHFSRVASSYGNNENYLSKLAGVMKLEYRIALRSSVRNDFAEGVRAVLVDKDQNPKWSPATLEEVNMDEVESVFEPLAADAELNV

SEQ ID NO: 11624 - protein, 348 aa, Triticum aestivum
  misc_feature (1)..(348): Ceres Seq. ID no. 15219780
  misc_feature (181)..(181): Xaa is any aa, unknown or other
MNLEMDLRYKTFLDDWETNPNVKCILVESSSPRAFSAGMDIKGVAAEIQKDKSTSLVQKVFTAEYSLICKIHEYAKPYICLMDGVTMGFGIGLSGHGRYRIITERTLLAMPENGIGLFPDVGFAYIGAKAPGGGAVGAYLGMTGKRISSPADALFIGLGTHYVPSGDLGSLKESLLSANFXADPHKDVESLLTGYKKEPESVPQLEKLLPDIVSSFGPDKSATESVEELKKRTQNGDATVSEWANDALAGLKKGAPFSLCLTQKHFSRVASSYGNNENYLSKLAGVMKLEYRIALRSSVRNDFAEGVRAVLVDKDQNPKWSPATLEEVNMDEVESVFEPLAADAELNV

SEQ ID NO: 11625 - DNA, 1777 bp, Triticum aestivum
  misc_feature (1)..(1777): Ceres Seq. ID no. 13655927
acgcaaaaagggacgaaaaaccaaacttctcccgcaagactggctcgcaccaaatcgcatcgcccttggagtcgcccctcactgatcccttggcgtcctgcttcccaagccacagcccacaggcccccacgcccagctcctcccgctccgatttcacagcctgcgagctagccatgtcgattcggccgctgttgctgccggagccgccgggcgaggtggatcgggcgccggagatcttcgcgggtggcgtggccgcggtgcgccgcgcagttgtcatcgggaacggctgcgccggcgccgagaaccagtgcctcggcctcgtccgcgccctcggcctggccgaccgcctcacgctctaccgtattatcaggccaaccggaggaatcaacaagtggctgcactttctccctatctccttgcataaaatggtggaccaagtactcagacatatactgtctaacacgacattcacaacactgtttcaaggaaaactgtcggcaccttatcctgtcagtaatgttcaatctcttggattgtcttctgtactggaagcagattccaaaaggatagcgacaatggtccgtgataccttcgagaaggaaggcctggcgatagttgttgcttgtggccgtgataccataccatatgcaagctctgtaaggtgtttagctccagataatgtctttgtcattcagatacaacaccccaggtatcgccttgataggtttgatttggtggtgactcctcgccatgattactacgctttaactgcaaagggacaacaagaagtaccgtggcttttccggagatgaattactccacgagaaccacccggtcctaatgtggtcctgacgtctggagcacttcaccaagcagattctgctgcactacgcattgctgctacaaactggcatgatgaacttgctcccttgccaaagccattggtagtagtaaatattggagaaccaacaagaaactgtaattatggtgtagaccttgccaagcagttggtaagctcactgcacaatgtttcagagacctgtggaagtgtcagaatttcattttccaggagaacgccacaaaacgtgtccgatcttatattgagagagttcagcacacatccaaagttctacatttggggtggtgaagaacctaacccacacctagggcatcttgcatgggccgatgctttcatcataacagcagactcgataagtatgctaagtgaggcgtgcagcactgggaagccggtctatgtcgttggaactgagcattgcaggtggaaattctcagattttcacaacactctgcagaaacgaggggctgttcgtcctttcactggatcagaagatatgtcagacagctggagctaccctcctctgaacgatgccattgatgtggctgcacgggttcgtgaagtgcttgcacaacgtggatggacagtgggttaatagcggtcgaagcagagaaaaagagtgccatttttgctcagttacgttccaagcccagacaattcagagcctgcatttcagttatcttagttgcatctgcatgaggattttttttgccatatgaccgttgcaagacgacatcgcttcttttcaaaagatggctatatttttgggaacatactgtgtaaagttttgagcaatcacacatagacagcagtgtttattcttggcatattcatgcattattgtacctagtgttatgctgtaaagaagccgatagaagtgcgaacggaagttaaaaatctttgtccttggaacgaggtgac

SEQ ID NO: 11626 - protein, 269 aa, Triticum aestivum
  misc_feature (1)..(269): Ceres Seq. ID no. 13655928
AKRDEKPNFSRKTGSHQIASPLESPLTDPLASCFPSHSPQAPTPSSSRSDFTACELAMSIRPLLLPEPPGEVDRAPEIFAGGVAAVRRAVVIGNGCAGAENQCLGLVRALGLADRLTLYRIIRPTGGINKWLHFLPISLHKMVDQVLRHILSNTTFTTLFQGKLSAPYPVSNVQSLGLSSVLEADSKRIATMVRDTFEKEGLAIVVACGRDTIPYASSVRCLAPDNVFVIQIQHPRYRLDRFDLVVTPRHDYYALTAKGQQEVPWLFRR

SEQ ID NO: 11627 - protein, 212 aa, Triticum aestivum
  misc_feature (1)..(212): Ceres Seq. ID no. 13655929
MSIRPLLLPEPPGEVDRAPEIFAGGVAAVRRAVVIGNGCAGAENQCLGLVRALGLADRLTLYRIIRPTGGINKWLHFLPISLHKMVDQVLRHILSNTTFTTLFQGKLSAPYPVSNVQSLGLSSVLEADSKRIATMVRDTFEKEGLAIVVACGRDTIPYASSVRCLAPDNVFVIQIQHPRYRLDRFDLVVTPRHDYYALTAKGQQEVPWLFRR

SEQ ID NO: 11628 - DNA, 1880 bp, Triticum aestivum
  misc_feature (1)..(1880): Ceres Seq. ID no. 13655988
acccgacccatccatcctcctaccagtccgcctcctcaaccccgccgacgcccgcgcgtgaagatcgcccgctccccggccggccgccggcgtccagagcagatacatacagatggacagccataattctacgtcgccccatgttcctgaagtaaccatggacatctcatccgcttctggagcagctgggaacaaagcttgcagaggtgctgcttgcgacttctctgacgccagtaacacctcgaaagattcaaaggagaggtctgcatccatgaagaagctcctaattgctgtgatcctttgtgttatattcatggcggttgaagtggttggaggcatcaaagcaaacagtcttgcaatcttgactgatgctgcccatctcctttcggatgttgcagcctttgccatatctttgttctccctatgggcagctggttgggaagcgacacctcagcagtcatatggatttttccgcatagagattcttggggcactggtttccattcagcttatatggctcctcgctggcatacttgtctacgaagctattatgaggctcattaatgaaagtggcgaggtacagggctccctcatgtttgctgtatcagcttttggtttgtttgttaacatcataatggcagtgttgcttggtcatgaccatgggcacggtggacatggacacagccatggtcatggccatggacattcacatgaccacgatcatggtaactcagaggatgaccattcccatcatggagatcatgagcaggggcatgtacatcaccatgagcacagccatggtacttctattaccgttacaactaatcaccactctcattcgagcactggacaacatcaggatgttgagcaaccattgcttaaacatgatggtgattgtgagagtgcccagcctggagccaagcctgctaagaagcctcgccgcaacatcaatgttcacagtgcctatctgcatgtaattggggactccatccagagcatcggcgtaatgattggaggggctctcatctggtacaagcccgaatggaaggttattgatctcatatgcaccctcatcttctctgtgattgtactgttcaccacaatcaagatgattcggaacatacttgaggtccttatggagagcacgccccgcgagatcgacgccaccaggcttgaaagtggtctccgtgagatggaaggtgtgattgctgtccatgagctgcacatctgggctatcacagtggggaaggtgctcttggcatgccatgtgacgatcacgcaggatgctgatgctgataaaatgcttgacaaggtcattgggtacatcaaggcagagtacaacatcagtcatgtgaccattcagattgagcgagagtaaggcacatgtcaggtagttggggataaaggtgtgtgcctgttaacggtctatcatcttaatgcagttaatgttagacttgcacttgcaaaggcgttgcaggttcatctagctgttgcctttggtgctggagaaatattatatgtacgcgttttcgttagcccattagttgaatgaactattcgggtggtcctagtcgtttgtattcacatggatgcaatttccagacaaattttgagccccttgtgagtttatcaacctgcatgtgtagtttcagtgacaccctttcttagcactcttatgtaaagatctgctacggtatggacagtactgggtatggatgtttattcagtttctgttagctttactaagcttgcttccagcagtttttatgtgcgaatttgcaccttgtgccattgtgtgctttctgtcagggatgtaggtcatctggtgcctaaaatgaagtgcactgctgccagttttaatgcatccattccactattgc

SEQ ID NO: 11629 - protein, 421 aa, Triticum aestivum
  misc_feature (1)..(421): Ceres Seq. ID no. 13655989
MDSHNSTSPHVPEVTMDISSASGAAGNKACRGAACDFSDASNTSKDSKERSASMKKLLIAVILCVIFMAVEVVGGIKANSLAILTDAAHLLSDVAAFAISLFSLWAAGWEATPQQSYGFFRIEILGALVSIQLIWLLAGILVYEAIMRLINESGEVQGSLMFAVSAFGLFVNIIMAVLLGHDHGHGGHGHSHGHGHGHSHDHDHGNSEDDHSHHGDHEQGHVHHHEHSHGTSITVTTNHHSHSSTGQHQDVEQPLLKHDGDCESAQPGAKPAKKPRRNINVHSAYLHVIGDSIQSIGVMIGGALIWYKPEWKVIDLICTLIFSVIVLFTTIKMIRNILEVLMESTPREIDATRLESGLREMEGVIAVHELHIWAITVGKVLLACHVTITQDADADKMLDKVIGYIKAEYNISHVTIQIERE

SEQ ID NO: 11630 - protein, 406 aa, Triticum aestivum
  misc_feature (1)..(406): Ceres Seq. ID no. 13655990
MDISSASGAAGNKACRGAACDFSDASNTSKDSKERSASMKKLLIAVILCVIFMAVEVVGGIKANSLAILTDAAHLLSDVAAFAISLFSLWAAGWEATPQQSYGFFRIEILGALVSIQLIWLLAGILVYEAIMRLINESGEVQGSLMFAVSAFGLFVNIIMAVLLGHDHGHGGHGHSHGHGHGHSHDHDHGNSEDDHSHHGDHEQGHVHHHEHSHGTSITVTTNHHSHSSTGQHQDVEQPLLKHDGDCESAQPGAKPAKKPRRNINVHSAYLHVIGDSIQSIGVMIGGALIWYKPEWKVIDLICTLIFSVIVLFTTIKMIRNILEVLMESTPREIDATRLESGLREMEGVIAVHELHIWAITVGKVLLACHVTITQDADADKMLDKVIGYIKAEYNISHVTIQIERE

SEQ ID NO: 11631 - protein, 368 aa, Triticum aestivum
  misc_feature (1)..(368): Ceres Seq. ID no. 13655991
MKKLLIAVILCVIFMAVEVVGGIKANSLAILTDAAHLLSDVAAFAISLFSLWAAGWEATPQQSYGFFRIEILGALVSIQLIWLLAGILVYEAIMRLINESGEVQGSLMFAVSAFGLFVNIIMAVLLGHDHGHGGHGHSHGHGHGHSHDHDHGNSEDDHSHHGDHEQGHVHHHEHSHGTSITVTTNHHSHSSTGQHQDVEQPLLKHDGDCESAQPGAKPAKKPRRNINVHSAYLHVIGDSIQSIGVMIGGALIWYKPEWKVIDLICTLIFSVIVLFTTIKMIRNILEVLMESTPREIDATRLESGLREMEGVIAVHELHIWAITVGKVLLACHVTITQDADADKMLDKVIGYIKAEYNISHVTIQIERE

SEQ ID NO: 11632 - DNA, 1358 bp, Triticum aestivum
  misc_feature (1)..(1358): Ceres Seq. ID no. 13655992
atcctaatcaaaaacccatcaaacagccctcgcgaactcaacgggaagcgactcacgcccccctccgccccccgcagatcgcccgctccgccacgcgccgccgacgccgccgccaatggccgccgccgccgacgccgggcccgagctgcggcggagctccagcatcgaccgcatcccggcggaggcgcgccgcatcctgcaccgcctcgccggcgagctctggggcgccgacgtcgaccccgccgcgctcgtcgtgtcccagctcaagggcgccctcaccaacgaggtcttccgcatcacctggcccggcggcgagggcgacccgcgcaaggtgctcgtgcgcatctacggccagggcgtcgaggtcttcttcgaccgcgccgacgaggtccgcaccttcgagtgcatgtcccgccacggccagggcccccgcctcctcggccgcttcccccagggccgcgtcgaggagttcatcaacgccaggacgctctcggcgccggatctgcgcgacccggagatttccggcctgattgccaggaagctgcgggagtttcacgagctcgacatgcctggacccaaggacatctcactctggcagaggctgaggcgttggcttgaggaagctcgcagcaggtgctcgactgaggaggccagggaattgcggttggagacgctcggcgatgagattgcggagctggagaatgtattgtccggggtcgatcagagagtagtattttgccataatgatttgcagtatggcaacattatgatatacgaagagaccagacaagtgaccttaatcgactatgaatacgccagttttaaccctgttgcgttcgacattgcgaatcacttctgtgagatggctgctgattatcatagtgatacaccgcacgtgatggactttacaaaatatcctgacgtggatgaacagcggagatttcttgaggcttaccttagttcttcaggagaaaacacatccgatgtagaagtcgaaacattgcttggcttgattgcaaagtacagtctcacaagccatctcttctggggtctctggggaatagtctcggcgcatgtgaacaagaacatcgactttgagtacaaggagtacgcgaggcatcggttcgaccagtactgggacacgaagcctagaatactgcaagcctgcaacccaaccagctgatcacgcgcatggctcattctttttcttattatagcacccatcgcctctcgagtagctctgtagagtcctgtgactgaatcttgttcatcagccaatttggttgcaaatcgtttaggctagtagttgaccgtgtcgtgtaattaaacctgcgcagaatagtcgattctacggtttt

SEQ ID NO: 11633 - protein, 355 aa, Triticum aestivum
  misc_feature (1)..(355): Ceres Seq. ID no. 13655993
MAAAADAGPELRRSSSIDRIPAEARRILHRLAGELWGADVDPAALVVSQLKGALTNEVFRITWPGGEGDPRKVLVRIYGQGVEVFFDRADEVRTFECMSRHGQGPRLLGRFPQGRVEEFINARTLSAPDLRDPEISGLIARKLREFHELDMPGPKDISLWQRLRRWLEEARSRCSTEEARELRLETLGDEIAELENVLSGVDQRVVFCHNDLQYGNIMIYEETRQVTLIDYEYASFNPVAFDIANHFCEMAADYHSDTPHVMDFTKYPDVDEQRRFLEAYLSSSGENTSDVEVETLLGLIAKYSLTSHLFWGLWGIVSAHVNKNIDFEYKEYARHRFDQYWDTKPRILQACNPTS

SEQ ID NO: 11634 - protein, 258 aa, Triticum aestivum
  misc_feature (1)..(258): Ceres Seq. ID no. 13655994
MSRHGQGPRLLGRFPQGRVEEFINARTLSAPDLRDPEISGLIARKLREFHELDMPGPKDISLWQRLRRWLEEARSRCSTEEARELRLETLGDEIAELENVLSGVDQRVVFCHNDLQYGNIMIYEETRQVTLIDYEYASFNPVAFDIANHFCEMAADYHSDTPHVMDFTKYPDVDEQRRFLEAYLSSSGENTSDVEVETLLGLIAKYSLTSHLFWGLWGIVSAHVNKNIDFEYKEYARHRFDQYWDTKPRILQACNPTS

SEQ ID NO: 11635 - protein, 205 aa, Triticum aestivum
  misc_feature (1)..(205): Ceres Seq. ID no. 13655995
MPGPKDISLWQRLRRWLEEARSRCSTEEARELRLETLGDEIAELENVLSGVDQRVVFCHNDLQYGNIMIYEETRQVTLIDYEYASFNPVAFDIANHFCEMAADYHSDTPHVMDFTKYPDVDEQRRFLEAYLSSSGENTSDVEVETLLGLIAKYSLTSHLFWGLWGIVSAHVNKNIDFEYKEYARHRFDQYWDTKPRILQACNPTS

SEQ ID NO: 11636 - DNA, 1375 bp, Triticum aestivum
  misc_feature (1)..(1375): Ceres Seq. ID no. 13656028
acctagaacatcctaatcgaaaagatattttcctcctctccgtgcggacaactccactccactcgtccactcctactaccagcttctcactcccactcccgcaggcgggtgatccatggccacggcgctccgcctcccgtctctcctctcctcccgcgccgcccctaccaccgccgctcgcgctaccatccgagggaatcggacaggatcgttcactcacagggtcgccgcgcagcctgacgacaccaccgccaccacctccacctccaccacgccggctccgcccgccgggttcacgcctccggttcccaagcggttcgaggtcaagcccggccagtcaaacaacatcgccggcgccgccctcgctttgcccttccgcctcggcaccggcgtcttcgtcctaggatatggagtgacacttgttgatgctaacgagatatcaccagatcaatatgctttggatttccaaggtcggaaggtgaaagaaacgtcgaaggtggggcagtgccctcgacctgctaagcctattgaaatatacgagtttgaaggatgtccattttgtcgaaaggtcagagagatggtatccgtcctggaccttgatgttttatattacccttgtcctaaaggcagcccaaccttccggccaaaggttctagagatgggtggaaagaaacagtttccttacatggtcgatccaaacacaggagttgctatgtatgaatcagatgacatcataaattacctggcaaaaacttacggtgatggaagtgttccaattatgctaaaacttggtctattgacaacaataacggcagggcttgcattgagtgggcgtagcgggaaggggtcttcctacagtcctgcaaagcttccatctcagccaatagagatatgggcatacgagggatctcctttctgtaaaatagcgcgtgagacccttgtcgaattggagttgccacacttgctacacagctgtgcgcgtggcagccccaagcgacaggatttttttgagaaatatggtcttttccaggcgccttatatcgaggatcctaacacgggggtaaagatgttcgaaagcgccgacatcgtagagtatctgagggcaacatatgctgcttgagaatccctgtcactgtcttttctcagtaaataactaaatattgagctcatagctgccatgtctcttctcatgtagtagatcacattctttactaggaaaaatggtgcatactagatatgtaaggtgtaaattatattcgctgcagctgagacagcgtctttgctatctaagagacactgaatctgaggccgtagaaaagggaaaaaaaaaaaaaaaaaagcttatcgataccgtcgacctcgagggggggcccgg

SEQ ID NO: 11637 - protein, 334 aa, Triticum aestivum
  misc_feature (1)..(334): Ceres Seq. ID no. 13656029
MATALRLPSLLSSRAAPTTAARATIRGNRTGSFTHRVAAQPDDTTATTSTSTTPAPPAGFTPPVPKRFEVKPGQSNNIAGAALALPFRLGTGVFVLGYGVTLVDANEISPDQYALDFQGRKVKETSKVGQCPRPAKPIEIYEFEGCPFCRKVREMVSVLDLDVLYYPCPKGSPTFRPKVLEMGGKKQFPYMVDPNTGVAMYESDDIINYLAKTYGDGSVPIMLKLGLLTTITAGLALSGRSGKGSSYSPAKLPSQPIEIWAYEGSPFCKIARETLVELELPHLLHSCARGSPKRQDFFEKYGLFQAPYIEDPNTGVKMFESADIVEYLRATYAA

SEQ ID NO: 11638 - protein, 180 aa, Triticum aestivum
  misc_feature (1)..(180): Ceres Seq. ID no. 13656030
MVSVLDLDVLYYPCPKGSPTFRPKVLEMGGKKQFPYMVDPNTGVAMYESDDIINYLAKTYGDGSVPIMLKLGLLTTITAGLALSGRSGKGSSYSPAKLPSQPIEIWAYEGSPFCKIARETLVELELPHLLHSCARGSPKRQDFFEKYGLFQAPYIEDPNTGVKMFESADIVEYLRATYAA

SEQ ID NO: 11639 - DNA, 1296 bp, Triticum aestivum
  misc_feature (1)..(1296): Ceres Seq. ID no. 13656050
aagatcaacaccaaacctctagatatagctggtatctttacctcgcgccgcccgaagacatggtatccgcgacgacgatgcaccaccggcgccgctccattctccagctggccctcctactactggcggcgtcaccggcggcaatgctggcggccggcggagcctgcgagagagaggagttcccggccggcaggagctacgcgacgtgcgcggatctccctgccctcggcgcctcgctgcactggacgtacgacgcggcggcctcgtcgttgtccctggcattcgcggccaagccgcccggcgcgagcggcgccggctgggtggcttggggggtcaaccccaccggcgatggcatgaagggcgcgcagacgctcctcgccttcaagagcaaaggcgcatacgtcgtcaacacgtacaacctcaccgggtaccgcccgctcagcgcggcgtccacgccgatcgcgttcgaggccaccgagctcgccgccgacgagggcgccgacgggaaggtgcggctctacggcacgctgcagctgcccaagggcatggaggccgtgaaccacatctggcaggtagggtcgacggtggccaatggggtgccggccaagcacgcgttcgcgcaggagaacctcgaggcgaagggcagtcttgtgctcaccggtgccggagcgacggaggccgcgccagctccggtgtttatctctcacgactatctcgattaaccagtagcagtagtgtttgggatacaaaattcaagagagaaagagagagtggggaaggagaaggaagtaggtaaggaagaacagagctggcaacaatctgcaaaaaaaaacacacacacacacacacacaccaatcttggggatgatccgtcgggaaagaaaattaagagtattaagaaaactaagaatactatgagcacttctaattcagatgatttcacaatagttcccccacaaaaaacatcaacatgagtgacaacaatgtgagtgatcatgagcataattttaatttgtctactataaagtatgcaaattcggtgagaaccaatttttgataatatgtgttctgggcgtcaatctccgttcaattgcaatcaaccgcccatattatgcttcaagggttggatgtacaacagtagtgttttttctagagaaaatttggagcgttctccttgtttgggtgatgtaccatgtaaaaaattactttcactgatatatctgcgtacaataaaaatctttatagaggaaaaaacataacaaatgtattttttatgatcaaataatatgttgatac

SEQ ID NO: 11640 - protein, 239 aa, Triticum aestivum
  misc_feature (1)..(239): Ceres Seq. ID no. 13656051
DQHQTSRYSWYLYLAPPEDMVSATTMHHRRRSILQLALLLLAASPAAMLAAGGACEREEFPAGRSYATCADLPALGASLHWTYDAAASSLSLAFAAKPPGASGAGWVAWGVNPTGDGMKGAQTLLAFKSKGAYVVNTYNLTGYRPLSAASTPIAFEATELAADEGADGKVRLYGTLQLPKGMEAVNHIWQVGSTVANGVPAKHAFAQENLEAKGSLVLTGAGATEAAPAPVFISHDYLD

SEQ ID NO: 11641 - protein, 220 aa, Triticum aestivum
  misc_feature (1)..(220): Ceres Seq. ID no. 13656052
MVSATTMHHRRRSILQLALLLLAASPAAMLAAGGACEREEFPAGRSYATCADLPALGASLHWTYDAAASSLSLAFAAKPPGASGAGWVAWGVNPTGDGMKGAQTLLAFKSKGAYVVNTYNLTGYRPLSAASTPIAFEATELAADEGADGKVRLYGTLQLPKGMEAVNHIWQVGSTVANGVPAKHAFAQENLEAKGSLVLTGAGATEAAPAPVFISHDYLD

SEQ ID NO: 11642 - protein, 214 aa, Triticum aestivum
  misc_feature (1)..(214): Ceres Seq. ID no. 13656053
MHHRRRSILQLALLLLAASPAAMLAAGGACEREEFPAGRSYATCADLPALGASLHWTYDAAASSLSLAFAAKPPGASGAGWVAWGVNPTGDGMKGAQTLLAFKSKGAYVVNTYNLTGYRPLSAASTPIAFEATELAADEGADGKVRLYGTLQLPKGMEAVNHIWQVGSTVANGVPAKHAFAQENLEAKGSLVLTGAGATEAAPAPVFISHDYLD

SEQ ID NO: 11643 - DNA, 1096 bp, Triticum aestivum
  misc_feature (1)..(1096): Ceres Seq. ID no. 13656068
gagcccaatccgggcactggaaatttctagcatcgcgacggtttaaggaagcatcgcgacgtctaatcgtggcccccctctaacaccttttgccgagacgagattctcttccgcagccgcccccgtcgacgtcgccgtcgccgtcttttgccaccgcgatgcctcggtattattgcgattactgcgacacttatctgacccatgactcgccatctgtccgtaagcaacacaatgctggatataaacacaaggcaaatgttcgtaactactatcagcaattcgaggagcagcaaactcaaagtttgattgatcaaaggataaaggaacacctgggacaagctgcagcgttccaagttggcgctcctttcaaccaacatcttcttcaatatccaggaaatatgccccgtccccgtcttccgattctgcccacacccatgatgcaacatggttatcctcaacatcaacaacctggtgggccatttgcaaggcctcctattttaccagttcctggggctccaggttatcctggtgctccaaccatgccgcagcacgggggccctcctggttcaatgcctatgcaggtggcacctcccccaaggcctccgacactaccacctccaacatttggggccccaggtgcacccatgtccaacaacgcatcacctccaggtcctccaccgatgtatcaaccaaatcaaccaccaactgcaggctcaacttctggcgctccacccctggccccagcggcccctccacaggctgcattctcctatgcacaatcgaatgaaggcaaccactgatctgttccttggtggttatcaaatgagattcgaagaacagccgtaacttggaagttgatgcttcctgcctgtctgtctcctgaatttcggaggcagtctgtctcttgaaatttggagaattgttaagaaaggcttcctgcagtagtattttttgtattttaggtggtgtaacctttacttcttaatacaccgacttcgtattagtttcttgcccttgaaacttgataatggatataacccatggatggcgtacttgatgtagtacatatttgtcattaaaacaaatttatttgttg

SEQ ID NO: 11644 - protein, 213 aa, Triticum aestivum
  misc_feature (1)..(213): Ceres Seq. ID no. 13656069
MPRYYCDYCDTYLTHDSPSVRKQHNAGYKHKANVRNYYQQFEEQQTQSLIDQRIKEHLGQAAAFQVGAPFNQHLLQYPGNMPRPRLPILPTPMMQHGYPQHQQPGGPFARPPILPVPGAPGYPGAPTMPQHGGPPGSMPMQVAPPPRPPTLPPPTFGAPGAPMSNNASPPGPPPMYQPNQPPTAGSTSGAPPLAPAAPPQAAFSYAQSNEGNH

SEQ ID NO: 11645 - protein, 133 aa, Triticum aestivum
  misc_feature (1)..(133): Ceres Seq. ID no. 13656070
MPRPRLPILPTPMMQHGYPQHQQPGGPFARPPILPVPGAPGYPGAPTMPQHGGPPGSMPMQVAPPPRPPTLPPPTFGAPGAPMSNNASPPGPPPMYQPNQPPTAGSTSGAPPLAPAAPPQAAFSYAQSNEGNH

SEQ ID NO: 11646 - protein, 133 aa, Triticum aestivum
  misc_feature (1)..(133): Ceres Seq. ID no. 13656071
MVILNINNLVGHLQGLLFYQFLGLQVILVLQPCRSTGALLVQCLCRWHLPQGLRHYHLQHLGPQVHPCPTTHHLQVLHRCINQINHQLQAQLLALHPWPQRPLHRLHSPMHNRMKATTDLFLGGYQMRFEEQP

SEQ ID NO: 11647 - DNA, 550 bp, Triticum aestivum
  misc_feature (1)..(550): Ceres Seq. ID no. 13656096
aaaccacacccaaacacgtagtgcacctcctccactaaaagatcatcagccttcagcagagctacactagctccaagccaccgagagaaaaatggccggcttctcgtgcacgagcacgagccatgctgcagttgcactggtttcggcgctgctgctgagcctcgcgcacggcttgctgggggctcatggagccaggaggctcatggagctgtacaagccggaccccagcgagctcctcacttaccacaacggcgccgtgctgcagggcgccatcccggtcaccgtgctctggtacggccgcttcacgccggtccagaaggccgtcgtctccgacttcctcctctcgctcaccgccgcctccccggcgccgaccccgtccgtctcgcagtggtggggcaccatcgcccagctctacctctccaaggccaagggcgccaacgccaagcgcgcgacgcaggtagcgctcgccgggcaggtctccgaagagcgctgctcgctcgggaagagcctcgcgctgcccccaagctcgcggcgctggccgccagggcca

SEQ ID NO: 11648 - protein, 153 aa, Triticum aestivum
  misc_feature (1)..(153): Ceres Seq. ID no. 13656097
MAGFSCTSTSHAAVALVSALLLSLAHGLLGAHGARRLMELYKPDPSELLTYHNGAVLQGAIPVTVLWYGRFTPVQKAVVSDFLLSLTAASPAPTPSVSQWWGTIAQLYLSKAKGANAKRATQVALAGQVSEERCSLGKSLALPPSSRRWPPGP

SEQ ID NO: 11649 - protein, 116 aa, Triticum aestivum
  misc_feature (1)..(116): Ceres Seq. ID no. 13656098
MELYKPDPSELLTYHNGAVLQGAIPVTVLWYGRFTPVQKAVVSDFLLSLTAASPAPTPSVSQWWGTIAQLYLSKAKGANAKRATQVALAGQVSEERCSLGKSLALPPSSRRWPPGP

SEQ ID NO: 11650 - protein, 91 aa, Triticum aestivum
  misc_feature (1)..(91): Ceres Seq. ID no. 13656099
MEPGGSWSCTSRTPASSSLTTTAPCCRAPSRSPCSGTAASRRSRRPSSPTSSSRSPPPPRRRPRPSRSGGAPSPSSTSPRPRAPTPSARRR

SEQ ID NO: 11651 - DNA, 1343 bp, Triticum aestivum
  misc_feature (1)..(1343): Ceres Seq. ID no. 13656123
ccccgtcacttgctctatcccgagttagtgacacaagaatatttccctgtgcagtcttgtgctagctgccgtgtctaccaggaatggccgacggcgtccttccggcagcgctgacagtggcgttcctgctgctccttggaacaatcggcgccgcgcacggtcagctccagatggggttctactccgactcctgccccggcgccgaggacatggtcaccgccgccgtccaggaggccgccgcctcggacgccaccatcctccccgccctcgtccgcctccagttccacgactgcttcgtcagaggatgcgacgcgtcggtgctgatcacgagcgcgggcaacgccgcggaggtgaacaacaacaagcaccagggcctccgaggcctggatgtggttgaccgcgccaaggcggagctcgaggagcagtgccccggcgttccaacwktrkygtstctmctgcgccgacatcatcgctctcgccgcacgcgacgccatagccatgacgaacgggccgtcgttcgaggtgccgacggggcggcgcgacgggctgtcgtcgaacgtacgcgacgccgacgtgctgccggacgtgagtgactccatccaggtgctccgctccaagttcgccgccagcagcctcaacgaccgcgacctcgttctcctcacagcggcgcacacgatcggcaccacggcgtgcttcttcgtcaaggatcggctctacagctacccactgccgggcagccgcacggggtcggacccgtcgatcccggcggcgttcctgtcggagctcaaggcccggtgcgcgcccggcgacttcaacacgcgcgtgccgctggaccggggcagccagggaacattcgacgactccatcctccgcaacatccgtgcgggcctcgtccccatcgcctccgacgcggcgctcgaggccagcaacgccaccggcgcgctcgtcggcgcctacctcggcgcggcgtcctccagcttcgcgcaggactttgtgggcgccatgatcaagatgggcaccatcggcgccatcaccggcgacgccggcgagatcagggacgtatgctcggcgttcaacacgaactgatcgacgcgtcattgctataaaatcatacgaatggtcgcattcaaattagcactgtaaatctcttgcggaaacatgaattcattcctckttgsmwctkkaggggnnnaaaaaaaaaaaaaaaaaaaaaaaaaaaaaaaaaaaaaaaaaaaaaaaaaaaaaaaaaaaaaaaaaaaaaaaaaaaaaaaaaaaaaaagggraaaaaaaaaaaaaaagggcttaagggaacggggsaatccscccccccccaggggggcccc

SEQ ID NO: 11652 - protein, 232 aa, Triticum aestivum
  misc_feature (1)..(232): Ceres Seq. ID no. 15219796
  misc_feature (19)..(19): Xaa is any aa, unknown or other
  misc_feature (20)..(20): Xaa is any aa, unknown or other
  misc_feature (21)..(21): Xaa is any aa, unknown or other
  misc_feature (22)..(22): Xaa is any aa, unknown or other
  misc_feature (23)..(23): Xaa is any aa, unknown or other
MWLTAPRRSSRSSAPAFQXXXXXCADIIALAARDAIAMTNGPSFEVPTGRRDGLSSNVRDADVLPDVSDSIQVLRSKFAASSLNDRDLVLLTAAHTIGTTACFFVKDRLYSYPLPGSRTGSDPSIPAAFLSELKARCAPGDFNTRVPLDRGSQGTFDDSILRNIRAGLVPIASDAALEASNATGALVGAYLGAASSSFAQDFVGAMIKMGTIGAITGDAGEIRDVCSAFNTN

SEQ ID NO: 11653 - protein, 195 aa, Triticum aestivum
  misc_feature (1)..(195): Ceres Seq. ID no. 15219797
MTNGPSFEVPTGRRDGLSSNVRDADVLPDVSDSIQVLRSKFAASSLNDRDLVLLTAAHTIGTTACFFVKDRLYSYPLPGSRTGSDPSIPAAFLSELKARCAPGDFNTRVPLDRGSQGTFDDSILRNIRAGLVPIASDAALEASNATGALVGAYLGAASSSFAQDFVGAMIKMGTIGAITGDAGEIRDVCSAFNTN

SEQ ID NO: 11654 - protein, 169 aa, Triticum aestivum
  misc_feature (1)..(169): Ceres Seq. ID no. 15219798
  misc_feature (120)..(120): Xaa is any aa, unknown or other
  misc_feature (121)..(121): Xaa is any aa, unknown or other
  misc_feature (122)..(122): Xaa is any aa, unknown or other
  misc_feature (123)..(123): Xaa is any aa, unknown or other
  misc_feature (124)..(124): Xaa is any aa, unknown or other
MADGVLPAALTVAFLLLLGTIGAAHGQLQMGFYSDSCPGAEDMVTAAVQEAAASDATILPALVRLQFHDCFVRGCDASVLITSAGNAAEVNNNKHQGLRGLDVVDRAKAELEEQCPGVPXXXXXLRRHHRSRRTRRHSHDERAVVRGADGAARRAVVERTRRRRAAGRE

SEQ ID NO: 11655 - DNA, 2135 bp, Triticum aestivum
  misc_feature (1)..(2135): Ceres Seq. ID no. 13656138
aaaccctaaagccccctcgtcccgtcctcctcctccgcatctcaaccctaaccaaacccactcaaccctcgcgccgccgcctccggatccatccgcatcgccgccgccgccgccgccgccgcgagcatgggcttcgacgtgggcgtcgtccccttcaacccggacggctggggccctcccgacttgccgggcgcggcgccgctgctgggcggggccgtcgcgacggcctcgatccccttcgcgcccttctcccgctccgacaagctgggccgcatcgccgactggacgcgcaacccgggccacccgggcgcgcacggccaccacggcgcggccgccgcctcccgcgactcggtcttcgacttctcctcggccgacgactcgctcgccgccgccgccgaggactcgtccttcagcctcgtcgacgccaagccgccgcccaagcacccgcgcttcgggcccaagtggcgcttcaaccagcggccccagctcccccagcgccgcgacgaggaggtcgaggccaagcgccgcgaggccgagaaggagcgcgcccgccgcgagcgccactaccagaaccaccgctcccaccaccaccagggcttccgcggcaaccagcagaacaccgccaagccctcggtcgacatccagcccgactggaccatcctcgagcagatccccttcgccaacttcaccaagctctccttcgccgtcgccgaccagcccgaggacctgctcgtctgcggcgccgtcgactcgtacgaccgcgcctacgaccgcgtcaaccccaagacggcccgccgcctcgagcgcttcaagaaccgccagttcttcaagatcaccaccaccgacgaccccatcatccgccgcctcgccgaggaggacaaggccaccgtcttcgccaccgacgccatcctcgccgccctcatgtgcacgccccgcagcatcctctcctgggacattgtcgtgcagcgcgtcggcaacaagctcttcttcgacaagcgcgagggctcccagctcgatctgctcactgtcaacgagactgcgcaggagcagctccctgagaacaaggatgacatcaattccgcgccggcccttgctgtcgaggccacctacatcaaccagaacttctcgcagcaggtgctggtgcgtgatggcgagaaggttacctttgatgagcctaacccgtttgcctctgagaatgaggaggcggcgcctgtttgctaccgttatcgccgctggaagctggatgatgatattagcatcattgcccgctgtgaagtgcatgctgctggtgttgatcccagtggtgctcgccagttcctcacgcttaatgcactcaatgagtttgatcctaagattactggtgttgactggaagcagaagctcgagtcccagcgtggtgctgtgcttgctacagagctcaagaacaatgccaacaagctcgctcgctggactgcccaggctttactttctggtgctgacatgatgaagttgggttatgtgtcacgtgtgcacccccgcgaccacttcaaccactccatactcactgtgatgggctacaagccaagggattttgctacccagatcaacctcaacactgcaaacatgtggggcattgtcaagtcgattgtggacatctgcatgaagtttgaagagggaaagtatgtgcttgtgaaagatcctgccaagccacagatgaggatttatcaggttcctaatgatgcatttgagaatgattatgttgaagagccacttccagaggaggagcagattcgtccggctacagatgatgtcgatgctactgcacaggagatggatgctgctgccgaggcagaggctaataaagcaactactcagggtggtgagggtgagaagagtgcagatgctgctgctgcttgaagggtataatgggccatctttgctttatctagataatgtgtcttttctgttttatgacctgtttttgtggattaaagagttgaactgccttgtcttgatacagtggtcttgttttggtccatgagaaaacttggtactcttaaatttcatgcttagatgtgctaagcttagcacctaccgttttggattaatgactattctggtagttgaatattgattatatgtgattgatctgctgt

SEQ ID NO: 11656 - protein, 589 aa, Triticum aestivum
  misc_feature (1)..(589): Ceres Seq. ID no. 15219799
MGFDVGVVPFNPDGWGPPDLPGAAPLLGGAVATASIPFAPFSRSDKLGRIADWTRNPGHPGAHGHHGAAAASRDSVFDFSSADDSLAAAAEDSSFSLVDAKPPPKHPRFGPKWRFNQRPQLPQRRDEEVEAKRREAEKERARRERHYQNHRSHHHQGFRGNQQNTAKPSVDIQPDWTILEQIPFANFTKLSFAVADQPEDLLVCGAVDSYDRAYDRVNPKTARRLERFKNRQFFKITTTDDPIIRRLAEEDKATVFATDAILAALMCTPRSILSWDIVVQRVGNKLFFDKREGSQLDLLTVNETAQEQLPENKDDINSAPALAVEATYINQNFSQQVLVRDGEKVTFDEPNPFASENEEAAPVCYRYRRWKLDDDISIIARCEVHAAGVDPSGARQFLTLNALNEFDPKITGVDWKQKLESQRGAVLATELKNNANKLARWTAQALLSGADMMKLGYVSRVHPRDHFNHSILTVMGYKPRDFATQINLNTANMWGIVKSIVDICMKFEEGKYVLVKDPAKPQMRIYQVPNDAFENDYVEEPLPEEEQIRPATDDVDATAQEMDAAAEAEANKATTQGGEGEKSADAAAA

SEQ ID NO: 11657 - protein, 493 aa, Triticum aestivum
  misc_feature (1)..(493): Ceres Seq. ID no. 15219800
NPKAPSSRPPPPHLNPNQTHSTLAPPPPDPSASPPPPPPPRAWASTWASSPSTRTAGALPTCRARRRCWAGPSRRPRSPSRPSPAPTSWAASPTGRATRATRARTATTARPPPPATRSSTSPRPTTRSPPPPRTRPSASSTPSRRPSTRASGPSGASTSGPSSPSAATRRSRPSAARPRRSAPAASATTRTTAPTTTRASAATSRTPPSPRSTSSPTGPSSSRSPSPTSPSSPSPSPTSPRTCSSAAPSTRTTAPTTASTPRRPAASSASRTASSSRSPPPTTPSSAASPRRTRPPSSPPTPSSPPSCARPAASSPGTLSCSASATSSSSTSARAPSSICSLSTRLRRSSSLRTRMTSIPRRPLLSRPPTSTRTSRSRCWCVMARRLPLMSLTRLPLRMRRRRLFATVIAAGSWMMILASLPAVKCMLLVLIPVVLASSSRLMHSMSLILRLLVLTGSRSSSPSVVLCLLQSSRTMPTSSLAGLPRLYFLVLT

SEQ ID NO: 11658 - protein, 351 aa, Triticum aestivum
  misc_feature (1)..(351): Ceres Seq. ID no. 15219801
TLKPPRPVLLLRISTLTKPTQPSRRRLRIHPHRRRRRRRREHGLRRGRRPLQPGRLGPSRLAGRGAAAGRGRRDGLDPLRALLPLRQAGPHRRLDAQPGPPGRARPPRRGRRLPRLGLRLLLGRRLARRRRRGLVLQPRRRQAAAQAPALRAQVALQPAAPAPPAPRRGGRGQAPRGREGARPPRAPLPEPPLPPPPGLPRQPAEHRQALGRHPARLDHPRADPLRQLHQALLRRRRPARGPARLRRRRLVRPRLRPRQPQDGPPPRALQEPPVLQDHHHRRPHHPPPRRGGQGHRLRHRRHPRRPHVHAPQHPLLGHCRAARRQQALLRQARGLPARSAHCQRDCAGAAP

SEQ ID NO: 11659 - DNA, 1278 bp, Triticum aestivum
  misc_feature (1)..(1278): Ceres Seq. ID no. 13656155
atacatcacctcggccggcgctgctaccgatctcctccagagtccaagcctcctcacccaaagccatggccgcgcggcgtcgctccctcctcatgctcctgcccctcctcctctcccacttcctctccctcgccgccgccttccagtcggacgagctgctcctccacgacgacgacgagttcgagggcacccgggtctcctccaccccctccccccggccgccctcgacgccgccggtagtgtcctcccgccgccgatccgcggacgcgacgcaggcggctggcgcctccgagtccgacaccgtccagttcaccctcgagcacgacctcggagccggcctagggttcgcccccgccgggtccttctccgcccgcctcaagtcctcggcccacggctcccagactctcactaagctccggtttacgaggaatgagttgactgaggatgaaaagaatgcatttaagaaattacttgaagaagatagtttttacacaataaggctaccgtctaatgtgttggatcctacaagaaacgattatatttattcctcgatcaaagcgagatgcattccacgtgacagcttggatgaacatattgtcatccacatggacggtgtaaatattttggctgttaattatggttccgtcggtggatgccaatatccccggccaatgaaagtaccgtcaaaatggacattcaattcatacactattctgaagactgctgaccaagcaccaagaactccatcatttgtagagcaattaatagaaactgagagtggactcggtgaagtgatgaaaccacctgagaaatctttctgggctaaatattggatgtacatcattcctcttggtctcattgtcatgaacgctgtcacagcagcagcaaacataccggaggagcaagctggagggcagggtcaagctccagcacaaatggcgccaattgctgctccaaggagaagatgatggcttcctatattctttgcatgccatagattcacaaacaatggacagaggatggatctgcttgaccttccccagaacaggggcagtactagcggcaacaagactcacttgggtttttcttttctcgcattcagaaactcacctttgttgtagaatcacctcagaaaaggttgcgtgttctggtcgcatctacacgcgtatttttgcctgttgatagaaattaccatcagtctttaactcggtgcaaactgcatgccttaatattcagaactagcttaattacaaatatcaaacattgtatgttttgctc

SEQ ID NO: 11660 - protein, 321 aa, Triticum aestivum
  misc_feature (1)..(321): Ceres Seq. ID no. 15219802
TSPRPALLPISSRVQASSPKAMAARRRSLLMLLPLLLSHFLSLAAAFQSDELLLHDDDEFEGTRVSSTPSPRPPSTPPVVSSRRRSADATQAAGASESDTVQFTLEHDLGAGLGFAPAGSFSARLKSSAHGSQTLTKLRFTRNELTEDEKNAFKKLLEEDSFYTIRLPSNVLDPTRNDYIYSSIKARCIPRDSLDEHIVIHMDGVNILAVNYGSVGGCQYPRPMKVPSKWTFNSYTILKTADQAPRTPSFVEQLIETESGLGEVMKPPEKSFWAKYWMYIIPLGLIVMNAVTAAANIPEEQAGGQGQAPAQMAPIAAPRRR

SEQ ID NO: 11661 - protein, 300 aa, Triticum aestivum
  misc_feature (1)..(300): Ceres Seq. ID no. 15219803
MAARRRSLLMLLPLLLSHFLSLAAAFQSDELLLHDDDEFEGTRVSSTPSPRPPSTPPVVSSRRRSADATQAAGASESDTVQFTLEHDLGAGLGFAPAGSFSARLKSSAHGSQTLTKLRFTRNELTEDEKNAFKKLLEEDSFYTIRLPSNVLDPTRNDYIYSSIKARCIPRDSLDEHIVIHMDGVNILAVNYGSVGGCQYPRPMKVPSKWTFNSYTILKTADQAPRTPSFVEQLIETESGLGEVMKPPEKSFWAKYWMYIIPLGLIVMNAVTAAANIPEEQAGGQGQAPAQMAPIAAPRRR

SEQ ID NO: 11662 - protein, 291 aa, Triticum aestivum
  misc_feature (1)..(291): Ceres Seq. ID no. 15219804
MLLPLLLSHFLSLAAAFQSDELLLHDDDEFEGTRVSSTPSPRPPSTPPVVSSRRRSADATQAAGASESDTVQFTLEHDLGAGLGFAPAGSFSARLKSSAHGSQTLTKLRFTRNELTEDEKNAFKKLLEEDSFYTIRLPSNVLDPTRNDYIYSSIKARCIPRDSLDEHIVIHMDGVNILAVNYGSVGGCQYPRPMKVPSKWTFNSYTILKTADQAPRTPSFVEQLIETESGLGEVMKPPEKSFWAKYWMYIIPLGLIVMNAVTAAANIPEEQAGGQGQAPAQMAPIAAPRRR

SEQ ID NO: 11663 - DNA, 1217 bp, Triticum aestivum
  misc_feature (1)..(1217): Ceres Seq. ID no. 13656156
agaaactaatccgagccacacatccccgtttcacaaccaagccaaagctccccactcctccccattccacgccgccgcaccccgaaccctagcgccccatccatccagcgagcggtagccatgccggcggacgcgaagatccggtggggggagctcgaggaggacgacgggggcgacctcgacttccttctcccgccgcgggtggtcatcgggcccgacgagaacggcttcaagaagacgatcgagtaccgcttcgacgacgacggcaacaaggtcaaggtcaccaccaccacccgcgtccgcaagctcgcccgcgcgcgcctctccaaggccgctgtcgagcgccgcaactgggccaagttcggcgacgccgccagcggcgacgacgcctccgcgcgcctcaccgtcgtctccaccgaggagatcctcctcgagcgcccgcgcgccccagggagcaaagctgatgaaccaagtgcttctggtgacccactggcaatggcaagcaagggaggtgctgttctcatggtttgcagaacctgtggtaagaagggtgaccactggacctcaaagtgcccctacaaggacctcgctccaccaactgatgcatcggacatgcctcctacttctgacggccctgcagcactgagtggccctgccaagggctcatacgttgctccaaggctgagggctggtgctgttcataccgatgctgggcacgacatgaggcgcaggaacgatgagaactctgtccgtgttaccaatctgtcggaggacacccgcgagcccgacctccttgagctgttccgcacgtttggcccggtcagccgtgtctacgttgcggtggatcagaagactggaatgagcaggggctttgggttcgtcaacttcgttcacagggaggacgccgagaaggccatcagcaagctcaatgggtatggttatgataacctcatcctccatgtggagatggctgcacctaggcctacttagttactgcctattaagcatccagatttcctacaagtgtcgtatcattatggtctccgaaataccagtacttttgtgtcgtgggcttgtgtcgtgttttgccttgttgagaataactacactctgttgatgaaaaagtgaatttttttaaaaaaaaaaaaaaaaaaaaaaaaaaaaaaaaaaaaaaaaaaaaaaagaaaaaaaaaaaaaaaaaagcttatcgataccgt

SEQ ID NO: 11664 - protein, 289 aa, Triticum aestivum
  misc_feature (1)..(289): Ceres Seq. ID no. 13656157
MPADAKIRWGELEEDDGGDLDFLLPPRVVIGPDENGFKKTIEYRFDDDGNKVKVTTTTRVRKLARARLSKAAVERRNWAKFGDAASGDDASARLTVVSTEEILLERPRAPGSKADEPSASGDPLAMASKGGAVLMVCRTCGKKGDHWTSKCPYKDLAPPTDASDMPPTSDGPAALSGPAKGSYVAPRLRAGAVHTDAGHDMRRRNDENSVRVTNLSEDTREPDLLELFRTFGPVSRVYVAVDQKTGMSRGFGFVNFVHREDAEKAISKLNGYGYDNLILHVEMAAPRPT

SEQ ID NO: 11665 - protein, 164 aa, Triticum aestivum
  misc_feature (1)..(164): Ceres Seq. ID no. 13656158
MASKGGAVLMVCRTCGKKGDHWTSKCPYKDLAPPTDASDMPPTSDGPAALSGPAKGSYVAPRLRAGAVHTDAGHDMRRRNDENSVRVTNLSEDTREPDLLELFRTFGPVSRVYVAVDQKTGMSRGFGFVNFVHREDAEKAISKLNGYGYDNLILHVEMAAPRPT

SEQ ID NO: 11666 - protein, 155 aa, Triticum aestivum
  misc_feature (1)..(155): Ceres Seq. ID no. 13656159
MVCRTCGKKGDHWTSKCPYKDLAPPTDASDMPPTSDGPAALSGPAKGSYVAPRLRAGAVHTDAGHDMRRRNDENSVRVTNLSEDTREPDLLELFRTFGPVSRVYVAVDQKTGMSRGFGFVNFVHREDAEKAISKLNGYGYDNLILHVEMAAPRPT

SEQ ID NO: 11667 - DNA, 1368 bp, Triticum aestivum
  misc_feature (1)..(1368): Ceres Seq. ID no. 13656160
ctagaacatcctaatcgaaaaaattgctctggttaatggatctgaatttgcaattatctctcttatagactcagagaatgacttcaggattccagaatcattgccatgccttcatgataaggtacttgcagcagcagctgaagcagctatgagcatctcgatagaccagaaaggaaagcagaatccagcagcaggagttattggtggcattattaaaggattaaaaggaaaagcggatgaaaatgcaaacctgagaaaaagtttcaattcccaaacccccagtgaactattggagtcaattttcttgaaaggaccatatgttgaaccatcactagcttatcctgatgatccaatagaagaactgtcaattgatgacatagaaattgatgatgaagtgcccctatcccctccgccagcatcatcctctgcttgtcacatgaataagaaagcaacagtagaggacgagagagcgaaactgtttgaagggtcaagtgatgctgacaaaccaagaatgagaagtacccaagaaattctcaccaaatataagtttggcggggatgcaacagcagcagctgcccatgcgaaggataagctcatgcagcggcaggagaaactcgagagaataagccagcggaccgcagagcttcaagacggggcggaaaatttcgcctcgctcgcccaggagctcgcgaaaacaatggagaacaagaagtggtggaaactgtaacctattcggggttttcacatcactgcatcctatcctacacaaagtacgtccagctctcggtacttgggaatgccttatttgccggttgttatttatcgtggcatggttccgcccattccgccccgcctttgtgctgtgtatatttatgttcatggacaactgcagcttgtcaaggtgattgtctaccttgccactaggttgactcactcactgacagacagacagacagcatggcttgtttggatgcattagcttaggtttatgttgtatatcaccatgtaatcatatgcaccatgggtggaaagcgtggggcggaacctacttgccgtacatgatttcttttgggtggtcattcagtcgttcgttctgtctgtaaaggtaaaaggagacaataaaccgaacggcttacattgagaaacttcaaagagcctgtgtggcattgttagttggtggtatctgatgtgacaccttctcactaatacttgaactgtggttatcaagttgcaatgtgtatgtttttgttttttgttttttgtttaaaaaaaaaaaaaaaaaaaaaaaaaaaaaaaaaaaaaaaaaataaaaaaaaaaaaaaaaaagygtttawacacratammgtyggamctsgagggggggcccgg

SEQ ID NO: 11668 - protein, 192 aa, Triticum aestivum
  misc_feature (1)..(192): Ceres Seq. ID no. 15219805
MSISIDQKGKQNPAAGVIGGIIKGLKGKADENANLRKSFNSQTPSELLESIFLKGPYVEPSLAYPDDPIEELSIDDIEIDDEVPLSPPPASSSACHMNKKATVEDERAKLFEGSSDADKPRMRSTQEILTKYKFGGDATAAAAHAKDKLMQRQEKLERISQRTAELQDGAENFASLAQELAKTMENKKWWKL

SEQ ID NO: 11669 - protein, 96 aa, Triticum aestivum
  misc_feature (1)..(96): Ceres Seq. ID no. 15219806
MNKKATVEDERAKLFEGSSDADKPRMRSTQEILTKYKFGGDATAAAAHAKDKLMQRQEKLERISQRTAELQDGAENFASLAQELAKTMENKKWWKL

SEQ ID NO: 11670 - DNA, 1654 bp, Triticum aestivum
  misc_feature (1)..(1654): Ceres Seq. ID no. 13656161
accgatctcgcctcgccaagcccaccaaccggctcacgccgcatcgcatcgcgatccagcgttcctctcgagccttccatccagagccctcccaaacccctccgccgaccccccgagcccccgcccgccgccgccgccgccgcgccggagatggtgtacatcggcgcgcacggcgtggagacgctgaagcgctacaggtacagcggccaggaccactcggtggtggccaagtacgtgctgcagcccttctggagccgctgcgtcaccctcttcccgctctggatgccaccaaacatgatcacactcatgggatttatgtttctacttacatcttcgctgcttagctatatttattcaccccaccttgacacagctccccctcggtgggtccatcttgcccatggaatacttctcttcttgtaccagacttttgatgccgttgatggtaaacaagcaaggcgcaccagctcatcaagtcctctaggagaactttttgatcatggatgtgatgcccttgcctgcgcttttgaagccttggcccttggaagcaccttgatgtgtggaaggttgacattctgttactgggtggttgctgctgtcccattttatctggcaacatgggaacactactttacaaatactcttattcttcctgtaataaatggaccaacggaaggcctgatgctgatctatgtctcccacctttttacctgttttactggtgctgaatggtgggcgcaagattttcggaaatccctccctcttattagtttggttccacttccatttgttccagaaatccccttatatgttatcgtgctgattctgatgatcacgtttgctgtaatcccaacagttggatccaatattggtaatgtccaaaaagttgttgatgcacggaaagggagcatggaattagcattggcaatgctccttccatttattgcgctgttggctggagttgctgtctggtgttatctctctccttcagatatcatgaggaaccagccacatctgcttgtgatcggaactggttctgcctttggatatttggttggaaggatgatacttgctcatttatgtgacgagcccaaaggtctaaaaacaggaatgtgcatggctctggtgtttcttccatttgctattgcaaatgctctcaccgccaagattaacaatgggacccctttggctgatgagcttttggttattcttctgtactgtgcaacctcagtgggtctttacatgcatcttgccatttcggtttgtcatgaaatcaaggatgctcttggaatctattgcttcaggatagccagaaaagaggcttgaatttgcctgaatccctacgtagcatttgaagcattctgccttccagacattgtccgtctgcattcacaagtcttaacattacaacaacgtatagccatggatgctcaacgaatcctgtcattggaactccatggccaccggttattcatcatgctaaatgcagatatgcagatagatatatcttgtgtggactgtaatgcagatttgtgttaagtagcatatgtacatgtggtgcggtcggtgtaatgtacgtcatgggtagggaagcggtagctttcttaacttaaactagatggtgggatgaccgatgtttctaagattgtgttcc

SEQ ID NO: 11671 - protein, 441 aa, Triticum aestivum
  misc_feature (1)..(441): Ceres Seq. ID no. 15219807
TDLASPSPPTGSRRIASRSSVPLEPSIQSPPKPLRRPPEPPPAAAAAAPEMVYIGAHGVETLKRYRYSGQDHSVVAKYVLQPFWSRCVTLFPLWMPPNMITLMGFMFLLTSSLLSYIYSPHLDTAPPRWVHLAHGILLFLYQTFDAVDGKQARRTSSSSPLGELFDHGCDALACAFEALALGSTLMCGRLTFCYWVVAAVPFYLATWEHYFTNTLILPVINGPTEGLMLIYVSHLFTCFTGAEWWAQDFRKSLPLISLVPLPFVPEIPLYVIVLILMITFAVIPTVGSNIGNVQKVVDARKGSMELALAMLLPFIALLAGVAVWCYLSPSDIMRNQPHLLVIGTGSAFGYLVGRMILAHLCDEPKGLKTGMCMALVFLPFAIANALTAKINNGTPLADELLVILLYCATSVGLYMHLAISVCHEIKDALGIYCFRIARKEA

SEQ ID NO: 11672 - protein, 391 aa, Triticum aestivum
  misc_feature (1)..(391): Ceres Seq. ID no. 15219808
MVYIGAHGVETLKRYRYSGQDHSVVAKYVLQPFWSRCVTLFPLWMPPNMITLMGFMFLLTSSLLSYIYSPHLDTAPPRWVHLAHGILLFLYQTFDAVDGKQARRTSSSSPLGELFDHGCDALACAFEALALGSTLMCGRLTFCYWVVAAVPFYLATWEHYFTNTLILPVINGPTEGLMLIYVSHLFTCFTGAEWWAQDFRKSLPLISLVPLPFVPEIPLYVIVLILMITFAVIPTVGSNIGNVQKVVDARKGSMELALAMLLPFIALLAGVAVWCYLSPSDIMRNQPHLLVIGTGSAFGYLVGRMILAHLCDEPKGLKTGMCMALVFLPFAIANALTAKINNGTPLADELLVILLYCATSVGLYMHLAISVCHEIKDALGIYCFRIARKEA

SEQ ID NO: 11673 - protein, 347 aa, Triticum aestivum
  misc_feature (1)..(347): Ceres Seq. ID no. 15219809
MPPNMITLMGFMFLLTSSLLSYIYSPHLDTAPPRWVHLAHGILLFLYQTFDAVDGKQARRTSSSSPLGELFDHGCDALACAFEALALGSTLMCGRLTFCYWVVAAVPFYLATWEHYFTNTLILPVINGPTEGLMLIYVSHLFTCFTGAEWWAQDFRKSLPLISLVPLPFVPEIPLYVIVLILMITFAVIPTVGSNIGNVQKVVDARKGSMELALAMLLPFIALLAGVAVWCYLSPSDIMRNQPHLLVIGTGSAFGYLVGRMILAHLCDEPKGLKTGMCMALVFLPFAIANALTAKINNGTPLADELLVILLYCATSVGLYMHLAISVCHEIKDALGIYCFRIARKEA

SEQ ID NO: 11674 - DNA, 2490 bp, Triticum aestivum
  misc_feature (1)..(2490): Ceres Seq. ID no. 13656177
aacwttacctwgwrywtcctaatcgaaagccggagctctcctcgctctgcacaaccatttttggttcgatcccggagaagctccggggctccttgaagcgatggatcagcgggcgaggcaccctcccggcatcggcaacggccgcggcgggaatcctaactaccacggccgtggcccgccgccgacgcagcagcatcaccagcagccgtcgccgccttcgccgcagcaggcgcaggggcacccgcagcagtacatgcagcggcagtcgcagcactcgcagcactcgcagcaccacagccagcagcttcagcatcagcagtggcttcggcggaatcagaccgctggcgaggccgcctcgggcgccgccagagccagcgagcaccacgcgccggctgccgccgatgacgccgatttgagttcgcaagactggaaggcccaattgaagcttccacctccagatacacgctaccagaccgaggatgtcactgcaactaagggaaacgaatttgaagactattttctgaagcgtgaacttcttatgggcatatatgagaaaggatttgaaagaccgtctcctatccaagaagaaagcattcctattgcattaaccggcagcgacattcttgcaagagcaaaaaatggaaccggcaagactgctgcattttgtatacctgcgctagagaagattgatcaagacaaaaatgctattcaagttgttatattggtccccacgagggaattggctttacaaacatcacaagtctgcaaggaacttgggaaacacttgaagattcaagtcatggtcactactggaggaacaagcctaaaggatgatattgtccgtctttatcaacctgtgcatttacttgtggggacgcctggtcgtgttttggaccttacgaagaaaggcatttgcattctgaatgactgttcaatgcttattatggatgaggcagacaagcttctttctcctgagttccaaccttccgtggagcagttaattcgataccttccatcgagtcgacagattctgatgttctctgcaacattccctgtgactgtcaaggctttcaaggacaaatatctgcctaaaccctatgttattaatcttatggacgaacttacactgaagggaattacccagttctacgcctttgttgaagaaaggcagaaagtccattgtctgaacactcttttttccaagctgcaaattaatcaatctataatattctgtaactccgtaaatcgtgttgaactactggcgaagaagatcacagagcttggttactcttgcttctacatccatgctaaaatgctgcaggatcatcgtaatagagtattccatgatttccgtaatggcgcatgcaggaaccttgtgtgtacagatctttttacaaggggaatagatatccaagctgttaatgttgttatcaattttgatttccccaagaccgctgaaacctatctccacagggttggtagatctgggagatttggccaccttggcctggctgtgaatctgatcacctacgaggatcgttttaacttgtatcggattgagcaggagcttggaactgagataaaacccatacctcctcagatagaccggacgatatactgccaatagttatctggaagattaatcttatatgccccaccctggaagttataagacaacttatgtaaatagcagctcatcaggtttcatttacgtgatctttatggtgtatcttaagttgttttggggtgctatgggacaggtgaaagtgtagctagctcgtctaatttccatcggaccacgtgggcggatgtatcatggctaagctaaaacttgccatcactgacaatagttaatgttgctaaccaggtgcctgttccgagactgttttccctaaaactgaaagatctctttttcttttgacaaatgtattggctggctagctttttgtacagggcatttttacactggtaaaaaaaaaaaaaaaaaaaaaaaaaaaaaaaaaaaaaaaaaaaaaaaaaaaaaaaaaaaaaaaaaaaaaaaaaattaaaaaaaaaaaaaaaaaggtttawtcrawmccgccaaccycraggggggccccgraaccaaattccccaaaaaggaagtcaaataacccgcgttaattggccgttttttaaaaacgtcggaatggaaaaaaccttgggttaaccaaattaaatccctttgaaaaaaatccccttttcccaatttgggaaaaaaaaaaaaaggcccaaacaaatcccctttccaaaaatttgcaaaccctaaatggaaaaggaaaattgaaagcttaaaaattttttaaaaattcccgtaaaatttttgtaaaaaaacttaattttttaaacaaaaaggcaaaaatcggaaaaatccttaaaaaataaaaaaaaaaaaccaaaatgggtttaagggtttttcaattttaaaaaaaaatcccataataaaaaaacgggaactcaaacgtaaaaggg

SEQ ID NO: 11675 - protein, 508 aa, Triticum aestivum
  misc_feature (1)..(508): Ceres Seq. ID no. 15219810
MDQRARHPPGIGNGRGGNPNYHGRGPPPTQQHHQQPSPPSPQQAQGHPQQYMQRQSQHSQHSQHHSQQLQHQQWLRRNQTAGEAASGAARASEHHAPAAADDADLSSQDWKAQLKLPPPDTRYQTEDVTATKGNEFEDYFLKRELLMGIYEKGFERPSPIQEESIPIALTGSDILARAKNGTGKTAAFCIPALEKIDQDKNAIQVVILVPTRELALQTSQVCKELGKHLKIQVMVTTGGTSLKDDIVRLYQPVHLLVGTPGRVLDLTKKGICILNDCSMLIMDEADKLLSPEFQPSVEQLIRYLPSSRQILMFSATFPVTVKAFKDKYLPKPYVINLMDELTLKGITQFYAFVEERQKVHCLNTLFSKLQINQSIIFCNSVNRVELLAKKITELGYSCFYIHAKMLQDHRNRVFHDFRNGACRNLVCTDLFTRGIDIQAVNVVINFDFPKTAETYLHRVGRSGRFGHLGLAVNLITYEDRFNLYRIEQELGTEIKPIPPQIDRTIYCQ

SEQ ID NO: 11676 - protein, 457 aa, Triticum aestivum
  misc_feature (1)..(457): Ceres Seq. ID no. 15219811
MQRQSQHSQHSQHHSQQLQHQQWLRRNQTAGEAASGAARASEHHAPAAADDADLSSQDWKAQLKLPPPDTRYQTEDVTATKGNEFEDYFLKRELLMGIYEKGFERPSPIQEESIPIALTGSDILARAKNGTGKTAAFCIPALEKIDQDKNAIQVVILVPTRELALQTSQVCKELGKHLKIQVMVTTGGTSLKDDIVRLYQPVHLLVGTPGRVLDLTKKGICILNDCSMLIMDEADKLLSPEFQPSVEQLIRYLPSSRQILMFSATFPVTVKAFKDKYLPKPYVINLMDELTLKGITQFYAFVEERQKVHCLNTLFSKLQINQSIIFCNSVNRVELLAKKITELGYSCFYIHAKMLQDHRNRVFHDFRNGACRNLVCTDLFTRGIDIQAVNVVINFDFPKTAETYLHRVGRSGRFGHLGLAVNLITYEDRFNLYRIEQELGTEIKPIPPQIDRTIYCQ

SEQ ID NO: 11677 - protein, 362 aa, Triticum aestivum
  misc_feature (1)..(362): Ceres Seq. ID no. 15219812
MGIYEKGFERPSPIQEESIPIALTGSDILARAKNGTGKTAAFCIPALEKIDQDKNAIQVVILVPTRELALQTSQVCKELGKHLKIQVMVTTGGTSLKDDIVRLYQPVHLLVGTPGRVLDLTKKGICILNDCSMLIMDEADKLLSPEFQPSVEQLIRYLPSSRQILMFSATFPVTVKAFKDKYLPKPYVINLMDELTLKGITQFYAFVEERQKVHCLNTLFSKLQINQSIIFCNSVNRVELLAKKITELGYSCFYIHAKMLQDHRNRVFHDFRNGACRNLVCTDLFTRGIDIQAVNVVINFDFPKTAETYLHRVGRSGRFGHLGLAVNLITYEDRFNLYRIEQELGTEIKPIPPQIDRTIYCQ

SEQ ID NO: 11678 - DNA, 1234 bp, Triticum aestivum
  misc_feature (1)..(1234): Ceres Seq. ID no. 13656181
aatgcaccgccactccgcccaagaggcacaggcgatgggtagcaacggaggcggcgccgccgccaagccgccggcgtgggagttccacgccacggggcctcgcaacctctccagccccggccgctctgcctggaaaaatcccaactacagaagaattgcaatatcatgtttagtgcaggccgcgtatgtactggagtttgacaggcaagagaacagaactggtgaaactgccattgctcctaactggtggaagccatttaagtacaagctggtgcgccttctaattgattccagagacggatccatatatggggcacttctagaatgggaccaggttgctgcatatcagactggataatgcggagacctgatggcgctccaaaggctgtcctggcactgaggggaactgtcctgaagcagtcgaccgttgcgagagacttggaggatgacctcaggtactttgcccaggagagcttgaggggttctgtcaggttcgctggaacactggaggttttcaagtcggcaatcgataagcatggaagcaacaatgtgtgcgttgcagggcattccctaggggcaggatatgctatgcaggttggtaagactttggcgaaggacggagtcttcgtagaatgccatttgtttaacccaccatcagtgtcactcggcctgggcctgaggaagcttcaggataaagtcgacaaggtcttgaagcgatacatcagcggcagctcttcgaatgccgttgaaagttctcacccgggacaggaggaaactgtttctgaaattggagaagaaaatctgatcaaggaggtgaagagatgggtgccgaacctgtacatcaacaacagcgactacatttgctgcttctatgttgaccgtagtggcgtaccaactgttactgccgagaagcgcggcgatagtcaccccgtggcgcgtgccaaggtttttgtgattgcgaaagggccacagaagtttctaaaagctcatgggctgcagcaatggtggatggatgattccgagctccatctggctgtgaatgagagcaagctcatgtataagcacctcaagtccctgtatgtgaaagaaacgtagcgaaaccaatgtcattgtgatctctgtctcctgttctctcctgttctgtagtcaagtatgcttttaaaagctttcatgaagctatccagttcctgcaaaccttttagtcagtcgacgcttatcaaaagtaactgtcagt

SEQ ID NO: 11679 - protein, 256 aa, Triticum aestivum
  misc_feature (1)..(256): Ceres Seq. ID no. 13656182
MGPGCCISDWIMRRPDGAPKAVLALRGTVLKQSTVARDLEDDLRYFAQESLRGSVRFAGTLEVFKSAIDKHGSNNVCVAGHSLGAGYAMQVGKTLAKDGVFVECHLFNPPSVSLGLGLRKLQDKVDKVLKRYISGSSSNAVESSHPGQEETVSEIGEENLIKEVKRWVPNLYINNSDYICCFYVDRSGVPTVTAEKRGDSHPVARAKVFVIAKGPQKFLKAHGLQQWWMDDSELHLAVNESKLMYKHLKSLYVKET

SEQ ID NO: 11680 - protein, 245 aa, Triticum aestivum
  misc_feature (1)..(245): Ceres Seq. ID no. 13656183
MRRPDGAPKAVLALRGTVLKQSTVARDLEDDLRYFAQESLRGSVRFAGTLEVFKSAIDKHGSNNVCVAGHSLGAGYAMQVGKTLAKDGVFVECHLFNPPSVSLGLGLRKLQDKVDKVLKRYISGSSSNAVESSHPGQEETVSEIGEENLIKEVKRWVPNLYINNSDYICCFYVDRSGVPTVTAEKRGDSHPVARAKVFVIAKGPQKFLKAHGLQQWWMDDSELHLAVNESKLMYKHLKSLYVKET

SEQ ID NO: 11681 - protein, 168 aa, Triticum aestivum
  misc_feature (1)..(168): Ceres Seq. ID no. 13656184
MQVGKTLAKDGVFVECHLFNPPSVSLGLGLRKLQDKVDKVLKRYISGSSSNAVESSHPGQEETVSEIGEENLIKEVKRWVPNLYINNSDYICCFYVDRSGVPTVTAEKRGDSHPVARAKVFVIAKGPQKFLKAHGLQQWWMDDSELHLAVNESKLMYKHLKSLYVKET

SEQ ID NO: 11682 - DNA, 1342 bp, Triticum aestivum
  misc_feature (1)..(1342): Ceres Seq. ID no. 13656196
atcccggtccggggcgcacatccatctcccatgcccgcacctccacctgagctggactccctggtatagcgagcgcgccgaccaactccatagctggggcttctccaatcaatccagccggccagagcgcagctcccgcccacccttccccggtccccgtctcttccgcaaaggagcagccgcgccattgccgtgggaggaagcaatgggggcgacacgcgcggacgccgacgagaaggaggaaggcgtgatggcgacggacttcttttggtcgtacacggacgaaccgcacgcgtcccgccgccgggagatcctggccaagtacccgcagatcaaggagctcttcggctcggatcctctcgccttcatcaagatagccgcagttgtttcgcttcagctatggaccgccacgctcctgcgagatgcaggctggtcgaagatactgccggtcgcttacttcttcggttcctttctgaatcacaatctcttccttgcgatccacgagctcagccacaacctcgccttcgccaccccatccctgaaccgctggctaggcatcttcgcaaacctgcccatcggcgtcccaatgtcggtgacattccagaaataccacctggagcaccaccggttccaaggcgtggacgggatcgacatggacatccccagccagacagaggcgcacgtcgtaaagaacaccgtcagcaaatccatctgggtcgtgctccagctcttcttctacgcgctcaggccgctcttcctgaagccgaagcccccgggcctgtgggagttcaccaacctgacgatccaggtcgcgctcgacgcggcaatggtgtacctctacggctggaagtcgctggcctacctcatcctgtctacgttcctcggtggcggcatgcacccgatggccggccacttcatctcggagcactacgtcttcagcccggagcaggagacctactcgtactacgggccgctgaacctgatgacgtggcacgtcgggtaccacaacgagcaccacgacttccccaggatccccggcgccaagctgcacaaggtgaaggagatcgcgccggagtactatgacagtctgaaatcatacaggtcctggagccaggtgatatacatgtacgtcatggaccagacggtaggccctttcagccggatgaagcggaaggcgcccaagaaagatttgtagaagaaacctctgcctgtaggttaagttttgccacacatagctgttttagatgatgttttgatcccctgggccactgtctcactgaactactgaagtgttaactcgaaggtattttgcttgtgtgttcagggaacttgcacttgttcc

SEQ ID NO: 11683 - protein, 397 aa, Triticum aestivum
  misc_feature (1)..(397): Ceres Seq. ID no. 13656197
SRSGAHIHLPCPHLHLSWTPWYSERADQLHSWGFSNQSSRPERSSRPPFPGPRLFRKGAAAPLPWEEAMGATRADADEKEEGVMATDFFWSYTDEPHASRRREILAKYPQIKELFGSDPLAFIKIAAVVSLQLWTATLLRDAGWSKILPVAYFFGSFLNHNLFLAIHELSHNLAFATPSLNRWLGIFANLPIGVPMSVTFQKYHLEHHRFQGVDGIDMDIPSQTEAHVVKNTVSKSIWVVLQLFFYALRPLFLKPKPPGLWEFTNLTIQVALDAAMVYLYGWKSLAYLILSTFLGGGMHPMAGHFISEHYVFSPEQETYSYYGPLNLMTWHVGYHNEHHDFPRIPGAKLHKVKEIAPEYYDSLKSYRSWSQVIYMYVMDQTVGPFSRMKRKAPKKDL

SEQ ID NO: 11684 - protein, 329 aa, Triticum aestivum
  misc_feature (1)..(329): Ceres Seq. ID no. 13656198
MGATRADADEKEEGVMATDFFWSYTDEPHASRRREILAKYPQIKELFGSDPLAFIKIAAVVSLQLWTATLLRDAGWSKILPVAYFFGSFLNHNLFLAIHELSHNLAFATPSLNRWLGIFANLPIGVPMSVTFQKYHLEHHRFQGVDGIDMDIPSQTEAHVVKNTVSKSIWVVLQLFFYALRPLFLKPKPPGLWEFTNLTIQVALDAAMVYLYGWKSLAYLILSTFLGGGMHPMAGHFISEHYVFSPEQETYSYYGPLNLMTWHVGYHNEHHDFPRIPGAKLHKVKEIAPEYYDSLKSYRSWSQVIYMYVMDQTVGPFSRMKRKAPKKDL

SEQ ID NO: 11685 - protein, 314 aa, Triticum aestivum
  misc_feature (1)..(314): Ceres Seq. ID no. 13656199
MATDFFWSYTDEPHASRRREILAKYPQIKELFGSDPLAFIKIAAVVSLQLWTATLLRDAGWSKILPVAYFFGSFLNHNLFLAIHELSHNLAFATPSLNRWLGIFANLPIGVPMSVTFQKYHLEHHRFQGVDGIDMDIPSQTEAHVVKNTVSKSIWVVLQLFFYALRPLFLKPKPPGLWEFTNLTIQVALDAAMVYLYGWKSLAYLILSTFLGGGMHPMAGHFISEHYVFSPEQETYSYYGPLNLMTWHVGYHNEHHDFPRIPGAKLHKVKEIAPEYYDSLKSYRSWSQVIYMYVMDQTVGPFSRMKRKAPKKDL

SEQ ID NO: 11686 - DNA, 1154 bp, Triticum aestivum
  misc_feature (1)..(1154): Ceres Seq. ID no. 13656209
atcttccttcccccacttgttccccgaaaagcttctcgtccgctcctctcgcaccgccggagggaggcgcctcgccgtctcctcgccgccgctcgtcgagggtggttcctggcgagcgactgaagcccagccagcatggcggccaacgtgggggagtccacgagcggcagcggcagcagcgtggctggcgacggcgggggcagcttcgagtgcaacatatgcttcgagctgccgcaggagcccatcgtcacgctctgcggccacctcttctgctggccctgcctctacaagtggctgcacatccactcgcactcgcccgagtgccccgtctgcaaggccgtcgtcgaggaggacaagctcgtcccgctctacggccgcggcaaggaccgcgtcgaccccaggtccaagggcgtgccggccggggccgagatccccaaccggccgaccgggcagcggcctgccacggccccgcaggcagatcccaacaaccacttccctaatgcgaaccctaacccctggttcatggggggagggggcgtccctctggccaacgcgcggtgggggaactacaccttctcggccgcgttcggcggcctgttcccgctgctgagcttccaggtgcatggattcccggacgcggccgcgtacgggcagcctgccgggtttccctatgggtacggccatggccatggccacgggcatgctttccatggcgggcacgcccacgccgccgccccccggcacgcgccgcccgggcagcagcagcagcagcagcaggcggacgtgtacctcaaggcgctgctcatcctggttggctttctcgtgatcgcaagcctcatcacattctaggttcgtcggttcccaccattgtcatttgtcaccgtcataataagagaaacaacgattgtcgtgatacttctcagatgttgtgtgcattaccttggcccccccatacaaagccccggtctaaatccgagtggtgcgttttgagcgaaagtgttcatagaactcctgtatatatgtgctatttagacgcggtcctgtgggggggcgcatgtgtaccgtagtagtttcgcgctgattcgcggatgatttgggaaacctctgtttggagtggatgtaccagaccaattatatatcatgtgtaattttgt

SEQ ID NO: 11687 - protein, 237 aa, Triticum aestivum
  misc_feature (1)..(237): Ceres Seq. ID no. 15219813
MAANVGESTSGSGSSVAGDGGGSFECNICFELPQEPIVTLCGHLFCWPCLYKWLHIHSHSPECPVCKAVVEEDKLVPLYGRGKDRVDPRSKGVPAGAEIPNRPTGQRPATAPQADPNNHFPNANPNPWFMGGGGVPLANARWGNYTFSAAFGGLFPLLSFQVHGFPDAAAYGQPAGFPYGYGHGHGHGHAFHGGHAHAAAPRHAPPGQQQQQQQADVYLKALLILVGFLVIASLITF

SEQ ID NO: 11688 - protein, 202 aa, Triticum aestivum
  misc_feature (1)..(202): Ceres Seq. ID no. 15219814
SSFPHLFPEKLLVRSSRTAGGRRLAVSSPPLVEGGSWRATEAQPAWRPTWGSPRAAAAAAWLATAGAASSATYASSCRRSPSSRSAATSSAGPASTSGCTSTRTRPSAPSARPSSRRTSSSRSTAAARTASTPGPRACRPGPRSPTGRPGSGLPRPRRQIPTTTSLMRTLTPGSWGEGASLWPTRGGGTTPSRPRSAACSRC

SEQ ID NO: 11689 - protein, 165 aa, Triticum aestivum
  misc_feature (1)..(165): Ceres Seq. ID no. 15219815
LPSPTCSPKSFSSAPLAPPEGGASPSPRRRSSRVVPGERLKPSQHGGQRGGVHERQRQQRGWRRRGQLRVQHMLRAAAGAHRHALRPPLLLALPLQVAAHPLALARVPRLQGRRRGGQARPALRPRQGPRRPQVQGRAGRGRDPQPADRAAACHGPAGRSQQPLP

SEQ ID NO: 11690 - DNA, 644 bp, Triticum aestivum
  misc_feature (1)..(644): Ceres Seq. ID no. 13656267
ttcacacatgggtgcttatagttatttttgttttatgtatttttatcaacccttctcatagatgaatctgtaatatcttatggtggtcagttataggatttggataattatctgcatttgcctatctgggatgtgatgctagaatatatattatgctaagtctgatttaacaatgtttaagatcttggaggcagccgacaccatgttctatctcctgggatcatgctaatgcttaaatgaactgcagtagaatagcggaagttgaagcaagtaaagaaaaaatcatgctaatgcttatagattctagaaacagtaacgtgatgaaatatgcaccttagtagtcttcacctttcttgttaactactactttcttctttggtctgtgctaattatttactttttggaaaatctttgccatgtttcatcttgctcttctcaacttattacagttggatgatggcttggagttctccttcactgataagaggcgttttgcaaaaatacgattgcttgacaatccagaagctgtccctccaatttctgaacttggaccagatgccctatgcgaaccaatgcagcttgatgattttgtacaatcttttggtagaaagaatgctccaataaatgtttaaacacaataaagt

SEQ ID NO: 11691 - protein, 71 aa, Triticum aestivum
  misc_feature (1)..(71): Ceres Seq. ID no. 13656268
MFHLALLNLLQLDDGLEFSFTDKRRFAKIRLLDNPEAVPPISELGPDALCEPMQLDDFVQSFGRKNAPINV

SEQ ID NO: 11692 - protein, 56 aa, Triticum aestivum
  misc_feature (1)..(56): Ceres Seq. ID no. 13656269
MMAWSSPSLIRGVLQKYDCLTIQKLSLQFLNLDQMPYANQCSLMILYNLLVERMLQ

SEQ ID NO: 11693 - protein, 55 aa, Triticum aestivum
  misc_feature (1)..(55): Ceres Seq. ID no. 13656270
MAWSSPSLIRGVLQKYDCLTIQKLSLQFLNLDQMPYANQCSLMILYNLLVERMLQ

SEQ ID NO: 11694 - DNA, 918 bp, Triticum aestivum
  misc_feature (1)..(918): Ceres Seq. ID no. 13656329
tcaataaaactgagtttcacgactttcttaatccaagtgattcggagaatcctaaaattatcaacttgctctgcagacaagaattaaggcagagagataaagatggtgatggaaagttaaactttgaagaatactttcatgggctacatgaccatatacatggttatgatgacgagaatgcagctatttctcatattgggaacatgacaattgcaaaggagcggtttgccaagcttgacaaagataatgacgggttcatttcagagcatgaactagaacctgttcttgataagctccatctgtcagaacgctattatgccagacagcaagccacacatgctatttcagaggcagacaaagatcatgatggaaggctaacactggaagagatgatcgagaacccctatgcattttatggtagtgtttacttcagcgatgacgaggactacttccatgaagagttccgctaaggcatctgcagatcataggcatcctaaccatgaaatgggataggcaatctagcaggaaggattccgaatgcatcattactaatcaaaatgttgtgtgaatactcgcaagaatcagcgtgccacggtatcttatctctgtacccttaccgtgccttggcatcgcctgtatctggacagcacacagagttggtatggtgtgacacgggggaatcaggtgctgctttgattctgtgaattgtttagtgaaatgaaatggcatcttactggtgataggagtccaggttagtttagattaagctgagctggcaccgtctcagttttgtaaaacgcacggaaccttggtggtgaagaatgagaaaattaacacttggcagtgatgagcagacgcaagttcgataatacacactggtgtttcgttctgtgaaatgagatcagctgtttgccctcc

SEQ ID NO: 11695 - protein, 155 aa, Triticum aestivum
  misc_feature (1)..(155): Ceres Seq. ID no. 13656330
NKTEFHDFLNPSDSENPKIINLLCRQELRQRDKDGDGKLNFEEYFHGLHDHIHGYDDENAAISHIGNMTIAKERFAKLDKDNDGFISEHELEPVLDKLHLSERYYARQQATHAISEADKDHDGRLTLEEMIENPYAFYGSVYFSDDEDYFHEEFR

SEQ ID NO: 11696 - protein, 88 aa, Triticum aestivum
  misc_feature (1)..(88): Ceres Seq. ID no. 13656331
MTIAKERFAKLDKDNDGFISEHELEPVLDKLHLSERYYARQQATHAISEADKDHDGRLTLEEMIENPYAFYGSVYFSDDEDYFHEEFR

SEQ ID NO: 11697 - DNA, 498 bp, Triticum aestivum
  misc_feature (1)..(498): Ceres Seq. ID no. 13656369
tccccccacactccccggccgccgccgccggcctcgtcagtcgcagatcccccaaccaccagcgaagccgccgctcaccgccgactggcccacatggccgcctctatcgccgccgccgcgtccgtctcccacctcctcctcgggccgaaacccaagcccacaaccccgccccgcctctccctcctcccccgcaggcgctccggagccgccggggccatctccgcctccgcgtccgcggcctccgacttcctcgccccggtcccgtccctcaagtcccgcctcgccgccggcgacaccctctacggcctcttcctcctctccttctcccccacgctcgccgagatcgccgcgctcgccggctacgactacgtggtcgtcgacatggagcacgggccgggcggcatcacggaggccctcgcctgcctccgcgccctcgacgccgcccgcacccccgccgtcctccgcctcccggtgttaaacacaataaagtgggaacgg

SEQ ID NO: 11698 - protein, 166 aa, Triticum aestivum
  misc_feature (1)..(166): Ceres Seq. ID no. 13656370
SPHTPRPPPPASSVADPPTTSEAAAHRRLAHMAASIAAAASVSHLLLGPKPKPTTPPRLSLLPRRRSGAAGAISASASAASDFLAPVPSLKSRLAAGDTLYGLFLLSFSPTLAEIAALAGYDYVVVDMEHGPGGITEALACLRALDAARTPAVLRLPVLNTIKWER

SEQ ID NO: 11699 - protein, 165 aa, Triticum aestivum
  misc_feature (1)..(165): Ceres Seq. ID no. 13656371
PPHSPAAAAGLVSRRSPNHQRSRRSPPTGPHGRLYRRRRVRLPPPPRAETQAHNPAPPLPPPPQALRSRRGHLRLRVRGLRLPRPGPVPQVPPRRRRHPLRPLPPLLLPHARRDRRARRLRLRGRRHGARAGRHHGGPRLPPRPRRRPHPRRPPPPGVKHNKVGT

SEQ ID NO: 11700 - protein, 158 aa, Triticum aestivum
  misc_feature (1)..(158): Ceres Seq. ID no. 13656372
PPTLPGRRRRPRQSQIPQPPAKPPLTADWPTWPPLSPPPRPSPTSSSGRNPSPQPRPASPSSPAGAPEPPGPSPPPRPRPPTSSPRSRPSSPASPPATPSTASSSSPSPPRSPRSPRSPATTTWSSTWSTGRAASRRPSPASAPSTPPAPPPSSASRC

SEQ ID NO: 11701 - protein, 135 aa, Triticum aestivum
  misc_feature (1)..(135): Ceres Seq. ID no. 13656373
MAASIAAAASVSHLLLGPKPKPTTPPRLSLLPRRRSGAAGAISASASAASDFLAPVPSLKSRLAAGDTLYGLFLLSFSPTLAEIAALAGYDYVVVDMEHGPGGITEALACLRALDAARTPAVLRLPVLNTIKWER

SEQ ID NO: 11702 - DNA, 1219 bp, Triticum aestivum
  misc_feature (1)..(1219): Ceres Seq. ID no. 13656382
gaaaacccgttcgttccgcagaaattcaaaatccaaatcccacccccacccccacctcccctcgccggcggcgaccgaccgaccgaccgatcgatccatggcgccggccgacgtcaaggacgcgtcccctcctccccgccccccgcctccccccgccgggccggcgctccccggcggcgcggaggagtacgtgcgcggctccatcgaggccgccctcggcctccccgtgccggaccgctctatccgcgccaagctcgcggcctacgaggacctgcgccgccgcctccaggaccgcgtcttcgcgctcgaggaggacctccacgccgccgcccgccgcatcgacctcctcaagaacgagtcggcgatgaacgcggaggggatccggcgctgcgtggaggagaaggaggccgtggcggccgcgcgcgatcagctcgccgcccacgccgccaggctcgagaaggagtgcgggctctacgagcgcgacctcgagcgcgccatggagtcctgcgacgagctcgccagggagagcgacgacctgcgcaaccgcctccgtgacgcccccgaccttactgaacaagtccaagcgctgcagagggacaaggagatactcaagaccaacctgaacaaagcagaggaggaggttaagttgctgtttgaggagaacagagccctcgacgaagcaaacaagaggctgctgtgcttgctggagaaggagcagaagcatcggtccgaaagaaagcactccgccagtaattccaccaagaaacgcaagtcgtcgagcctgaaggacacgagcccggtcagcctggccatcgatttcaacagtgcggacgcgtcgaggcagcccctgttgcccttgcagccaaactctccggactgcagggtgcataagaagtgaagctggccgtcccggcattctcctctggatggcttaaactgaagtgaactgaacaactaccccttagctaggcatcgtcgcttgctgcttgcctgatcgatctgactaacttgctgggttaatttggttggttcttgtcggtagaacctcctcggtcatatgtagttcttcttccgcttgtgttggcagctgcctgtgtctatcatatcatgatcctttcatgacaaaattagtagtattatcttagtagttttgtgtctggtgatgggcgtgtaaggctctgattcgacgcttattgtggccagttcgtcgtgcctctgc

SEQ ID NO: 11703 - protein, 298 aa, Triticum aestivum
  misc_feature (1)..(298): Ceres Seq. ID no. 13656383
KTRSFRRNSKSKSHPHPHLPSPAATDRPTDRSMAPADVKDASPPPRPPPPPAGPALPGGAEEYVRGSIEAALGLPVPDRSIRAKLAAYEDLRRRLQDRVFALEEDLHAAARRIDLLKNESAMNAEGIRRCVEEKEAVAAARDQLAAHAARLEKECGLYERDLERAMESCDELARESDDLRNRLRDAPDLTEQVQALQRDKEILKTNLNKAEEEVKLLFEENRALDEANKRLLCLLEKEQKHRSERKHSASNSTKKRKSSSLKDTSPVSLAIDFNSADASRQPLLPLQPNSPDCRVHKK

SEQ ID NO: 11704 - protein, 266 aa, Triticum aestivum
  misc_feature (1)..(266): Ceres Seq. ID no. 13656384
MAPADVKDASPPPRPPPPPAGPALPGGAEEYVRGSIEAALGLPVPDRSIRAKLAAYEDLRRRLQDRVFALEEDLHAAARRIDLLKNESAMNAEGIRRCVEEKEAVAAARDQLAAHAARLEKECGLYERDLERAMESCDELARESDDLRNRLRDAPDLTEQVQALQRDKEILKTNLNKAEEEVKLLFEENRALDEANKRLLCLLEKEQKHRSERKHSASNSTKKRKSSSLKDTSPVSLAIDFNSADASRQPLLPLQPNSPDCRVHKK

SEQ ID NO: 11705 - protein, 184 aa, Triticum aestivum
  misc_feature (1)..(184): Ceres Seq. ID no. 13656385
ENPFVPQKFKIQIPPPPPPPLAGGDRPTDRSIHGAGRRQGRVPSSPPPASPRRAGAPRRRGGVRARLHRGRPRPPRAGPLYPRQARGLRGPAPPPPGPRLRARGGPPRRRPPHRPPQERVGDERGGDPALRGGEGGRGGRARSARRPRRQAREGVRALRARPRARHGVLRRARQGERRPAQPPP

SEQ ID NO: 11706 - DNA, 575 bp, Triticum aestivum
  misc_feature (1)..(575): Ceres Seq. ID no. 13656404
gcagtcgatttcacgcgatcggatccagccgccccatgccgccgtcccccgccgcgtccgccccggcgagccgccacctgcgactctggtggcgccgccgcggccgggccggcgccgtcgcggccaccttcgccgcggcactcctcgccgcggccctcctcctctcgctctcctacttcgcctccctgcccctcgcgcccgcctcctcctccgccctcgtcggcctcaccctcctccgccgcgccgaggagaagggcgcgctgtgcttggatgggagcgcgccggggtaccatctgcagcgagggtcagggagtggctctcagagctggctcatccacttggagggtggaggctggtgccgaaatttgaaatcatgcgcttcacgccagaaatcgatgttgggttcttcccattacatggaacgtcaggttgagtttgctgggatgttgagcgatgatgaagatcagaatccagattttcacaactggaataaagtgaagataaggtattgtgatggggcatcattttctgggaacgttaaagacgagttgcagaacggcacaaaattctttttc

SEQ ID NO: 11707 - protein, 191 aa, Triticum aestivum
  misc_feature (1)..(191): Ceres Seq. ID no. 13656405
SRFHAIGSSRPMPPSPAASAPASRHLRLWWRRRGRAGAVAATFAAALLAAALLLSLSYFASLPLAPASSSALVGLTLLRRAEEKGALCLDGSAPGYHLQRGSGSGSQSWLIHLEGGGWCRNLKSCASRQKSMLGSSHYMERQVEFAGMLSDDEDQNPDFHNWNKVKIRYCDGASFSGNVKDELQNGTKFFF

SEQ ID NO: 11708 - protein, 180 aa, Triticum aestivum
  misc_feature (1)..(180): Ceres Seq. ID no. 13656406
MPPSPAASAPASRHLRLWWRRRGRAGAVAATFAAALLAAALLLSLSYFASLPLAPASSSALVGLTLLRRAEEKGALCLDGSAPGYHLQRGSGSGSQSWLIHLEGGGWCRNLKSCASRQKSMLGSSHYMERQVEFAGMLSDDEDQNPDFHNWNKVKIRYCDGASFSGNVKDELQNGTKFFF

SEQ ID NO: 11709 - protein, 143 aa, Triticum aestivum
  misc_feature (1)..(143): Ceres Seq. ID no. 13656407
QSISRDRIQPPHAAVPRRVRPGEPPPATLVAPPRPGRRRRGHLRRGTPRRGPPPLALLLRLPAPRARLLLRPRRPHPPPPRRGEGRAVLGWERAGVPSAARVREWLSELAHPLGGWRLVPKFEIMRFTPEIDVGFFPLHGTSG

SEQ ID NO: 11710 - DNA, 2167 bp, Triticum aestivum
  misc_feature (1)..(2167): Ceres Seq. ID no. 13656434
aaaacgcgtcagcggcaacctccctctcctcgcacacggatcattccaccggcacatccgtaccacacgcagccgttctgttcgtcggtttggcggcgagcggcggaagcacgagcatccttgcttctaaatggccgaggaggtaatcaaacaggctatcacttcaacaactcctgcatcggctgagtcgaagaaagaagatttcccggtaaataccactgaaaatacagatggcaacagtttgccagcctttctgaggaggaaagagaagccaatcccacattaccagagagcatccactggctcatgccatgacaactgcaaacttggtattcatcattcttccgagtctaagaaatactcgcctgttcgtggctggcgtcaggaccgcacgaacgccaggaatggaacacaggacctggctgtagtcatcccacaaggagacaaagcaagaaagaagagtcagacgctgaagatttctcatgtaaaagatggcgctgctcctgctaagcctgaatttaccaagcagaagccatcactgaaaggagtacctggtcgtcttgaaaggtctccatgtgcagagttgttatcagatgaagtatctggaactgttgtggctggaaaccagccagattgtgcgaagtgcctcatcatctcacttgatgacttgtcgagctgtggagatggacaattgtcagaaggagctgtaagcattgagctggatatgccgttggccatccaggacagggatgagtctgacgatcatagtacgaatcattccgcaaatgactctgtaagttcagtgaacatgactaagcagactgtgatggcaacagagaagcacaaacaagataaggacgtgactaaaccacagagcttttcccaggagtctgtgaaaccaaacaggaaagcaaggtcgactataaccagaaacaccatgccaaagcagaagagcgaaataacatcgcatgagaaggctgcaggtacatcagctggaagcgccgatgggccaaggacaacggccaaaaaggcagatcctagcgttcctaacaagttcaacaaggagaggaaacttaactccattgtcacatcaactcttccaagagtgaagaaaatcaaagcgccatcaccagctagcgtgatggattcgtgtgccaaacctgctacaaatgaacatgctccatctccatcacctccttcagggaaggagactgaaagaaagattacacttaataatgttgccaagaatgctcaactttggcaaaacaagggagaagaaaaggttacattgagtccactgaagctgtctcgttctacggtgagagcagtcaggaaagaaacttctgcttccccagtgaagagtaagaagttttatgggatagaaagtttttctgggtgcaaggataaaataacgaagacagcttcgccaaaaacacgaaaaccagacgttaacaacaaagagagacaatctcgcaaagaaaatggggctattgcaagaactgaaattgcaggaagaccaaagataacatccacgccctcaggcgtcatcatgaagtcgcctcgcatgctgaggtttcgccgtggcaaggtgctgaaccttggcagcaactctgacaacagcactcccagacgagtacagttcaggcctgcagatgctacagatgacggcaacggaagcaagtatcctgccagacgcagaatcaccaagaacaatgaagctaaagcctctgctgcatcaaaagattcaggtgcttcaagagctgaagttgttgtcctgaggcatcagggtgccaatgacaaaaagaagagcgagccgcgattattcaacaatgtgatcaaggagaccgcgagcaggctcgtcgaggcgaggaggagcaaagtgaaggccctcgttggcgctttcgagacagtgatctcgcttcaaggtataaagcaaggcagacccagcatttcctgacctgaagtttgccatgtgaaattcaagtaaatgtgggggtctctggagtttccatgttagaggtttccaattggagttcttgtgcacattcctttgctttgggttcacaggcctacagataagaaaaatcaccgaataggaataatttactgtgctggtatactaaactaaactttgtttcagtttacctaattccaagagagatttgac

SEQ ID NO: 11711 - protein, 608 aa, Triticum aestivum
  misc_feature (1)..(608): Ceres Seq. ID no. 15219217
MAEEVIKQAITSTTPASAESKKEDFPVNTTENTDGNSLPAFLRRKEKPIPHYQRASTGSCHDNCKLGIHHSSESKKYSPVRGWRQDRTNARNGTQDLAVVIPQGDKARKKSQTLKISHVKDGAAPAKPEFTKQKPSLKGVPGRLERSPCAELLSDEVSGTVVAGNQPDCAKCLIISLDDLSSCGDGQLSEGAVSIELDMPLAIQDRDESDDHSTNHSANDSVSSVNMTKQTVMATEKHKQDKDVTKPQSFSQESVKPNRKARSTITRNTMPKQKSEITSHEKAAGTSAGSADGPRTTAKKADPSVPNKFNKERKLNSIVTSTLPRVKKIKAPSPASVMDSCAKPATNEHAPSPSPPSGKETERKITLNNVAKNAQLWQNKGEEKVTLSPLKLSRSTVRAVRKETSASPVKSKKFYGIESFSGCKDKITKTASPKTRKPDVNNKERQSRKENGAIARTEIAGRPKITSTPSGVIMKSPRMLRFRRGKVLNLGSNSDNSTPRRVQFRPADATDDGNGSKYPARRRITKNNEAKASAASKDSGASRAEVVVLRHQGANDKKKSEPRLFNNVIKETASRLVEARRSKVKALVGAFETVISLQGIKQGRPSIS

SEQ ID NO: 11712 - protein, 410 aa, Triticum aestivum
  misc_feature (1)..(410): Ceres Seq. ID no. 15219218
MPLAIQDRDESDDHSTNHSANDSVSSVNMTKQTVMATEKHKQDKDVTKPQSFSQESVKPNRKARSTITRNTMPKQKSEITSHEKAAGTSAGSADGPRTTAKKADPSVPNKFNKERKLNSIVTSTLPRVKKIKAPSPASVMDSCAKPATNEHAPSPSPPSGKETERKITLNNVAKNAQLWQNKGEEKVTLSPLKLSRSTVRAVRKETSASPVKSKKFYGIESFSGCKDKITKTASPKTRKPDVNNKERQSRKENGAIARTEIAGRPKITSTPSGVIMKSPRMLRFRRGKVLNLGSNSDNSTPRRVQFRPADATDDGNGSKYPARRRITKNNEAKASAASKDSGASRAEVVVLRHQGANDKKKSEPRLFNNVIKETASRLVEARRSKVKALVGAFETVISLQGIKQGRPSIS

SEQ ID NO: 11713 - protein, 382 aa, Triticum aestivum
  misc_feature (1)..(382): Ceres Seq. ID no. 15219219
MTKQTVMATEKHKQDKDVTKPQSFSQESVKPNRKARSTITRNTMPKQKSEITSHEKAAGTSAGSADGPRTTAKKADPSVPNKFNKERKLNSIVTSTLPRVKKIKAPSPASVMDSCAKPATNEHAPSPSPPSGKETERKITLNNVAKNAQLWQNKGEEKVTLSPLKLSRSTVRAVRKETSASPVKSKKFYGIESFSGCKDKITKTASPKTRKPDVNNKERQSRKENGAIARTEIAGRPKITSTPSGVIMKSPRMLRFRRGKVLNLGSNSDNSTPRRVQFRPADATDDGNGSKYPARRRITKNNEAKASAASKDSGASRAEVVVLRHQGANDKKKSEPRLFNNVIKETASRLVEARRSKVKALVGAFETVISLQGIKQGRPSIS

SEQ ID NO: 11714 - DNA, 2073 bp, Triticum aestivum
  misc_feature (1)..(2073): Ceres Seq. ID no. 13656435
agaacatcctaatcgaaaaatagctcactctcactaccaccctcgccactcaccagctcgactccaccccactccactcgagccacgcgcacgcggagctgggccgtacagtacgtgagcccgtgagcgagcagggtacggactaaatgccgcacccgtcgtcgtcgtcttcctcggycagtgtggacgcggccgccaagggcgtcaagctggagcggtacgccagcggcggcggcgcgctgctgatgcggcgcgcggggagctccaagatcgtggcggcctcctcgcacctcctcttccgcgccaccgtcctcgccacgctcgcgctcgtctgcctcttcgccgtgcactacccttccctcctgtcccgctccttccggctctccgccgccgccgctgcttcctcctcttcttccccgccgcggcagacgtcgcggcaccggaacctgctcgggtcgtcgtcggcgtacgcgggcgccgcgtgggagcgggaggtgcggcgaagcgccacgccgcggcgggacggggggatgtcggtgctggtcacgggcgccgcggggttcgttggcgcgcactgcgcgctggcgctcagggcgcgcggcgacggcgtgctcggcctcgacaacttcaacgcgtactacgagccgggcctgaaacscscctscvgttccarctttattgtgytkctcagcgtcgcgcggggtggtggtgctcggcgccgacatcaacgacgcggccctgctcgagcggctcttcgccgccgtgcccttcacgcacgtgctgcacctcgccgcgcaggccggcgtgcggtacgcgatgcgggcgccgcagacgtacgtggcctccaacgtcgctggcctcgtcagcgtcttcgaggccgccgcccggcacgccgacccgcagccggcgatcgtgtgggcgtcgtcgtcgtcggtgtacgggctcaataccgacgcgccattctccgaggaccaccgcacggaccgaccggcgtcgctgtacgcggccaccaagaaggccggcgaggccatcgcgcacgcgtacaaccacatctacggtctctcgatcaccggcctccggttcttcacggtgtacggtccgtggggtcgccccgacatggcctacttctccttcgctcgcagcatcgtcgccggcgagcccatcacgctcttccgcgccgccgacggcacagacgtccgccgcgacttcacctacatcgacgacgtcgttaaggggtgcctcggctcgctcgacacggccggcaagagcacgggctccaagtccggcaagtagcgcgggccagcgcccctccgcgtctacaacctcggcaacacctcgccggtgcccgtcacccgcatggtggccatcctcgagaagctcctcggcaagaaagcgaacaagcgcgtcgtcaccatgcctagcaacggcgacgtgccgttcacgcacgccaatgtcagccacgccgcgcgcgacttcgggtaccaccccaccacctccctcgacgccggcctgcggaaattcgtcgaatggttcctccagtactacaagatcgaccccgcgaagctcgccaagggcagcagagtcggtaccaagactaccaagaagaaatccatgggcgccatatccgcggcatcgtgaggagagcgcgcgcgccgcgtgcgtcccggcccggatgtccagtccaccaagtgtgcaatctgttctcctcggaggctggcggttgtgttgcacaactttgtgagtgcatccccattgtttaagccattgccggtgcttttcccccttgatgatgcaaccatgctagagctcggtgggaagggaatcgtggaggtggcaaggcaaaggagaagcgattctttcttcgtagcataagcaaaaccaaactattttagggaaaaggggtggggggtataggtaagatgacatgagccgtggaaaggagcgaggaggacacgataaagatgaagtcctgggcttccttttgggacggttcaggttgtttttgcttagtttcatttttgttttgtcgtcactatcttgttcttgctcatttggttaatttgtcttgtgttt

SEQ ID NO: 11715 - protein, 361 aa, Triticum aestivum
  misc_feature (1)..(361): Ceres Seq. ID no. 15219220
  misc_feature (11)..(11): Xaa is any aa, unknown or other
  misc_feature (171)..(171): Xaa is any aa, unknown or other
  misc_feature (172)..(172): Xaa is any aa, unknown or other
  misc_feature (173)..(173): Xaa is any aa, unknown or other
  misc_feature (174)..(174): Xaa is any aa, unknown or other
  misc_feature (176)..(176): Xaa is any aa, unknown or other
  misc_feature (180)..(180): Xaa is any aa, unknown or other
MPHPSSSSSSXSVDAAAKGVKLERYASGGGALLMRRAGSSKIVAASSHLLFRATVLATLALVCLFAVHYPSLLSRSFRLSAAAAASSSSSPPRQTSRHRNLLGSSSAYAGAAWEREVRRSATPRRDGGMSVLVTGAAGFVGAHCALALRARGDGVLGLDNFNAYYEPGLKXXXXSXFIVXLSVARGGGARRRHQRRGPARAALRRRALHARAAPRRAGRRAVRDAGAADVRGLQRRWPRQRLRGRRPARRPAAGDRVGVVVVGVRAQYRRAILRGPPHGPTGVAVRGHQEGRRGHRARVQPHLRSLDHRPPVLHGVRSVGSPRHGLLLLRSQHRRRRAHHALPRRRRHRRPPRLHLHRRRR

SEQ ID NO: 11716 - protein, 328 aa, Triticum aestivum
  misc_feature (1)..(328): Ceres Seq. ID no. 15219221
  misc_feature (138)..(138): Xaa is any aa, unknown or other
  misc_feature (139)..(139): Xaa is any aa, unknown or other
  misc_feature (140)..(140): Xaa is any aa, unknown or other
  misc_feature (141)..(141): Xaa is any aa, unknown or other
  misc_feature (143)..(143): Xaa is any aa, unknown or other
  misc_feature (147)..(147): Xaa is any aa, unknown or other
MRRAGSSKIVAASSHLLFRATVLATLALVCLFAVHYPSLLSRSFRLSAAAAASSSSSPPRQTSRHRNLLGSSSAYAGAAWEREVRRSATPRRDGGMSVLVTGAAGFVGAHCALALRARGDGVLGLDNFNAYYEPGLKXXXXSXFIVXLSVARGGGARRRHQRRGPARAALRRRALHARAAPRRAGRRAVRDAGAADVRGLQRRWPRQRLRGRRPARRPAAGDRVGVVVVGVRAQYRRAILRGPPHGPTGVAVRGHQEGRRGHRARVQPHLRSLDHRPPVLHGVRSVGSPRHGLLLLRSQHRRRRAHHALPRRRRHRRPPRLHLHRRRR

SEQ ID NO: 11717 - protein, 233 aa, Triticum aestivum
  misc_feature (1)..(233): Ceres Seq. ID no. 15219222
  misc_feature (43)..(43): Xaa is any aa, unknown or other
  misc_feature (44)..(44): Xaa is any aa, unknown or other
  misc_feature (45)..(45): Xaa is any aa, unknown or other
  misc_feature (46)..(46): Xaa is any aa, unknown or other
  misc_feature (48)..(48): Xaa is any aa, unknown or other
  misc_feature (52)..(52): Xaa is any aa, unknown or other
MSVLVTGAAGFVGAHCALALRARGDGVLGLDNFNAYYEPGLKXXXXSXFIVXLSVARGGGARRRHQRRGPARAALRRRALHARAAPRRAGRRAVRDAGAADVRGLQRRWPRQRLRGRRPARRPAAGDRVGVVVVGVRAQYRRAILRGPPHGPTGVAVRGHQEGRRGHRARVQPHLRSLDHRPPVLHGVRSVGSPRHGLLLLRSQHRRRRAHHALPRRRRHRRPPRLHLHRRRR

SEQ ID NO: 11718 - DNA, 744 bp, Triticum aestivum
  misc_feature (1)..(744): Ceres Seq. ID no. 13656468
gacggggctactttacttcttaagaccatcgaaagtggaaacgatgtactcatggaaactttccgtaaggctgtagcaatacctgtgcactcaccgaatgtgcttacaatcctcaaagcagttactaacttatttgacaactcatgcttacaccaatggttgaaaacccattgtgctgagattattgattctttctcaagctgcaagccgtcttttagcaagagcgctcacttggcatatgccacacttttactgaactattctgttctttcaattgaatcgaaggatgaacaaagtcaggcacagattctttctgcggcccttgaaattgctgaagacgatgcccaagatgccgattcgaaatacagggcgcttgttgccaatcggctctcttatgttgaacggcctggtcaagtccatcgcccttgacctcgacgtgaagagcgtcacaagcagcgcaaaagcttcgatggactcgaagatcgccgaagttggagctgatattgagctgctaacaagatgagagaaaagagtgtcgcagatactacattcgagagaaaaggtgggaacggagggctgggcggagcgttgcagttaagtagtggtagcagcccacatccgcgcaggtggtagcataacttttgcgtgagtgcaggagagtttgctgcaccttgtaatcagtatggtatcgtgcgaatccttcgccctgatcacaaagtttactatttatgcgcacgcaggcga

SEQ ID NO: 11719 - protein, 142 aa, Triticum aestivum
  misc_feature (1)..(142): Ceres Seq. ID no. 13656469
DGATLLLKTIESGNDVLMETFRKAVAIPVHSPNVLTILKAVTNLFDNSCLHQWLKTHCAEIIDSFSSCKPSFSKSAHLAYATLLLNYSVLSIESKDEQSQAQILSAALEIAEDDAQDADSKYRALVANRLSYVERPGQVHRP

SEQ ID NO: 11720 - protein, 125 aa, Triticum aestivum
  misc_feature (1)..(125): Ceres Seq. ID no. 13656470
METFRKAVAIPVHSPNVLTILKAVTNLFDNSCLHQWLKTHCAEIIDSFSSCKPSFSKSAHLAYATLLLNYSVLSIESKDEQSQAQILSAALEIAEDDAQDADSKYRALVANRLSYVERPGQVHRP

SEQ ID NO: 11721 - protein, 78 aa, Triticum aestivum
  misc_feature (1)..(78): Ceres Seq. ID no. 13656471
MNKVRHRFFLRPLKLLKTMPKMPIRNTGRLLPIGSLMLNGLVKSIALDLDVKSVTSSAKASMDSKIAEVGADIELLTR

SEQ ID NO: 11722 - DNA, 1618 bp, Triticum aestivum
  misc_feature (1)..(1618): Ceres Seq. ID no. 13656547
acataaatcatttgatcagcctctcgcctcttcataaggtagctagctcgctcaatccatactaccactatccctctcgaccgtctccgctttatccaatttaggcacttgtgttcagctatctatcgagaaggataggagtagaaggaaggcgaccatggcaagcagcaccagcatcccagccaccaccttgggcgagatccgtgttgctcagcgtgcggatgggccggcggcgatgctggccatcggcacggctaacccgccccactgcgtgccccaggaagactaccccgactactacttcggcgtcaccaagagcgaccacctcaccgacctcaagcgcaccttcgccaaactatgcgggatgacgggcatcggcaggcgtttcttccaccacacggacgaactgctcgccacacacccggacttgtccctcgacgcccggctggacgtcgtggctactgccgccccagagctcgctgcgtcggctgcggcgaacgccatcgccgagtggggccgtccggcgggcgacatcacccatctcgtcgtcagcacgaacgctgggtcgcatgccccgggcaccgacgtccgcttggtctccctcctcggcctccgccatgatgtcctgcgcactgtgctccagctcaacggctgcgcttccggatgcgccgccctgcgcctagccaaagaccttgccgagaacaaccatggcgcgcgcgtcctcgtggcctgcgtcgagctcactatcaccgccttccgcgggcccgatgaggcggactccttcgacaccctcatcccccaggggctcttcggtgacggtgcaggcgccgccatcgtgggtgctgaaccctacgtccacgagcgcccgctgtttgagatggtgtcagcctcccagtacgtgataccagacaccgagcacatgctcaccatgcagctcggcagcggtggcatcggcgggaccattgccaccggactgccaagactggcggcgggcatcgttgagaagtgcttgctggatgcgtttggcgaccgcctagccggcatcggaggtgtcgtcgaatggaacaacctcttctgggccgtgcatcccggcagcagtgcgatgttggaccacatcgtcagggcactccggcttgctccggcgaagctggcggcgagcagaaccgtggtgagagagtacgggaacatgctgggcgccacggtgatcttcgtgctcgatgaggtcaggcgccaaagagaagatcctgaaggagagggagctagccatgatgaaggttggggggttatgatgggatttggaccggggttcactgtggagacgatgctgctgcatgccgctacctaggtaattagaaagaaggaataaaaaaacacatagcatatatatgttcaataaagtgcatgcaatgcaaccttttatatttccatatccacatatcacctatatatacgtacgtgtaagagatgtgaacatgtggtgtgacagtggtcaagtcctgtaagagtgatctgcagtatatggttataaataccacttcagctacttgtaggtttcaaaaaaaaaaaaaaaaaaaaaaaaaaccaaaaaaaaaaaaaaaaaagcttatcgataccgtcg

SEQ ID NO: 11723 - protein, 395 aa, Triticum aestivum
  misc_feature (1)..(395): Ceres Seq. ID no. 13656548
MASSTSIPATTLGEIRVAQRADGPAAMLAIGTANPPHCVPQEDYPDYYFGVTKSDHLTDLKRTFAKLCGMTGIGRRFFHHTDELLATHPDLSLDARLDVVATAAPELAASAAANAIAEWGRPAGDITHLVVSTNAGSHAPGTDVRLVSLLGLRHDVLRTVLQLNGCASGCAALRLAKDLAENNHGARVLVACVELTITAFRGPDEADSFDTLIPQGLFGDGAGAAIVGAEPYVHERPLFEMVSASQYVIPDTEHMLTMQLGSGGIGGTIATGLPRLAAGIVEKCLLDAFGDRLAGIGGVVEWNNLFWAVHPGSSAMLDHIVRALRLAPAKLAASRTVVREYGNMLGATVIFVLDEVRRQREDPEGEGASHDEGWGVMMGFGPGFTVETMLLHAAT

SEQ ID NO: 11724 - protein, 369 aa, Triticum aestivum
  misc_feature (1)..(369): Ceres Seq. ID no. 13656549
MLAIGTANPPHCVPQEDYPDYYFGVTKSDHLTDLKRTFAKLCGMTGIGRRFFHHTDELLATHPDLSLDARLDVVATAAPELAASAAANAIAEWGRPAGDITHLVVSTNAGSHAPGTDVRLVSLLGLRHDVLRTVLQLNGCASGCAALRLAKDLAENNHGARVLVACVELTITAFRGPDEADSFDTLIPQGLFGDGAGAAIVGAEPYVHERPLFEMVSASQYVIPDTEHMLTMQLGSGGIGGTIATGLPRLAAGIVEKCLLDAFGDRLAGIGGVVEWNNLFWAVHPGSSAMLDHIVRALRLAPAKLAASRTVVREYGNMLGATVIFVLDEVRRQREDPEGEGASHDEGWGVMMGFGPGFTVETMLLHAAT

SEQ ID NO: 11725 - protein, 326 aa, Triticum aestivum
  misc_feature (1)..(326): Ceres Seq. ID no. 13656550
MTGIGRRFFHHTDELLATHPDLSLDARLDVVATAAPELAASAAANAIAEWGRPAGDITHLVVSTNAGSHAPGTDVRLVSLLGLRHDVLRTVLQLNGCASGCAALRLAKDLAENNHGARVLVACVELTITAFRGPDEADSFDTLIPQGLFGDGAGAAIVGAEPYVHERPLFEMVSASQYVIPDTEHMLTMQLGSGGIGGTIATGLPRLAAGIVEKCLLDAFGDRLAGIGGVVEWNNLFWAVHPGSSAMLDHIVRALRLAPAKLAASRTVVREYGNMLGATVIFVLDEVRRQREDPEGEGASHDEGWGVMMGFGPGFTVETMLLHAAT

SEQ ID NO: 11726 - DNA, 575 bp, Triticum aestivum
  misc_feature (1)..(575): Ceres Seq. ID no. 13656565
agagcttgcatccaggcacatataccgagtacaccaatcagcaaccttcaagtatcctagtttaatctcgccgcgagcccgcgaagatgaagatggtgcttaaggtgccgatggtctgcaagaagtgcaagtcttgcgtccttacgattgtgtccaaggtcaaaggggtcaagtcgatggcatacgacgaggagaagagcacgctgacggtggtgggggatgtggacgtggtggtggtcgtcgacgcgctgcgcaaggggaagcacccggcgacggtggtgacggtgggcgacgagaagaaggagnnngaggannngaagaagaaggaggaagaggagaagaagaagaaggaggccgaggagaagaagaaaaaggaatgcatgcagaagcactgcctcaaggcttgctcgccgccactctactgccccaaggcttgctcgccgccacgccactgcccgccgccaccccactgcccgccgcaatcctactgctacgtcgacgactcggnnncctgcaccatcatgtgagcgagagggcagatcatcgacccggcgccgccgtatatatacagccga

SEQ ID NO: 11727 - protein, 146 aa, Triticum aestivum
  misc_feature (1)..(146): Ceres Seq. ID no. 13656566
  misc_feature (74)..(74): Xaa is any aa, unknown or other
  misc_feature (76)..(76): Xaa is any aa, unknown or other
  misc_feature (77)..(77): Xaa is any aa, unknown or other
  misc_feature (141)..(141): Xaa is any aa, unknown or other
  misc_feature (142)..(142): Xaa is any aa, unknown or other
MKMVLKVPMVCKKCKSCVLTIVSKVKGVKSMAYDEEKSTLTVVGDVDVVVVVDALRKGKHPATVVTVGDEKKEXEXXKKKEEEEKKKKEAEEKKKKECMQKHCLKACSPPLYCPKACSPPRHCPPPPHCPPQSYCYVDDSXXCTIM

SEQ ID NO: 11728 - protein, 144 aa, Triticum aestivum
  misc_feature (1)..(144): Ceres Seq. ID no. 13656567
  misc_feature (72)..(72): Xaa is any aa, unknown or other
  misc_feature (74)..(74): Xaa is any aa, unknown or other
  misc_feature (75)..(75): Xaa is any aa, unknown or other
  misc_feature (139)..(139): Xaa is any aa, unknown or other
  misc_feature (140)..(140): Xaa is any aa, unknown or other
MVLKVPMVCKKCKSCVLTIVSKVKGVKSMAYDEEKSTLTVVGDVDVVVVVDALRKGKHPATVVTVGDEKKEXEXXKKKEEEEKKKKEAEEKKKKECMQKHCLKACSPPLYCPKACSPPRHCPPPPHCPPQSYCYVDDSXXCTIM

SEQ ID NO: 11729 - protein, 138 aa, Triticum aestivum
  misc_feature (1)..(138): Ceres Seq. ID no. 13656568
  misc_feature (66)..(66): Xaa is any aa, unknown or other
  misc_feature (68)..(68): Xaa is any aa, unknown or other
  misc_feature (69)..(69): Xaa is any aa, unknown or other
  misc_feature (133)..(133): Xaa is any aa, unknown or other
  misc_feature (134)..(134): Xaa is any aa, unknown or other
MVCKKCKSCVLTIVSKVKGVKSMAYDEEKSTLTVVGDVDVVVVVDALRKGKHPATVVTVGDEKKEXEXXKKKEEEEKKKKEAEEKKKKECMQKHCLKACSPPLYCPKACSPPRHCPPPPHCPPQSYCYVDDSXXCTIM

SEQ ID NO: 11730 - DNA, 625 bp, Triticum aestivum
  misc_feature (1)..(625): Ceres Seq. ID no. 13656601
acacagatgcgccgctgccattccttgctcggcccaatcgccgactcccactccccactgcggccacagctccggcgagagggaatcgccggtcccggccatgcgggtgctcccgctggccctcgccgccgccatcttctccggcgtcacggccatcctcatctacctcaccgggctctcctcatatggcggcgcggggctctcggaggcggacctggcggcgctcgccgcgctgcagggagggttcagcaagtgcgtggatgctaatggtctaggactgcaagcgtttggcggagaagattactgtcgtgttgttatacagtacccgagtgacacggtttctaaatggacagatccaaaaactggagagtctgaagggttggcatttgagttcaatctctgcgaagctgtggcctcataggagcaggttcgcaacagtaccacaatactcacaaaagagtacattgatgcattaccaaatggctgggaggagtatgcatggcgcaggatcaacaaaggaatccttctgaataagtgcaagaacaggactctttgcatggagaagctttcattggttctccctgacacatcaccatatgtacctcagcaatttggtagctgtgcc

SEQ ID NO: 11731 - protein, 139 aa, Triticum aestivum
  misc_feature (1)..(139): Ceres Seq. ID no. 13656602
HRCAAAIPCSAQSPTPTPHCGHSSGERESPVPAMRVLPLALAAAIFSGVTAILIYLTGLSSYGGAGLSEADLAALAALQGGFSKCVDANGLGLQAFGGEDYCRVVIQYPSDTVSKWTDPKTGESEGLAFEFNLCEAVAS

SEQ ID NO: 11732 - protein, 106 aa, Triticum aestivum
  misc_feature (1)..(106): Ceres Seq. ID no. 13656603
MRVLPLALAAAIFSGVTAILIYLTGLSSYGGAGLSEADLAALAALQGGFSKCVDANGLGLQAFGGEDYCRVVIQYPSDTVSKWTDPKTGESEGLAFEFNLCEAVAS

SEQ ID NO: 11733 - protein, 90 aa, Triticum aestivum
  misc_feature (1)..(90): Ceres Seq. ID no. 13656604
TDAPLPFLARPNRRLPLPTAATAPARGNRRSRPCGCSRWPSPPPSSPASRPSSSTSPGSPHMAARGSRRRTWRRSPRCREGSASAWMLMV

SEQ ID NO: 11734 - DNA, 1686 bp, Triticum aestivum
  misc_feature (1)..(1686): Ceres Seq. ID no. 13656635
atcgcgtcgcatatcccctccctcccctctcatcacccacacccacgcggcagccggcttcaatttttccatctgctccccgtgctcttaatgggctttccctccctccgacatggccggcgacccccgcacccgcgccgccggtgaccactccctctccccctcctcccccgccgccgtcctcgtgcccgggggcggcctccgcctggggccctccaggctcttcctccacctgctcctcctccactcgctcttataaccccgcgcccccccgccgccaggccatggccgccgtcttctaccaccacgtcgtcggcgacctcaccgtcggcaagcccgagatcgccgagctcagcgacgcggacacgcttgacgacgcggcgcgggccatcgccggcagccccgagggcgccgtgcccgtctggcgcgcgcgggccgcccccgacgacccgccctccggggcccggttcctcggcatgatctccgccgtcgacatcgccgccttcctcgccggcgccggcgccggcgaccgcgccatgcgcgccgccgtcggcgaggtcgtgcagcccaaccaggacctgctccgggaggtcgatcccggcaccaggttgattgatgcgctggagttgatgaggaatggagtgaagcgcttccttgtccgcaagaacggctcctggacaggcatcaccaagcggttttctatgctttacaatgggaaatggatgaagaactcggaatcgggatccccaagctcagctggcagcagcagcatgcagttgtccccatttatcagttgcgcggagaggttttgctgcctgtcaagggaagacatcctccggttcctgatcgggtgcctcggcgccctcgcgcccatcccactgtctccaatctgtaccctcggagctatcaacccgcactactgccacgtcgaggcgtctgcgccagccatggaggcgatccagaagatccctggggacccctgcggcgtggccgtggttgagacgacatcggacggggtccgcaagatcatcggggacatctctgcctacaagctgtggaagtgtgactacgtggcggccgcgtgggcgctggcgaacctgtcggcggggcagtttgtcatcggcgccgacgagaacgggtcgacccccatctccgccttcccgctgccttccatcagctcgtcgttgtcggaggaggccaccgagcccgggcgctctcccaggctgcttaagaagttcagcagcaggaacatcgggttcctgaacagccaggcgaaccaggtgcggagcatgtaccggggccggagctcgccgctgatgtgccggagcacgagctccctggccgccgtcatggcgcagatgctgtcccaccgggcgactcacgtgtgggtgacggacgcggaggctgaggaggatgacgtcctcgttggcgtggtcgggtacacggacatctttgccgccgtcacccggagcagcgcctgaccgtcgacgacgtcctgatggcggtggcgtgtgtttgggtggtgtactataatttggggttagtttggtggttgtccagagctgagaactttgttttgggtgtgtgggcgtgtgagactgaatgggttgtgtattgttggatgtgcattcgttgttgatggtcctataataaggtagactcgggcctatttatgcctgggagtcc

SEQ ID NO: 11735 - protein, 492 aa, Triticum aestivum
  misc_feature (1)..(492): Ceres Seq. ID no. 13656636
RVAYPLPPLSSPTPTRQPASIFPSAPRALNGLSLPPTWPATPAPAPPVTTPSPPPPPPPSSCPGAASAWGPPGSSSTCSSSTRSYNPAPPRRQAMAAVFYHHVVGDLTVGKPEIAELSDADTLDDAARAIAGSPEGAVPVWRARAAPDDPPSGARFLGMISAVDIAAFLAGAGAGDRAMRAAVGEVVQPNQDLLREVDPGTRLIDALELMRNGVKRFLVRKNGSWTGITKRFSMLYNGKWMKNSESGSPSSAGSSSMQLSPFISCAERFCCLSREDILRFLIGCLGALAPIPLSPICTLGAINPHYCHVEASAPAMEAIQKIPGDPCGVAVVETTSDGVRKIIGDISAYKLWKCDYVAAAWALANLSAGQFVIGADENGSTPISAFPLPSISSSLSEEATEPGRSPRLLKKFSSRNIGFLNSQANQVRSMYRGRSSPLMCRSTSSLAAVMAQMLSHRATHVWVTDAEAEEDDVLVGVVGYTDIFAAVTRSSA

SEQ ID NO: 11736 - protein, 398 aa, Triticum aestivum
  misc_feature (1)..(398): Ceres Seq. ID no. 13656637
MAAVFYHHVVGDLTVGKPEIAELSDADTLDDAARAIAGSPEGAVPVWRARAAPDDPPSGARFLGMISAVDIAAFLAGAGAGDRAMRAAVGEVVQPNQDLLREVDPGTRLIDALELMRNGVKRFLVRKNGSWTGITKRFSMLYNGKWMKNSESGSPSSAGSSSMQLSPFISCAERFCCLSREDILRFLIGCLGALAPIPLSPICTLGAINPHYCHVEASAPAMEAIQKIPGDPCGVAVVETTSDGVRKIIGDISAYKLWKCDYVAAAWALANLSAGQFVIGADENGSTPISAFPLPSISSSLSEEATEPGRSPRLLKKFSSRNIGFLNSQANQVRSMYRGRSSPLMCRSTSSLAAVMAQMLSHRATHVWVTDAEAEEDDVLVGVVGYTDIFAAVTRSSA

SEQ ID NO: 11737 - protein, 334 aa, Triticum aestivum
  misc_feature (1)..(334): Ceres Seq. ID no. 13656638
MISAVDIAAFLAGAGAGDRAMRAAVGEVVQPNQDLLREVDPGTRLIDALELMRNGVKRFLVRKNGSWTGITKRFSMLYNGKWMKNSESGSPSSAGSSSMQLSPFISCAERFCCLSREDILRFLIGCLGALAPIPLSPICTLGAINPHYCHVEASAPAMEAIQKIPGDPCGVAVVETTSDGVRKIIGDISAYKLWKCDYVAAAWALANLSAGQFVIGADENGSTPISAFPLPSISSSLSEEATEPGRSPRLLKKFSSRNIGFLNSQANQVRSMYRGRSSPLMCRSTSSLAAVMAQMLSHRATHVWVTDAEAEEDDVLVGVVGYTDIFAAVTRSSA

SEQ ID NO: 11738 - DNA, 1270 bp, Triticum aestivum
  misc_feature (1)..(1270): Ceres Seq. ID no. 13656662
ccaaggccaggcgcggcaccgccactcccgcgcctccctcccctatggcacgtcctccctcccaggcctcggctgtcttctccgtcggcggcgagggcgccgcactcttcctctccgtcgccggcgagggcgccgcgccctaaactccgaggctactgagaacttcacagtatataacttgattgggagaggaagctgcggttcagtgtacagagcaaagctaaaccaaaaacagatggttgtggcagtgaaagtttttgaccttgacatgcaaggcgcggataaaagtttcatctcagaatgtaaagcactgagaaacattcggcaccgtaatcttcttccaattctgactgcatgctcaacaattgataaccaaggccgggatttcaaagctctagtctaccagttcatgcccaacggcaacctggacacttggctgcacccggcaggagatggaaaagccccaaagcaactggacctctctcaaagaatgaaaatagctgttgatatagccgatgcattgcaatatatacaccatgactgtgagaatcctattgttcactgtgatttgaagcccagcaatatcctcctagattatgatatgacagctcgtttgggggactttggcatcgcaaggttgtacatcaaatccaaatcagcggcagctggaggttcgagttcaatgggtacaataactctgaggggcacgattggatatattgctccagagtatgcgggaggtggctacctatcgacgtctggagacgcgtacagttttgggatagtgctgctggagatgctgacaggaagaaggccgaccgaccctatgttctgcgaggggcttgacatcgtgaactttgtcaagaggaactttccggatcagatacttgatatccttgacgcttctctccgagaagaatgtcaagactgttctcaggataatctggaaggagaaaacgaagtccaccggtgcctgctgtccttgctgaaagtggcactttcttgcgcaagccaggatcctaacgaacgaatgaacatgagagaagcagctactgaattgcacgcgatcgacacattgtatgtgtcttgaagcggatgctatgtgctagagctgtatcatacatacataccagctgatgtgaagcgtgtaactagagctgtatcgtacgttcgtactatagtggccgtgtagaacttttgtactcgaaaaatttatttgttgggctgtggctttgttcctagcctttgaaatgctcatctttttgcaaag

SEQ ID NO: 11739 - protein, 362 aa, Triticum aestivum
  misc_feature (1)..(362): Ceres Seq. ID no. 13656663
QGQARHRHSRASLPYGTSSLPGLGCLLRRRRGRRTLPLRRRRGRRALNSEATENFTVYNLIGRGSCGSVYRAKLNQKQMVVAVKVFDLDMQGADKSFISECKALRNIRHRNLLPILTACSTIDNQGRDFKALVYQFMPNGNLDTWLHPAGDGKAPKQLDLSQRMKIAVDIADALQYIHHDCENPIVHCDLKPSNILLDYDMTARLGDFGIARLYIKSKSAAAGGSSSMGTITLRGTIGYIAPEYAGGGYLSTSGDAYSFGIVLLEMLTGRRPTDPMFCEGLDIVNFVKRNFPDQILDILDASLREECQDCSQDNLEGENEVHRCLLSLLKVALSCASQDPNERMNMREAATELHAIDTLYVS

SEQ ID NO: 11740 - protein, 284 aa, Triticum aestivum
  misc_feature (1)..(284): Ceres Seq. ID no. 13656664
MVVAVKVFDLDMQGADKSFISECKALRNIRHRNLLPILTACSTIDNQGRDFKALVYQFMPNGNLDTWLHPAGDGKAPKQLDLSQRMKIAVDIADALQYIHHDCENPIVHCDLKPSNILLDYDMTARLGDFGIARLYIKSKSAAAGGSSSMGTITLRGTIGYIAPEYAGGGYLSTSGDAYSFGIVLLEMLTGRRPTDPMFCEGLDIVNFVKRNFPDQILDILDASLREECQDCSQDNLEGENEVHRCLLSLLKVALSCASQDPNERMNMREAATELHAIDTLYVS

SEQ ID NO: 11741 - protein, 273 aa, Triticum aestivum
  misc_feature (1)..(273): Ceres Seq. ID no. 13656665
MQGADKSFISECKALRNIRHRNLLPILTACSTIDNQGRDFKALVYQFMPNGNLDTWLHPAGDGKAPKQLDLSQRMKIAVDIADALQYIHHDCENPIVHCDLKPSNILLDYDMTARLGDFGIARLYIKSKSAAAGGSSSMGTITLRGTIGYIAPEYAGGGYLSTSGDAYSFGIVLLEMLTGRRPTDPMFCEGLDIVNFVKRNFPDQILDILDASLREECQDCSQDNLEGENEVHRCLLSLLKVALSCASQDPNERMNMREAATELHAIDTLYVS

SEQ ID NO: 11742 - DNA, 1292 bp, Triticum aestivum
  misc_feature (1)..(1292): Ceres Seq. ID no. 13656671
ctcgcgggtccggtccacaatttttttcctcgcataaatcatcctccgtcaccggcggggcgagggagacgcggtcggcgggcgagacgccagagacaaacccaacggagtttcccccccctgccgccgaccccaaaccctagccgctcctaccagccccagcctctcctaccgaccccagccagccgcgccggaattctcctgggtgttctattggcttttctcaagcctgtagcttcatcgcggcagcatgagctctgctggttctgcaagggttccaaagaggagacggactaccaagacgtcggaggctgcagaccggcaacttcaggagcgacagtttctggacctaaacttgtttccagctgttgaagtagccagcactgggggttcactctccatcaatgagcctgtctcacacaggcagccccctcctacggtggctgccctgctttacgagaccacacaggtcatggtgtcatctgctgctgcagagtcaaacattggcatgaatagtttccccatcaacgtggaagtgattgatgatgatgttgtgatttatacctcagggccgccccctcaagctaggcaacagtcgtccaggacaggacctatcactgtgataatagatgatgattctgaaactactgctggaccagcaggggaaggtcttgatgagcatgtgaacactctgctgtctctggggatgaaccctaggcacaatccctcgagagcacaacccaacaccgaccttgtaataaacatagtagacacacctgaaaccaacagcataccgcccaaggtggcgcaggctgtccctgaacctgtgaaggagatcccaaaggaaacaaagttcagctgcccagtctgcatgaatgagctggtcaatgcatcatcgaccatctgcggccacatcttctgccagaaatgcatcaaggcctccattcaggctcagaagaagtgccctacctgccggaggaagctgaccatgagcaacttccaccgggtctacctcccgacggcagataattaaacctatccgcaatacttggagctttagagccgtggcagctgtgacccttttttggcactggcattgtggtgattgtatctgagctattcttcacagggtcatcatgaacattcagttttccccccaacaatttaacaagtgctcgagacgtgattaccaatctgcatacctggtggtagtggacactgttagtagtcttccttgtgggaaagtggaaacctgtgcttggtactgtgagattaatgcttgaaaatatttg

SEQ ID NO: 11743 - protein, 260 aa, Triticum aestivum
  misc_feature (1)..(260): Ceres Seq. ID no. 13656672
MSSAGSARVPKRRRTTKTSEAADRQLQERQFLDLNLFPAVEVASTGGSLSINEPVSHRQPPPTVAALLYETTQVMVSSAAAESNIGMNSFPINVEVIDDDVVIYTSGPPPQARQQSSRTGPITVIIDDDSETTAGPAGEGLDEHVNTLLSLGMNPRHNPSRAQPNTDLVINIVDTPETNSIPPKVAQAVPEPVKEIPKETKFSCPVCMNELVNASSTICGHIFCQKCIKASIQAQKKCPTCRRKLTMSNFHRVYLPTADN

SEQ ID NO: 11744 - protein, 186 aa, Triticum aestivum
  misc_feature (1)..(186): Ceres Seq. ID no. 13656673
MVSSAAAESNIGMNSFPINVEVIDDDVVIYTSGPPPQARQQSSRTGPITVIIDDDSETTAGPAGEGLDEHVNTLLSLGMNPRHNPSRAQPNTDLVINIVDTPETNSIPPKVAQAVPEPVKEIPKETKFSCPVCMNELVNASSTICGHIFCQKCIKASIQAQKKCPTCRRKLTMSNFHRVYLPTADN

SEQ ID NO: 11745 - protein, 174 aa, Triticum aestivum
  misc_feature (1)..(174): Ceres Seq. ID no. 13656674
MNSFPINVEVIDDDVVIYTSGPPPQARQQSSRTGPITVIIDDDSETTAGPAGEGLDEHVNTLLSLGMNPRHNPSRAQPNTDLVINIVDTPETNSIPPKVAQAVPEPVKEIPKETKFSCPVCMNELVNASSTICGHIFCQKCIKASIQAQKKCPTCRRKLTMSNFHRVYLPTADN

SEQ ID NO: 11746 - DNA, 1301 bp, Triticum aestivum
  misc_feature (1)..(1301): Ceres Seq. ID no. 13656794
attacatagaacatcctaatcgaaaatataattctatgttctgttttacatcgttgggtgcacaagttgatcatagtatcaatgttggaggtgctccatacgttttcaagatgaatggggtggtttaccatcgtattggttcgttgttgccggctggcggtgcaccaccaaagtttgcgcaactgtatatgatggattctgctgacgagttggactgtaggttgaatgtgtttgacagagaagaaactagctcacttgagcccgatcctgaaattgtttcttcattgatagacatgcttaatatgcatcaccgtctggtgcacaaatttagaattgcacgacagagtctgtgtactcctggtgtttctgatgtctcaattcgtttcttgagcagcgatggcggtgctcatggtacgcgtttctccggtcctaccacttctgaagtggctgcgcttatagttggtgatctcatggatagtgcaagcatccagccctgaaatttaatcatggaaatggaaatagttcgcaggaaaatcttatgatttatatctcaagacggccaatgcttgaaaagttagtgaaacaattgggttgaaagtacaaggatatacatattggtacgtccatcaaggtatgatgcaagcatctgtactaattggcctaccacgccaagaagatagttttagagaatcttccatcacatatgaaggggaggcagctaatagagaagatgaagcaatggagaaagcagtctcaagtggccttagaatgtatttgtgcagactataatatttctgtcaatgatcacaattactatgcccttgaagtcacaaaagaaagattgcttacaacaagagagaaagctcaaacaaaacaatggcagttcaacatggcgcgccagcaaataactatgcagcagaatgaatttgcaagacaaacaatgattctggcaaagatatgcaatagcttttttgatatactgccacttcgtatgtacccccagcgtccagaaagcagtgatcccattattacatacacaggcgcacaccctcccatcggacgtatggaagaacttgcaaaatcactttatcactttatcacaggcaccaatcctgcaggaggctacaccagaatgatctaatttactatcaactacttctagcttatctacgtaatatgtttgtgtttctatatacagttctctgtctgcagcgagttgtatgtagtttaaataatttgtttgcctcaagtgtgtaccacttttaatttgcagctttgtaaccctgcatttwcarcmttyt

SEQ ID NO: 11747 - protein, 164 aa, Triticum aestivum
  misc_feature (1)..(164): Ceres Seq. ID no. 15219851
YIEHPNRKYNSMFCFTSLGAQVDHSINVGGAPYVFKMNGVVYHRIGSLLPAGGAPPKFAQLYMMDSADELDCRLNVFDREETSSLEPDPEIVSSLIDMLNMHHRLVHKFRIARQSLCTPGVSDVSIRFLSSDGGAHGTRFSGPTTSEVAALIVGDLMDSASIQP

SEQ ID NO: 11748 - protein, 153 aa, Triticum aestivum
  misc_feature (1)..(153): Ceres Seq. ID no. 15219852
MFCFTSLGAQVDHSINVGGAPYVFKMNGVVYHRIGSLLPAGGAPPKFAQLYMMDSADELDCRLNVFDREETSSLEPDPEIVSSLIDMLNMHHRLVHKFRIARQSLCTPGVSDVSIRFLSSDGGAHGTRFSGPTTSEVAALIVGDLMDSASIQP

SEQ ID NO: 11749 - protein, 145 aa, Triticum aestivum
  misc_feature (1)..(145): Ceres Seq. ID no. 15219853
MKGRQLIEKMKQWRKQSQVALECICADYNISVNDHNYYALEVTKERLLTTREKAQTKQWQFNMARQQITMQQNEFARQTMILAKICNSFFDILPLRMYPQRPESSDPIITYTGAHPPIGRMEELAKSLYHFITGTNPAGGYTRMI

SEQ ID NO: 11750 - DNA, 1351 bp, Triticum aestivum
  misc_feature (1)..(1351): Ceres Seq. ID no. 13656797
cattagatactgtgagccttctcctcctcatccgtgacactagcatcatcccatcccatggtgatcgggcaaaaaaatgcggagggttcgatccaacggtcatgcctaccccgtctgctctgcgcgcgggagcagtactccgcattgctccttttcgtggccgtggccgccgtctgcctcctcgtcgtggttggcagtggcacatacgcgctatcgtctccggccgacgtcggcggcgagatggagcagaggttcttcaacatatttcctcgccaagcagcggccggcgcctcggacgatgaactggaggcggcgctgcgcggcgcggccgacgcgaacaggacgctgatcgtgagcgtgctgaacaaggcgtacgccgaggagggcggcctgctggaccttttcatcgagagcctgaagcaaggggagggcaccgggcatctcatcggccacgtcctccttgtagccatggacgaaccagccttccgcaggtgcagtggcctcggcggcgtccggtgctacctccttcccccggcggccgcgaccaacagcaccaacctctcctcggagcagctctacatgtctggcggcttcatacgcatgatgtggcggcgcattcgcctcctcggcgacatcctcaagcacggctacagcttcatattcaccgatatggatgtgatgtggctgaggaacccgttcccgagcctgaatcgcaccgaggaggaagacctcctgatcagcaccgacggattcaaggggcggccggaggactacctcggccacgagctcaacacgaggttcttcttcgtggccgcgagcaaccggacggcggcgatgttcgacgagtggcacgcggcacgggaggcgtcggaaggcatgaaggagcaggacgtgctaaaccagatgaagcaacaaggcgcgttccgccggctcggcgtgagggtgcgcgtcctggacacggcgcgcttcagcggcttctgccaggacagccaggacgcccggcaggtggtcaccgtgcacgccaactgctgccggaccatgcgggccaaggtcgccgacctcaaggccgttcttggcgccgccaagcagctcaacgggacgacggggcggctgaaatggccgcgtcattcagcctgcttgggatcgtggaggaagtgagacgaggaagcgctcgttcgaggcttcaccttgtctcccttatctcgtttccattgctttacttaccattcgtcactttactgctggtaagatgttttggtttgttggcatgaggaaagaaaaacacccaaaacatcttgctgagtagtaccaagttatcacttatcacatagtacttccttctggaggggtg

SEQ ID NO: 11751 - protein, 366 aa, Triticum aestivum
  misc_feature (1)..(366): Ceres Seq. ID no. 15219854
MVIGQKNAEGSIQRSCLPRLLCAREQYSALLLFVAVAAVCLLVVVGSGTYALSSPADVGGEMEQRFFNIFPRQAAAGASDDELEAALRGAADANRTLIVSVLNKAYAEEGGLLDLFIESLKQGEGTGHLIGHVLLVAMDEPAFRRCSGLGGVRCYLLPPAAATNSTNLSSEQLYMSGGFIRMMWRRIRLLGDILKHGYSFIFTDMDVMWLRNPFPSLNRTEEEDLLISTDGFKGRPEDYLGHELNTRFFFVAASNRTAAMFDEWHAAREASEGMKEQDVLNQMKQQGAFRRLGVRVRVLDTARFSGFCQDSQDARQVVTVHANCCRTMRAKVADLKAVLGAAKQLNGTTGRLKWPRHSACLGSWRK

SEQ ID NO: 11752 - protein, 305 aa, Triticum aestivum
  misc_feature (1)..(305): Ceres Seq. ID no. 15219855
MEQRFFNIFPRQAAAGASDDELEAALRGAADANRTLIVSVLNKAYAEEGGLLDLFIESLKQGEGTGHLIGHVLLVAMDEPAFRRCSGLGGVRCYLLPPAAATNSTNLSSEQLYMSGGFIRMMWRRIRLLGDILKHGYSFIFTDMDVMWLRNPFPSLNRTEEEDLLISTDGFKGRPEDYLGHELNTRFFFVAASNRTAAMFDEWHAAREASEGMKEQDVLNQMKQQGAFRRLGVRVRVLDTARFSGFCQDSQDARQVVTVHANCCRTMRAKVADLKAVLGAAKQLNGTTGRLKWPRHSACLGSWRK

SEQ ID NO: 11753 - protein, 229 aa, Triticum aestivum
  misc_feature (1)..(229): Ceres Seq. ID no. 15219856
MDEPAFRRCSGLGGVRCYLLPPAAATNSTNLSSEQLYMSGGFIRMMWRRIRLLGDILKHGYSFIFTDMDVMWLRNPFPSLNRTEEEDLLISTDGFKGRPEDYLGHELNTRFFFVAASNRTAAMFDEWHAAREASEGMKEQDVLNQMKQQGAFRRLGVRVRVLDTARFSGFCQDSQDARQVVTVHANCCRTMRAKVADLKAVLGAAKQLNGTTGRLKWPRHSACLGSWRK

SEQ ID NO: 11754 - DNA, 541 bp, Triticum aestivum
  misc_feature (1)..(541): Ceres Seq. ID no. 13656827
aagctcactcaaacacagccacacaacactatcactcaaacaaagccgcacaagttagactatctccttgccagtactattacaagagcctcccagttaacaatgacaaagtgcctcgccgtcgcgcttctgctactggtggcgctcgcgtactgtgacggcagggagctgaaccagaaggatcaggcactagcaacgccacgcggtgccggtgccggtggtgccgtcgacgagtcgaaggtgctggggctgccagacctgccggtcgtcggaaccgttaccggtaccagcaccattaccggcccgctggtggtgcttccagggatccctgctcacccatgatcatctcgagttcatgtgcttacaagatgaagctgtccttgtggcttcagactttaggctctagctagcaccgtccggaggaaaaacgctggcgtttcgctcatgcccatgctccttaatgggcgtctgtatcaaccatcctgtcatctgtatttctttgcagttctttgttccagtaattttcgttccttgatgtgcc

SEQ ID NO: 11755 - protein, 113 aa, Triticum aestivum
  misc_feature (1)..(113): Ceres Seq. ID no. 13656828
KLTQTQPHNTITQTKPHKLDYLLASTITRASQLTMTKCLAVALLLLVALAYCDGRELNQKDQALATPRGAGAGGAVDESKVLGLPDLPVVGTVTGTSTITGPLVVLPGIPAHP

SEQ ID NO: 11756 - protein, 79 aa, Triticum aestivum
  misc_feature (1)..(79): Ceres Seq. ID no. 13656829
MTKCLAVALLLLVALAYCDGRELNQKDQALATPRGAGAGGAVDESKVLGLPDLPVVGTVTGTSTITGPLVVLPGIPAHP

SEQ ID NO: 11757 - DNA, 825 bp, Triticum aestivum
  misc_feature (1)..(825): Ceres Seq. ID no. 13656837
cccggtatagttccaactctgtggctgccattgccttcagtgttccttggccctaacatcgctggccttctatccctagtgggactcgactgcatctttaacatgggagcaatgctgttcttccttatggccgacgcgtgcgggcgtccagagaacaattcgttcgacctgacaaggcagatcccaacttcttacagaatgtggaatctaatcgccagcgtactaggcttcgttgctcctctggccctgcttttcgcgtctcatcagggagctctgcagccgcatctaccattcattccgttcttggtgctgcttgggccatacctgttactactttcagtgcagatgctgaccgagacgcttacatggcactggaaatcgcctgtctggttggtggcccccgtcgtttacgagggctatcgggtgctgcagctgatgaggggcctccagctggccggcgagatcgctgcgcccgggtggatggtgcagagccttcgtggcttggtgtcctggtgggtgctggtccttgggattcagttgatgcgcgttgcctggttcgctgggctcagtttcgcaagcaatccgagctacggagtgagcgatgatgtgaacagataggtttcttcgtgctgctgtgcttctgctgctcactgcacgatagaatgggtgccatgttagttctggtgcatctgcatctgtcagatgcagtgcacgtagaataaaaagtgttttgaccgatagaaacttcgaatcgtgcatctgctgtggtatacagataaaatggaaattgtacatcaccgtgatgctgaacagcggtgaataaga

SEQ ID NO: 11758 - protein, 205 aa, Triticum aestivum
  misc_feature (1)..(205): Ceres Seq. ID no. 13656838
PGIVPTLWLPLPSVFLGPNIAGLLSLVGLDCIFNMGAMLFFLMADACGRPENNSFDLTRQIPTSYRMWNLIASVLGFVAPLALLFASHQGALQPHLPFIPFLVLLGPYLLLLSVQMLTETLTWHWKSPVWLVAPVVYEGYRVLQLMRGLQLAGEIAAPGWMVQSLRGLVSWWVLVLGIQLMRVAWFAGLSFASNPSYGVSDDVNR

SEQ ID NO: 11759 - protein, 171 aa, Triticum aestivum
  misc_feature (1)..(171): Ceres Seq. ID no. 13656839
MGAMLFFLMADACGRPENNSFDLTRQIPTSYRMWNLIASVLGFVAPLALLFASHQGALQPHLPFIPFLVLLGPYLLLLSVQMLTETLTWHWKSPVWLVAPVVYEGYRVLQLMRGLQLAGEIAAPGWMVQSLRGLVSWWVLVLGIQLMRVAWFAGLSFASNPSYGVSDDVNR

SEQ ID NO: 11760 - protein, 168 aa, Triticum aestivum
  misc_feature (1)..(168): Ceres Seq. ID no. 13656840
MLFFLMADACGRPENNSFDLTRQIPTSYRMWNLIASVLGFVAPLALLFASHQGALQPHLPFIPFLVLLGPYLLLLSVQMLTETLTWHWKSPVWLVAPVVYEGYRVLQLMRGLQLAGEIAAPGWMVQSLRGLVSWWVLVLGIQLMRVAWFAGLSFASNPSYGVSDDVNR

SEQ ID NO: 11761 - DNA, 1319 bp, Triticum aestivum
  misc_feature (1)..(1319): Ceres Seq. ID no. 13656856
agaacatcctaattgaaaagagttctgattagtggctttgtgatgcaatcccagttgaagtgcagaacctttccggagtttggactttgggaacttcgaatcatcatcagccgagaaagagaaaagttgcccacgaacacacgaaaaagagccccatcatgactaggctcgctcctcctgttgctttccggccctgtctctctgtattgcacgaacttttagcgcgtaacatttactctcttatattatctgcgatctgaatcttgctgctgatttgctgagactttctgtttgtgcttcatgcagagcgggagatcggcgccgcgcctgagcccgtcgtgtacacgccgccggcgccgctgatgccgtccccgccctcggtcaacggcgccaatgtcagtgccagcaccagcagcgtcgcggccacgtcgcagagcctcctcggcagcatgttcgcgccgtcttccgtggcccagacggcgcagtatccggagcgcgcgctggcagccaagcccccgtcgctgtgcctcgcgaccgacgccgcgtccgcccagttctcggcccctacggctgaccggcagcagcagctcgtgcagccgccgccgtcgccgtccccatcggcgcacatgtccgccacggcgctgcttcagaaggcggcgcagatgggcgccacctcgtcgagctcctcgttcctgcgtgggctgggcctcgacatctcgtcgtcgccgccgggcgtcgacgtcgtcaggtcagcatcaacagcagcaccaccaccaccagcaacaccaccaggagcccatgcagatgcagttcccggagggttcgctgcagcaatggccgccgcggttggagcccgagccggccccgatgatgtcggccgggctgggcctcgggctgccatacgactcgaccggcggtccgatggggttgccggagctcatgatgggccagtcatcactgttcagcgccaagccggccacgctggacttcctggggctggggatgagccccacgggggcgaccacgagcaggggcctccccgtgttcatgcagcccatgggcggcgcggtcggcatggcccggaccggctccggccctccagacacgttcggctccggccggggcgctcaggccaagccgtgggagaggaacccgagcagctcgccgatcctgtaaaaggactgctgggaaagtagtaacacgtagcacagcagctgtaaaatgctgcttgtgtctaattagcagcagctagtcgtcagtccttggccgttcttttgttttcttaggtcacaatcaagaaagtaagttacttttgttcc

SEQ ID NO: 11762 - protein, 277 aa, Triticum aestivum
  misc_feature (1)..(277): Ceres Seq. ID no. 15220591
MPSPPSVNGANVSASTSSVAATSQSLLGSMFAPSSVAQTAQYPERALAAKPPSLCLATDAASAQFSAPTADRQQQLVQPPPSPSPSAHMSATALLQKAAQMGATSSSSSFLRGLGLDISSSPPGVDVVRSASTAAPPPPATPPGAHADAVPGGFAAAMAAAVGARAGPDDVGRAGPRAAIRLDRRSDGVAGAHDGPVITVQRQAGHAGLPGAGDEPHGGDHEQGPPRVHAAHGRRGRHGPDRLRPSRHVRLRPGRSGQAVGEEPEQLADPVKGLLGK

SEQ ID NO: 11763 - protein, 260 aa, Triticum aestivum
  misc_feature (1)..(260): Ceres Seq. ID no. 15220592
MSVPAPAASRPRRRASSAACSRRLPWPRRRSIRSARWQPSPRRCASRPTPRPPSSRPLRLTGSSSSCSRRRRRPHRRTCPPRRCFRRRRRWAPPRRAPRSCVGWASTSRRRRRASTSSGQHQQQHHHHQQHHQEPMQMQFPEGSLQQWPPRLEPEPAPMMSAGLGLGLPYDSTGGPMGLPELMMGQSSLFSAKPATLDFLGLGMSPTGATTSRGLPVFMQPMGGAVGMARTGSGPPDTFGSGRGAQAKPWERNPSSSPIL

SEQ ID NO: 11764 - protein, 248 aa, Triticum aestivum
  misc_feature (1)..(248): Ceres Seq. ID no. 15220593
MFAPSSVAQTAQYPERALAAKPPSLCLATDAASAQFSAPTADRQQQLVQPPPSPSPSAHMSATALLQKAAQMGATSSSSSFLRGLGLDISSSPPGVDVVRSASTAAPPPPATPPGAHADAVPGGFAAAMAAAVGARAGPDDVGRAGPRAAIRLDRRSDGVAGAHDGPVITVQRQAGHAGLPGAGDEPHGGDHEQGPPRVHAAHGRRGRHGPDRLRPSRHVRLRPGRSGQAVGEEPEQLADPVKGLLGK

SEQ ID NO: 11765 - DNA, 826 bp, Triticum aestivum
  misc_feature (1)..(826): Ceres Seq. ID no. 13656871
tagaacatcataatcgaaaacccgatcgcatcctggtcacggactcacgggcccttgtgacgcgatgctgcgcagcttccctcaggcccgtccgctcctcaggaggatggggttcgacaagagggatgcctacttctttaagcagattggcaagggcatgctctgcacctacgcgcttttcggcgcagcatggctctggaatgagacgtcgccgcttggttggtggacgctcaagccactccccaaggaagaaaaagaaatggcacatctttatgagcgcagggagtttccctaccctggtgatgaagaggcagttgaggagttcataaaaagtgagggtgctctaggtaccacgatcgggcccaaaggttttgcggatacaaatgtggactctgataaaatgcagaagcaactacagtcgaaaaagtttgaccaggaggcacaaaacctctggttccgaatgaggaatgaggttgcacatgaactacaagagaagggatttggtgttgaatgaagttttattcttctgaaaggagaagtgaaatggtgtcatgctagagttatctttggaccgtctcagctctgctaattgacacatcagctagtaacttagaataaatgcaaataggaaacatggagcttatgctacgattatcctcctttttcccgctctctgcctgggctctatcttattctatggcaaatgtctttgcagagcatctacgttgtgtcatgtcatgccaatattaatcttgttggcttgttccatttcttctgttactgatttctgatctttaagacatgttatcaaccagttgttgagtcc

SEQ ID NO: 11766 - protein, 149 aa, Triticum aestivum
  misc_feature (1)..(149): Ceres Seq. ID no. 15220594
MLRSFPQARPLLRRMGFDKRDAYFFKQIGKGMLCTYALFGAAWLWNETSPLGWWTLKPLPKEEKEMAHLYERREFPYPGDEEAVEEFIKSEGALGTTIGPKGFADTNVDSDKMQKQLQSKKFDQEAQNLWFRMRNEVAHELQEKGFGVE

SEQ ID NO: 11767 - protein, 135 aa, Triticum aestivum
  misc_feature (1)..(135): Ceres Seq. ID no. 15220595
MGFDKRDAYFFKQIGKGMLCTYALFGAAWLWNETSPLGWWTLKPLPKEEKEMAHLYERREFPYPGDEEAVEEFIKSEGALGTTIGPKGFADTNVDSDKMQKQLQSKKFDQEAQNLWFRMRNEVAHELQEKGFGVE

SEQ ID NO: 11768 - protein, 118 aa, Triticum aestivum
  misc_feature (1)..(118): Ceres Seq. ID no. 15220596
MLCTYALFGAAWLWNETSPLGWWTLKPLPKEEKEMAHLYERREFPYPGDEEAVEEFIKSEGALGTTIGPKGFADTNVDSDKMQKQLQSKKFDQEAQNLWFRMRNEVAHELQEKGFGVE

SEQ ID NO: 11769 - DNA, 828 bp, Triticum aestivum
  misc_feature (1)..(828): Ceres Seq. ID no. 13656872
atgaaaacacgttatcatatgaatgatgcagctggaacagtaaatgagattggctcaacaatccggaaggtgatgggtggaacaagtggaatcctgtatgacatactctgcaaggctgcatatgcaagcttaaaacaaaacaaaaatattacggcatatgaatgggctgatgctttagaagcttctattgctgctgttagcaaatatggtggtgccaatgcaggataccgcacgatgttggatgctctaattcccgcttctacagttttgaaacagtctcttaaagccggggatgatccggtgactgcatttatcgcttctgctgaagcagcagcagctggtgctgaatccactaaacaaatgcaagcaaaggcaggacggtcatcgtacatttctccagaccacctggtttcaattcctgacccaggagcaatggctgcagctgcatggtaccgagccgcagcgctttcggtgaagaacaagctgcatgcttcagaaagctagtagtagtgcatgctatgcatgcctccttcacagtccaaaatactatactgacggtgaaatcctcaggggcctttgtcaatccctctgatttgatttccgcttgtgctttgcatgggccgagaaatcgagttccgtattgttttgtgctgagagcagttcaaaggatttgtagacgtttacaaaggttgagtgaaactatgcttttgccttactggtgaagtgatgatgatctgtgtgtgtgcgcgcgccgtgtggtcaattgtgttgatactaacgattgttgtctatttttacctgaacggcctgaatcacatcagttcttcc

SEQ ID NO: 11770 - protein, 167 aa, Triticum aestivum
  misc_feature (1)..(167): Ceres Seq. ID no. 15220597
MKTRYHMNDAAGTVNEIGSTIRKVMGGTSGILYDILCKAAYASLKQNKNITAYEWADALEASIAAVSKYGGANAGYRTMLDALIPASTVLKQSLKAGDDPVTAFIASAEAAAAGAESTKQMQAKAGRSSYISPDHLVSIPDPGAMAAAAWYRAAALSVKNKLHASES

SEQ ID NO: 11771 - protein, 161 aa, Triticum aestivum
  misc_feature (1)..(161): Ceres Seq. ID no. 15220598
MNDAAGTVNEIGSTIRKVMGGTSGILYDILCKAAYASLKQNKNITAYEWADALEASIAAVSKYGGANAGYRTMLDALIPASTVLKQSLKAGDDPVTAFIASAEAAAAGAESTKQMQAKAGRSSYISPDHLVSIPDPGAMAAAAWYRAAALSVKNKLHASES

SEQ ID NO: 11772 - protein, 143 aa, Triticum aestivum
  misc_feature (1)..(143): Ceres Seq. ID no. 15220599
MGGTSGILYDILCKAAYASLKQNKNITAYEWADALEASIAAVSKYGGANAGYRTMLDALIPASTVLKQSLKAGDDPVTAFIASAEAAAAGAESTKQMQAKAGRSSYISPDHLVSIPDPGAMAAAAWYRAAALSVKNKLHASES

SEQ ID NO: 11773 - DNA, 1258 bp, Triticum aestivum
  misc_feature (1)..(1258): Ceres Seq. ID no. 13656983
aacctcgcaacgcaccagcgccaagtacatccattggccacccacccaccccacacacgacctccacccccactacactccactccgcgagtagctagctagcaagagagtcccagctgccactgctcctctcctagaggcactcaggcgagctactctgcctgcggcggcctgccggcgcgcggggagggggagttggccggccagtgggggcgcgtgaggacaatgcatggcatgtgttaacatgtacaacccggagcaccaccagtcgtccttcatggcgccgcggatgtccttctccagcgacttcgcgctggagccgccgcccgcgtcggcgccgtcggcgcgcgggcccggggacgccgacttcgagttctccgtcggcagccgccccatgatggccgccgacgagctcttctccaagggccgcctcctgccgctccgggaggccccgcacggccagagcggccggcccacgacgctgcgcgaggagctgcgcaccgacgaccgccacgggcgcgcgccccgcgcgcccaacatccggtggaaggagctgctcggcttcaagaaggcgaacaagaaggccgcggccgcagccgccgacgccggcgccagcacgtcgtcggccgaggccgcagccgccgacgccggcgccagcacgtcgtcggccgaggcccacacggatcttggaggtcacggaggcacgagagagtgaagcagcgagcgctcattcaccaaacgagacgggggcatggttaggcaactagtttgtgtgattgggtggtgatttgcctttcagcttcacgtccatcacctacccgcggtgaagatggatctgccaggaacccaacatccatcagcgcttcattggagaagcagcaagcaaattgaagctgtagctagctctggaggccatgcatgcatgaatgtgcatttcattttactgcctgctgcttgttaccctttttttgttattattattattatttcggtgtagtaaaagggaatttttgctcctgctttagctcttggtctggtcgtcgacgggtggttccattgcatcgcatgtagatgtagtagtagtggtcaaggtaactcctctctagtctctagtctctagtctctagtctaggtgtggctctgaatgttttgtatcggaggaaggggccagttaaatgcagtagcagtatttacaaaaaaaaaaaaaaaaaagcttatcgataccgtcgacctccgagggggggggcccgggtaccca

SEQ ID NO: 11774 - protein, 161 aa, Triticum aestivum
  misc_feature (1)..(161): Ceres Seq. ID no. 15219857
MACVNMYNPEHHQSSFMAPRMSFSSDFALEPPPASAPSARGPGDADFEFSVGSRPMMAADELFSKGRLLPLREAPHGQSGRPTTLREELRTDDRHGRAPRAPNIRWKELLGFKKANKKAAAAAADAGASTSSAEAAAADAGASTSSAEAHTDLGGHGGTRE

SEQ ID NO: 11775 - protein, 156 aa, Triticum aestivum
  misc_feature (1)..(156): Ceres Seq. ID no. 15219858
MYNPEHHQSSFMAPRMSFSSDFALEPPPASAPSARGPGDADFEFSVGSRPMMAADELFSKGRLLPLREAPHGQSGRPTTLREELRTDDRHGRAPRAPNIRWKELLGFKKANKKAAAAAADAGASTSSAEAAAADAGASTSSAEAHTDLGGHGGTRE

SEQ ID NO: 11776 - protein, 145 aa, Triticum aestivum
  misc_feature (1)..(145): Ceres Seq. ID no. 15219859
MAPRMSFSSDFALEPPPASAPSARGPGDADFEFSVGSRPMMAADELFSKGRLLPLREAPHGQSGRPTTLREELRTDDRHGRAPRAPNIRWKELLGFKKANKKAAAAAADAGASTSSAEAAAADAGASTSSAEAHTDLGGHGGTRE

SEQ ID NO: 11777 - DNA, 633 bp, Triticum aestivum
  misc_feature (1)..(633): Ceres Seq. ID no. 13657006
cattacctagaacatcctaatcgaaacctatactggcattttccgtcaagaactccagaagagatatcatctcaagaactccccatgcgacccatgcatggcccactgctgcctgcactggtgcgccaactgccaggagcaccgcgagaggagaggccgcctggccgaccacagcgccatgcccatgaccgtcgtcaacccgccccccgtgcaagagatgagcatgtcagagaaccacgccgcccccgcccctgcccctgccaacccggagaccaatggagcatcgaatagggctgagctggaagcgcgcaagagcgaccacgacgacgtcgaggtcatccctctatagaccaaccaaagaaagaaaaataaagccaatggaattttgatataccgaagaatgttaggatagcagatcgatggagtgagcgaggcatgagaaaggaaagattgaccctccgtgaatttgttagtggaattgctgattgatgttctcgtctccaatcttgaaccattactgtaactcaacgatgttgttagttcgcattatctgctgaaggtggtttttatgtgtacaaaaaaaaaaaaaaaaaagcttatcgataccgtcgacctcgaggggggrmscggtac

SEQ ID NO: 11778 - protein, 96 aa, Triticum aestivum
  misc_feature (1)..(96): Ceres Seq. ID no. 15219224
HYLEHPNRNLYWHFPSRTPEEISSQELPMRPMHGPLLPALVRQLPGAPREERPPGRPQRHAHDRRQPAPRARDEHVREPRRPRPCPCQPGDQWSIE

SEQ ID NO: 11779 - protein, 83 aa, Triticum aestivum
  misc_feature (1)..(83): Ceres Seq. ID no. 15219225
MAHCCLHWCANCQEHRERRGRLADHSAMPMTVVNPPPVQEMSMSENHAAPAPAPANPETNGASNRAELEARKSDHDDVEVIPL

SEQ ID NO: 11780 - protein, 68 aa, Triticum aestivum
  misc_feature (1)..(68): Ceres Seq. ID no. 15219226
MRPMHGPLLPALVRQLPGAPREERPPGRPQRHAHDRRQPAPRARDEHVREPRRPRPCPCQPGDQWSIE

SEQ ID NO: 11781 - DNA, 2100 bp, Triticum aestivum
  misc_feature (1)..(2100): Ceres Seq. ID no. 13657008
acctagaacatcctaatcgaaaaccctccccgcgttcccacaccgccacgcgcatacagactccacagccccgcactgttcctcgagctggagcgtgggctcgcgtagcctcgcccgttcatgagcggcggcgagtcggcggcctcgcgcgagggggattgtaggcaatgaggctgtacatcacggcggcggccgccgacgacgacgcgacgaagccgaaggcgccgcagcagctgcaggcggcgcggcgaggttaccgttccgttgtggtcacggggctcctggccggcgttctcctcttccgcgccgcgctcctcgccatcgagaccggcgcctccctctgcccttccgccaccggttgctcggactggagcgcggggctcgggcgctggctctacggcggcggcggcgacgcgacggaggaatttatgaaagagtggaagagaagccacagggtagctaccctgttggaccccgtggtggtggaagcggcaccagattccttggacgatctcatggtggagatggacaccattctggcgtcctatgatcggcttgacatggaggccgtggtggtcaagataatggccatgctgctaaagatggaccggaagctcaagtcgtcaagaatccgaactctgttcaaccggcacctggcctcgctcggcatccccaagagcatgcactgcctggcgctgcggctggccgaggagttcgcggtgaactccgcggcccgctccccggtaccgttgccgcagtacgcccctcgcctcaccgacgcctctcgcatccacgtctgcctcgtcaccgacaacgttcttgcggccgccgtcgccgtggcgtctgccgtccggagctcggccggtccgtcgaggctcgtgttccacgtcgtcaccgacaagaagagctacgtcccgatgcactcgtggttcgcgctgcacccggtctctccggcggtcgtcgaggtcaagggcctccaccagttcgactggcgcgacggcgatgccatcgcctctgtcatgaggaccatcgacgaggtccagaagagctcgctggattaccaccagctgtgtgatggatcggtggagagggagtacagaaggcttgaggccaccaagccaagcacgttttcgatcctcaactatctcaaaatccatctcccagagttcttcccggagctcccgagggtgatactgctcgacgacgacgtcttggtgcgcaaggatctggccgggctgtgggagcaggatctggacgggaacatcatgggcgcggtcggcgcgcaccggcccggcgcagacggtggcatctgcatcgagaggacgctcagcgagcacctcaacttctctgaccctgcagtgtcgtcgctaggcctcgacggttcgaactgcacgtggtcttggggcgccaccatcgtcgacctcgacgcttggcgaggagcgaacgtcaccgagacgtaccagctatggctgcaaaagaaccgcgaatcggggttcaggctgtggaagatgggatcgctgccgccggctctgatagcgttcgacggccgggtgcaggcgatcgagccgctgtggcacctgccggacctcggctggcgcatgcccgacgccgagctgctgcagctctccgccgtcctgcatttcagcgggccgcggaagccgtggctggaggtggcgttcccggagctgcgggagctgtggctcgggcacttgaataactcggacagcttcctacgaggctgtggcgtagtggaatgacggtaatggaacagggagaagattcaagctggaaaaggggatacgtacagtgatccggtgcaagaatcgggtgcggcgctgggtttgtgaggagagggaagtaggtgctgccttcagcctttcctcgacctggctctgccatgtttgctggtttaatgccactgagtagaaactactcatggcgtatacatatatataactgggatatttatttgttattagttacaaaacggaaagtggaaattgcagaagttgtagccacgagataatttttctttggctccaatgatgaactcactgtatggaactatggttcatttaagagtcaaatacattactggtg

SEQ ID NO: 11782 - protein, 529 aa, Triticum aestivum
  misc_feature (1)..(529): Ceres Seq. ID no. 15219227
MRLYITAAAADDDATKPKAPQQLQAARRGYRSVVVTGLLAGVLLFRAALLAIETGASLCPSATGCSDWSAGLGRWLYGGGGDATEEFMKEWKRSHRVATLLDPVVVEAAPDSLDDLMVEMDTILASYDRLDMEAVVVKIMAMLLKMDRKLKSSRIRTLFNRHLASLGIPKSMHCLALRLAEEFAVNSAARSPVPLPQYAPRLTDASRIHVCLVTDNVLAAAVAVASAVRSSAGPSRLVFHVVTDKKSYVPMHSWFALHPVSPAVVEVKGLHQFDWRDGDAIASVMRTIDEVQKSSLDYHQLCDGSVEREYRRLEATKPSTFSILNYLKIHLPEFFPELPRVILLDDDVLVRKDLAGLWEQDLDGNIMGAVGAHRPGADGGICIERTLSEHLNFSDPAVSSLGLDGSNCTWSWGATIVDLDAWRGANVTETYQLWLQKNRESGFRLWKMGSLPPALIAFDGRVQAIEPLWHLPDLGWRMPDAELLQLSAVLHFSGPRKPWLEVAFPELRELWLGHLNNSDSFLRGCGVVE

SEQ ID NO: 11783 - protein, 442 aa, Triticum aestivum
  misc_feature (1)..(442): Ceres Seq. ID no. 15219228
MKEWKRSHRVATLLDPVVVEAAPDSLDDLMVEMDTILASYDRLDMEAVVVKIMAMLLKMDRKLKSSRIRTLFNRHLASLGIPKSMHCLALRLAEEFAVNSAARSPVPLPQYAPRLTDASRIHVCLVTDNVLAAAVAVASAVRSSAGPSRLVFHVVTDKKSYVPMHSWFALHPVSPAVVEVKGLHQFDWRDGDAIASVMRTIDEVQKSSLDYHQLCDGSVEREYRRLEATKPSTFSILNYLKIHLPEFFPELPRVILLDDDVLVRKDLAGLWEQDLDGNIMGAVGAHRPGADGGICIERTLSEHLNFSDPAVSSLGLDGSNCTWSWGATIVDLDAWRGANVTETYQLWLQKNRESGFRLWKMGSLPPALIAFDGRVQAIEPLWHLPDLGWRMPDAELLQLSAVLHFSGPRKPWLEVAFPELRELWLGHLNNSDSFLRGCGVVE

SEQ ID NO: 11784 - protein, 413 aa, Triticum aestivum
  misc_feature (1)..(413): Ceres Seq. ID no. 15219229
MVEMDTILASYDRLDMEAVVVKIMAMLLKMDRKLKSSRIRTLFNRHLASLGIPKSMHCLALRLAEEFAVNSAARSPVPLPQYAPRLTDASRIHVCLVTDNVLAAAVAVASAVRSSAGPSRLVFHVVTDKKSYVPMHSWFALHPVSPAVVEVKGLHQFDWRDGDAIASVMRTIDEVQKSSLDYHQLCDGSVEREYRRLEATKPSTFSILNYLKIHLPEFFPELPRVILLDDDVLVRKDLAGLWEQDLDGNIMGAVGAHRPGADGGICIERTLSEHLNFSDPAVSSLGLDGSNCTWSWGATIVDLDAWRGANVTETYQLWLQKNRESGFRLWKMGSLPPALIAFDGRVQAIEPLWHLPDLGWRMPDAELLQLSAVLHFSGPRKPWLEVAFPELRELWLGHLNNSDSFLRGCGVVE

SEQ ID NO: 11785 - DNA, 1062 bp, Triticum aestivum
  misc_feature (1)..(1062): Ceres Seq. ID no. 13657064
ccattacctagaacatcctaatcgaaaaatgttccatctcatctcgcccctccctttccaccatctccagtaagtttgggcctcgctttccttcccgacccgacccagctcgcaatcgcaagccacacgcatcgggtttccctcagcgcagcgatctcacctccctgacccgctccctcctcccgcgtcacgtgtcctcacagctcaccccgccggcggccggccgcagcggcgcgcccccgacccccgacccccgaccaggcggagcgcggccagggcaggcgagatggtcttcgtctggctcgccgccttcttcctcgtcgtcacgctcatcgtgctcgtcatcttccagttgatgtgcttggcagatctggagttcgattatatcaacccgtttgattcatcctctcgaatcaataaagtggttatgccagaatttatagtgcaagcacttctaagtgcattattcctcttatctgggcactgggcgatgtttctgctttctgccccaatggtgtactataattatacattgtacgagcggcggcagcatcttgtagatgtgacagagatatttaaccatctttcacgggagaagaagcgccgtctttttaagatagctgctcttatcgtcctcctattcttgtccttgttctggatgatttggagtgtactggaggagcacgagtagaatgagagaaaacactgtgattgtgatagctcaacctggttctgcagccgttagttaggtattacgacgtggtcctcgtggcctgctgaacacctactccgatgccgttattgttcatatgaaagcccttttggataaatttagggtgtcatggagaaacgatgcaagcagaagggcgaagactacgtgtccgaggtgctgtttgttgctcgcgcctagtgtgaaatctcctgctgttgtagcgtgtaacataacatgtaagttaggagccactccctcctgtttatttgatcgtgcatccgttcatatggggcaaagtaactgctgcgcccaactgtgcatggttttattatgaccgacattctgtgttt

SEQ ID NO: 11786 - protein, 134 aa, Triticum aestivum
  misc_feature (1)..(134): Ceres Seq. ID no. 13657065
MVFVWLAAFFLVVTLIVLVIFQLMCLADLEFDYINPFDSSSRINKVVMPEFIVQALLSALFLLSGHWAMFLLSAPMVYYNYTLYERRQHLVDVTEIFNHLSREKKRRLFKIAALIVLLFLSLFWMIWSVLEEHE

SEQ ID NO: 11787 - protein, 111 aa, Triticum aestivum
  misc_feature (1)..(111): Ceres Seq. ID no. 13657066
MCLADLEFDYINPFDSSSRINKVVMPEFIVQALLSALFLLSGHWAMFLLSAPMVYYNYTLYERRQHLVDVTEIFNHLSREKKRRLFKIAALIVLLFLSLFWMIWSVLEEHE

SEQ ID NO: 11788 - protein, 87 aa, Triticum aestivum
  misc_feature (1)..(87): Ceres Seq. ID no. 13657067
MPEFIVQALLSALFLLSGHWAMFLLSAPMVYYNYTLYERRQHLVDVTEIFNHLSREKKRRLFKIAALIVLLFLSLFWMIWSVLEEHE

SEQ ID NO: 11789 - DNA, 1344 bp, Triticum aestivum
  misc_feature (1)..(1344): Ceres Seq. ID no. 13657142
ccattacctagaacatcctagtcgaaaattcgaccaaacctcccacctcgcacctcgccgcccgatccgacgcgccggcgacccgccgccgctctcgagcgtcgccgatccgcggcgcagatccctcacgaggttttctcaccttattagctcgctggtgcaggactgccacggctcgccggctcttgaatttcagcgcacgcggatctggtgggaggagccccgtgggcgccgctgccttggcgatgtcgagggtccgggacaggacggaggacttcaaggagtccgttcgcgtcgccgcgctctcccatggctacacggagtcgcaattggccgcgctcatgtcgtctttcatcatccggaagccgtcgcccaaatcgccgttcacaaatgcagcaatcaagacgcttgagagcatcagggagctcgagaagtttatagtgaagcacaggagggactatgtggacatgcatcgcaccacggagcaagagagggacaacattgagcatgaagttggtatttttgtaaaagcatgcaaggaacagatagatatcctaaagaacaggatccttgaagatgagaggaatagaagagcgaacacatggcttggcacaagagatgagacttcccggttagacttgatagctcaccagcatggtgtggttttgattttgagcgagcgtctccactcagtaactgcacaatttgatcgccttaggtccctgcgctttcaagaagctattaatagggtgatgccaagaaagaagattaagaagaagccagaaataaaacctactgaaccatccaagtcaaaccttgtattgaaatctgatgtctcgaaggttgaagatcgggaggtatcaactgcgcccttaagagttcaagaacaactcttggacgatgaaacacgagctctccagatggagttgaccaatcttcttgatactgtccaagaaacggagacaaagatgatagagatgtcagcacttaatcatcttatgtcaacacatgttctacagcaagctcagcagattcaatatttatacgaccaggcagtggaagcaacgaacaacgtggagcgtgggaacaaggagctatcccaggcgatccagcggaacaacagcagtagaacctttctcctgcttttcttctttgttcttactttctctgttctgtttcttgactggtacaaaaactgaattagcagctcatgtaaccgtactattgcgcaaatggattgagctattgatgtgtcatctcttgtgggatgattatcacttgtcatgcatattggtcagtgttactctgttaagattctaagattttgccgccgttggcaaacat

SEQ ID NO: 11790 - protein, 317 aa, Triticum aestivum
  misc_feature (1)..(317): Ceres Seq. ID no. 13657143
MSRVRDRTEDFKESVRVAALSHGYTESQLAALMSSFIIRKPSPKSPFTNAAIKTLESIRELEKFIVKHRRDYVDMHRTTEQERDNIEHEVGIFVKACKEQIDILKNRILEDERNRRANTWLGTRDETSRLDLIAHQHGVVLILSERLHSVTAQFDRLRSLRFQEAINRVMPRKKIKKKPEIKPTEPSKSNLVLKSDVSKVEDREVSTAPLRVQEQLLDDETRALQMELTNLLDTVQETETKMIEMSALNHLMSTHVLQQAQQIQYLYDQAVEATNNVERGNKELSQAIQRNNSSRTFLLLFFFVLTFSVLFLDWYKN

SEQ ID NO: 11791 - protein, 285 aa, Triticum aestivum
  misc_feature (1)..(285): Ceres Seq. ID no. 13657144
MSSFIIRKPSPKSPFTNAAIKTLESIRELEKFIVKHRRDYVDMHRTTEQERDNIEHEVGIFVKACKEQIDILKNRILEDERNRRANTWLGTRDETSRLDLIAHQHGVVLILSERLHSVTAQFDRLRSLRFQEAINRVMPRKKIKKKPEIKPTEPSKSNLVLKSDVSKVEDREVSTAPLRVQEQLLDDETRALQMELTNLLDTVQETETKMIEMSALNHLMSTHVLQQAQQIQYLYDQAVEATNNVERGNKELSQAIQRNNSSRTFLLLFFFVLTFSVLFLDWYKN

SEQ ID NO: 11792 - protein, 243 aa, Triticum aestivum
  misc_feature (1)..(243): Ceres Seq. ID no. 13657145
MHRTTEQERDNIEHEVGIFVKACKEQIDILKNRILEDERNRRANTWLGTRDETSRLDLIAHQHGVVLILSERLHSVTAQFDRLRSLRFQEAINRVMPRKKIKKKPEIKPTEPSKSNLVLKSDVSKVEDREVSTAPLRVQEQLLDDETRALQMELTNLLDTVQETETKMIEMSALNHLMSTHVLQQAQQIQYLYDQAVEATNNVERGNKELSQAIQRNNSSRTFLLLFFFVLTFSVLFLDWYKN

SEQ ID NO: 11793 - DNA, 759 bp, Triticum aestivum
  misc_feature (1)..(759): Ceres Seq. ID no. 13657166
cttagaggtttaccgagtatcggacatggagctggtaagagttcttcctagtgctgaagatgaagtcaatgttgcatgctttcatccttcccctggaggtggtcttgtttatgggactaaggaagggaagctcaggatcctacaacacaatggcgcagacgctgcaagcatggcgctgaattgctttatcgaggaaaatatgcttgaggttcagaggtatgcgttggaaggctgaatgatcatttgcgtcatgagcttatatgtgtccttccctgcaggaacttttgtctgcaagctccatttttgtttaggagagcctcatggactaaattacaagatatcatcagggcctccgactaaatctttcgagcggcagatgattctccacgagtttgttcaagtgcaatgtactgatctattgctggtttccagagaatgctgtgggccgactctaatcgtgcatcgttttgcaacttttaactcaggtctgtgcacaggcggtgtgatgatgtaaatttggcatggtcatcgttgctgtcaagttcccacgaccctgtaattataaaactgtacatgtaatctccaatcagcttaaaacaaccgctgttgtattttagaaagctcgcaatcctaatcctcaagtttcttttacgtgggaaatgtttgtactatttctgtcctgaccaatgccagtgatttgcattaagatgaatgaaaaaaaaaaaaaccaaccgctaccaaagaaggaagagaatgacg

SEQ ID NO: 11794 - protein, 92 aa, Triticum aestivum
  misc_feature (1)..(92): Ceres Seq. ID no. 13657167
MIICVMSLYVSFPAGTFVCKLHFCLGEPHGLNYKISSGPPTKSFERQMILHEFVQVQCTDLLLVSRECCGPTLIVHRFATFNSGLCTGGVMM

SEQ ID NO: 11795 - protein, 87 aa, Triticum aestivum
  misc_feature (1)..(87): Ceres Seq. ID no. 13657168
MSLYVSFPAGTFVCKLHFCLGEPHGLNYKISSGPPTKSFERQMILHEFVQVQCTDLLLVSRECCGPTLIVHRFATFNSGLCTGGVMM

SEQ ID NO: 11796 - protein, 77 aa, Triticum aestivum
  misc_feature (1)..(77): Ceres Seq. ID no. 13657169
LEVYRVSDMELVRVLPSAEDEVNVACFHPSPGGGLVYGTKEGKLRILQHNGADAASMALNCFIEENMLEVQRYALEG

SEQ ID NO: 11797 - DNA, 1390 bp, Triticum aestivum
  misc_feature (1)..(1390): Ceres Seq. ID no. 13657369
aggcgttcccctgccgccgcctcctatgtgaacatcttcttcacatctcccaccgcagcagtctcctggcgccgcctccgatctttgcatcttcttcacatctatctccggatataccaaaacaaggaggaagtagagaggaaggggtgtcatggctagccggtttgtgaatctcgcggtcaagcacatgaacggccgccatattcctttcagcatacaccgtattaatccggcagatttcttttacccaaccggatcgccagttcccaaacaaggttcagcttttgtaccaccggacgaaattcagctgcctccggccaccatcgccttcgactggccctcccggcagggccaaccctgctcaatggatttcatggccttcggcgccaaccgggataagatcgtcgccgtggacagcatagggtgctcctacctttacgacgctcccgtacgcagtatcagcaccaatatgcccatgatgcccacgtgcatgctacaacccatgtccattgctgtcggtgacaacggcctgttagttatgagtaaagccgatcaccagttcgtggctctgaatgatggctgcgaccccaattccagatatttattaccaatgtctggctggtactggcagtccctcaagccgcctcccttccccagccgctcctaccaccagaacgagaaaggcagtcaccatccatttgaagtcagctcttacacggtagttggcaattcacagttctgggtgtccacagtgggtgcaggcacgttttcctttgatatgaacagcggtgcgtggatgaaggctggcaattgggagctgccattcagaggtcgtgccgagtatgtccccgagcacaatctctggtttggcatgtttggcaaagacgaccagctttgcgcatctgacctcattgccgtgtccgcagtgagctcaccagtgccacatatactttggaaagagctggtttggccgaaagattggaagctcaggtcgacccacctcctgcctcttggttctagcagactctgcattgccaggttcttcctaacttcagatgatgacaaggaagagaacatgtcagactataagcgcagcacaacaaataattttggggtgctcacgggggtggaagtggtgtctgatgaaggaggactgcgcattatccatcacaagtccattcgcttcgatttcggcctcagcattgctagtgtgctgtgatacgttgactcctctagtgcaggtgagtttatttatatccggaacctgctgtagcacacctttcttttccatcctttgctcaaacgcactacaaaagcttgtccttttagcactatggaaaacgctttctttgctggaacataatgcctcaatcaaataaaaagttcttag

SEQ ID NO: 11798 - protein, 355 aa, Triticum aestivum
  misc_feature (1)..(355): Ceres Seq. ID no. 15220606
MASRFVNLAVKHMNGRHIPFSIHRINPADFFYPTGSPVPKQGSAFVPPDEIQLPPATIAFDWPSRQGQPCSMDFMAFGANRDKIVAVDSIGCSYLYDAPVRSISTNMPMMPTCMLQPMSIAVGDNGLLVMSKADHQFVALNDGCDPNSRYLLPMSGWYWQSLKPPPFPSRSYHQNEKGSHHPFEVSSYTVVGNSQFWVSTVGAGTFSFDMNSGAWMKAGNWELPFRGRAEYVPEHNLWFGMFGKDDQLCASDLIAVSAVSSPVPHILWKELVWPKDWKLRSTHLLPLGSSRLCIARFFLTSDDDKEENMSDYKRSTTNNFGVLTGVEVVSDEGGLRIIHHKSIRFDFGLSIASVL

SEQ ID NO: 11799 - protein, 343 aa, Triticum aestivum
  misc_feature (1)..(343): Ceres Seq. ID no. 15220607
MNGRHIPFSIHRINPADFFYPTGSPVPKQGSAFVPPDEIQLPPATIAFDWPSRQGQPCSMDFMAFGANRDKIVAVDSIGCSYLYDAPVRSISTNMPMMPTCMLQPMSIAVGDNGLLVMSKADHQFVALNDGCDPNSRYLLPMSGWYWQSLKPPPFPSRSYHQNEKGSHHPFEVSSYTVVGNSQFWVSTVGAGTFSFDMNSGAWMKAGNWELPFRGRAEYVPEHNLWFGMFGKDDQLCASDLIAVSAVSSPVPHILWKELVWPKDWKLRSTHLLPLGSSRLCIARFFLTSDDDKEENMSDYKRSTTNNFGVLTGVEVVSDEGGLRIIHHKSIRFDFGLSIASVL

SEQ ID NO: 11800 - protein, 284 aa, Triticum aestivum
  misc_feature (1)..(284): Ceres Seq. ID no. 15220608
MDFMAFGANRDKIVAVDSIGCSYLYDAPVRSISTNMPMMPTCMLQPMSIAVGDNGLLVMSKADHQFVALNDGCDPNSRYLLPMSGWYWQSLKPPPFPSRSYHQNEKGSHHPFEVSSYTVVGNSQFWVSTVGAGTFSFDMNSGAWMKAGNWELPFRGRAEYVPEHNLWFGMFGKDDQLCASDLIAVSAVSSPVPHILWKELVWPKDWKLRSTHLLPLGSSRLCIARFFLTSDDDKEENMSDYKRSTTNNFGVLTGVEVVSDEGGLRIIHHKSIRFDFGLSIASVL

SEQ ID NO: 11801 - DNA, 899 bp, Triticum aestivum
  misc_feature (1)..(899): Ceres Seq. ID no. 13657435
atcgaaaaactcgcgcacctcacaacacccctccatccaccttttgccagcgtgagagcttcttctttcttgcgagggagaggacagcgagcaaccagggagctaggcgtcaatggcgaccatagccacgatgaccatgctcaagcccgccaagatcacggccaggtcggcgccttcctcgccgtcgttcagcgccaaggtggcgtcgccgagcatctcgctgcgcagcctgcagaagaacgcggccaagaagggagccctggccgtgtcgccggcggccgcggccatggcgagcgccttcttcacctcgctggcctcgtcggacgccgcgatggcgtcgcagcggatcgcggacgtggcggcggtggcgcccgcggacgacaaccggggcctgctgctgctcttcgtggtggcgcccgcgctcgggtgggtgctctacaacatcctccagccggcgctgaaccagctcaataagatgcggtccgagaaggcgctcgtcgccgggctcggcatcagcgccgccgcggccgccggcctggccgccgcgccggagccggcctccgccgccgtgcaggagctcgccgcgctggcggcggtagcgcccgccgacgacaaccggggcctgctgctgctcttcgtggtggcgcccgccctcggatgggtgctctacaacatcctgcagccggcgctgaaccagctcaacaaaatgcggtccaactgagcgtcgtcgtcgtcgtggcatcgcatgcggtccggccgagtgggttcgtatgtgtgtgttcgtctattaagagtcgtggtagtagcgtggaacgtggtgtgagtgcctgcttgcatactctctaatcttgttccttccattgatcaaatgcagtacagctcttcttgttttctcttcg

SEQ ID NO: 11802 - protein, 202 aa, Triticum aestivum
  misc_feature (1)..(202): Ceres Seq. ID no. 13657436
MATIATMTMLKPAKITARSAPSSPSFSAKVASPSISLRSLQKNAAKKGALAVSPAAAAMASAFFTSLASSDAAMASQRIADVAAVAPADDNRGLLLLFVVAPALGWVLYNILQPALNQLNKMRSEKALVAGLGISAAAAAGLAAAPEPASAAVQELAALAAVAPADDNRGLLLLFVVAPALGWVLYNILQPALNQLNKMRSN

SEQ ID NO: 11803 - protein, 196 aa, Triticum aestivum
  misc_feature (1)..(196): Ceres Seq. ID no. 13657437
MTMLKPAKITARSAPSSPSFSAKVASPSISLRSLQKNAAKKGALAVSPAAAAMASAFFTSLASSDAAMASQRIADVAAVAPADDNRGLLLLFVVAPALGWVLYNILQPALNQLNKMRSEKALVAGLGISAAAAAGLAAAPEPASAAVQELAALAAVAPADDNRGLLLLFVVAPALGWVLYNILQPALNQLNKMRSN

SEQ ID NO: 11804 - protein, 194 aa, Triticum aestivum
  misc_feature (1)..(194): Ceres Seq. ID no. 13657438
MLKPAKITARSAPSSPSFSAKVASPSISLRSLQKNAAKKGALAVSPAAAAMASAFFTSLASSDAAMASQRIADVAAVAPADDNRGLLLLFVVAPALGWVLYNILQPALNQLNKMRSEKALVAGLGISAAAAAGLAAAPEPASAAVQELAALAAVAPADDNRGLLLLFVVAPALGWVLYNILQPALNQLNKMRSN

SEQ ID NO: 11805 - DNA, 1750 bp, Triticum aestivum
  misc_feature (1)..(1750): Ceres Seq. ID no. 13657460
gcaaccaaaatcaccatgaaatcttactaattaagcagacaatattattgcaccagtgcagatcatgttcatatatataagctctatatagaaggcagtgagcaagcaaaccctaggtcaccgtcgtcgactgttcgtagtcgccggtatgcatgcatgcacagagtagaaggcgcgcgcgccaatggcacctactgccacgccgacacggacagcagcggccgcgtctgccacccgaggaagcacgcgccgcgggactcctgcaccaggtatccctccgacgggtagtgcagccgcagcagtagccgcgcctgggaaacggcgaacgcgctgagcggccgcgcggcgaacccagtgccgcgtgcggcggtagcccaccgctcgagcccgcgccaccacctcccgcctgtcccgcccaccgcggcctcgatctccctgccgaggacctcctgctccaccgccagcctctcccggctccccggcggcaccgtcgcctcaagcgcctcgaacaccgccgaatagtgatccatggccacaccaacacggcgcgggagctcgtcgatggggtcgatctctcctccgctcgcctccctctcggcgacggtcaccacggcgggggccatggccttcacccacttgaggaacgctgcgagctcgtcctgcccgccgagcttgtgcaagaacagcacgcagttcacggccagcgtctcgtcgggatgtagctccaggctcgtgacagcggtgctcggggtggtgctcgtgccggcgacgtggtgcgtgctggcggcgcaggagaggaggagcggggtgaagtggaaagggaggtggatcgagcgggcgaaagcgcgtagccggttgcctgtacgaaggagtgtgtcgcggtcggcgccagcgccggtgatgcggacctcgggcgggcccagcgccgggtcggctcgttcggcgatcgcctggaggagtggcggccactgcacgccgtgcgccgcgtcgaggtcgaggatgtggacgcggcgcgaaccctccacggcctcgaggatggcctggttggccgtcaggtgggcgaaccgcaggaacggcgcgatctggttgaacgccaggtacgccccggacggtgccggcgctgtcccagctggcggccgcggggagaacggcagcccggccttggagtccacgcggagcacgagcgcgcgcgcgaagtggtacgcgaggcggtcggtggcgtcgccgcgcggggacgccgcggagaggaggatctcggcagcgcggcgcgcggcggcgaggtccccgcgctgcagcaggtcggcgcaggccagcacgaggtcccgcgtggacggtgccgccgcgagcgcacgcccgccgccgcccagcaaggcagcgtcgcccccgccctcgccgctgctgttcctgaggtcggcgttgctgttgttgtcggtgtcggaggacgaggaagagtggagtgagctgatcatgtcttcttcttcgctcgcggcgccctgggactaggatcgtcgtgagcggccggaggtggaggagaagacggagacggagacggagcatgagggcgcgcatctctgggggggtttaatagggacgatgagggcgcacgtccagcagcatctgggctcgcagcttccttgacaggacatcatctgccaaaaatacacaagtatgctgctgctgctagctagcttgtgtgagtgagtgagaggggagaacccagcagcaccatcttttcgattaggatgttcta

SEQ ID NO: 11806 - protein, 324 aa, Triticum aestivum
  misc_feature (1)..(324): Ceres Seq. ID no. 13657461
MATPTRRGSSSMGSISPPLASLSATVTTAGAMAFTHLRNAASSSCPPSLCKNSTQFTASVSSGCSSRLVTAVLGVVLVPATWCVLAAQERRSGVKWKGRWIERAKARSRLPVRRSVSRSAPAPVMRTSGGPSAGSARSAIAWRSGGHCTPCAASRSRMWTRREPSTASRMAWLAVRWANRRNGAIWLNARYAPDGAGAVPAGGRGENGSPALESTRSTSARAKWYARRSVASPRGDAAERRISAARRAAARSPRCSRSAQASTRSRVDGAAASARPPPPSKAASPPPSPLLFLRSALLLLSVSEDEEEWSELIMSSSSLAAPWD

SEQ ID NO: 11807 - protein, 313 aa, Triticum aestivum
  misc_feature (1)..(313): Ceres Seq. ID no. 13657462
MGSISPPLASLSATVTTAGAMAFTHLRNAASSSCPPSLCKNSTQFTASVSSGCSSRLVTAVLGVVLVPATWCVLAAQERRSGVKWKGRWIERAKARSRLPVRRSVSRSAPAPVMRTSGGPSAGSARSAIAWRSGGHCTPCAASRSRMWTRREPSTASRMAWLAVRWANRRNGAIWLNARYAPDGAGAVPAGGRGENGSPALESTRSTSARAKWYARRSVASPRGDAAERRISAARRAAARSPRCSRSAQASTRSRVDGAAASARPPPPSKAASPPPSPLLFLRSALLLLSVSEDEEEWSELIMSSSSLAAPWD

SEQ ID NO: 11808 - protein, 293 aa, Triticum aestivum
  misc_feature (1)..(293): Ceres Seq. ID no. 13657463
MAFTHLRNAASSSCPPSLCKNSTQFTASVSSGCSSRLVTAVLGVVLVPATWCVLAAQERRSGVKWKGRWIERAKARSRLPVRRSVSRSAPAPVMRTSGGPSAGSARSAIAWRSGGHCTPCAASRSRMWTRREPSTASRMAWLAVRWANRRNGAIWLNARYAPDGAGAVPAGGRGENGSPALESTRSTSARAKWYARRSVASPRGDAAERRISAARRAAARSPRCSRSAQASTRSRVDGAAASARPPPPSKAASPPPSPLLFLRSALLLLSVSEDEEEWSELIMSSSSLAAPWD

SEQ ID NO: 11809 - DNA, 660 bp, Triticum aestivum
  misc_feature (1)..(660): Ceres Seq. ID no. 13657464
ccttccacggcgcagcacccccacaatccatccaagagagaagcccaaccaaccccaacagacagacagagcgagagagagaggatgtcggccatggagacggacgcccccgacgcgccgccgccggccgccccggcccccgccgccgacgccggcgccgggtcttcgtcctcgtcgtcccgcaagccgggcaagcgcttcgagatcaagaagtggaacgccgtcgcgctctgggcgtgggacatcgtggtggacaactgcgccatctgccgtaaccacatcatggatttatgcatcgagtgccaggccaaccaggccagcgccaccagcgaggagtgcaccgtcgcatggggtgtctgtaatcatgctttccacttccactgcatcagcaggtggctcaagactcgccaagtgtgcccactagacaacagcgaatgggagttccagaaatacggccactagaccaccctcctccgccactgggcggcggcatgttacttgcctactaccaccccaccagaagcccaggcctatctcttgtcgagcgtcgttatctccgcctactttagaacatttgcgtctacatctcctgtttgatgagtttgtataaaggattcatgtacttgcgcaactaatgctatcgtattaagggattccccc

SEQ ID NO: 11810 - protein, 153 aa, Triticum aestivum
  misc_feature (1)..(153): Ceres Seq. ID no. 13657465
PSTAQHPHNPSKREAQPTPTDRQSERERMSAMETDAPDAPPPAAPAPAADAGAGSSSSSSRKPGKRFEIKKWNAVALWAWDIVVDNCAICRNHIMDLCIECQANQASATSEECTVAWGVCNHAFHFHCISRWLKTRQVCPLDNSEWEFQKYGH

SEQ ID NO: 11811 - protein, 140 aa, Triticum aestivum
  misc_feature (1)..(140): Ceres Seq. ID no. 13657466
LPRRSTPTIHPREKPNQPQQTDRARERGCRPWRRTPPTRRRRPPRPPPPTPAPGLRPRRPASRASASRSRSGTPSRSGRGTSWWTTAPSAVTTSWIYASSARPTRPAPPARSAPSHGVSVIMLSTSTASAGGSRLAKCAH

SEQ ID NO: 11812 - protein, 125 aa, Triticum aestivum
  misc_feature (1)..(125): Ceres Seq. ID no. 13657467
MSAMETDAPDAPPPAAPAPAADAGAGSSSSSSRKPGKRFEIKKWNAVALWAWDIVVDNCAICRNHIMDLCIECQANQASATSEECTVAWGVCNHAFHFHCISRWLKTRQVCPLDNSEWEFQKYGH

SEQ ID NO: 11813 - DNA, 955 bp, Triticum aestivum
  misc_feature (1)..(955): Ceres Seq. ID no. 13657523
aaaagaaaacaagtaagggcccaaatgcaaacgaggaaaccaacctcctcctcccctgtaacaactccgccgcgcgcccacctcccctcgccggtatcgtgtcctcgttcacgcccaacccaacccaccccatttccccgacctccgatgccggagcgccgcaacgtagccggagacccgccgtactggtgatccccggataacaacgatggaccgcctcttgctgtcccgccccccgatgcccacccccgtccacggcgctgccacggccgcagatggcgacctcctcgagctcgacgtcctctggcccgcctcttcagctccgggactcctcgccgcgcttcccgatgacgaggctaagaagaagcagaagcgcgcgggcggccctgccgtccgatccgccgcccgcgccgtcccggagaaggccgcgttgaccccgtcttcggtggcgaggtcggctccggtgcgcataccttcggatgctgcggcgcggagagggaggtggccccacgtcgtcggtggcggcgacgacggggacgccatggtcccgccgcacgagatcgtcgcgcggcgcgcggcagcgcacagctcggtgctggagggagccgggaggacgctcaagggccgcgacctccgccgcgtacgcaacaccgtcctgcgccgcaccggcttcctcgactgagaggcggaggcgagtcgcctcgtcgctttcgcgataaagttttgacttctgttaattcctccctttagttccatccgttgcgtttccggcagttttgatttcattccccgatgggaaggggatgaaaagtaaagtggtgaggtgagatgagtgaccgaggattataacacgacaataacagtgctgttccattccatcacattatatatatggaatttttggccattaaaaaaaaaataaaaaaaaaaaaaaaaaagcttatcgataccgtcg

SEQ ID NO: 11814 - protein, 157 aa, Triticum aestivum
  misc_feature (1)..(157): Ceres Seq. ID no. 13657524
MDRLLLSRPPMPTPVHGAATAADGDLLELDVLWPASSAPGLLAALPDDEAKKKQKRAGGPAVRSAARAVPEKAALTPSSVARSAPVRIPSDAAARRGRWPHVVGGGDDGDAMVPPHEIVARRAAAHSSVLEGAGRTLKGRDLRRVRNTVLRRTGFLD

SEQ ID NO: 11815 - protein, 147 aa, Triticum aestivum
  misc_feature (1)..(147): Ceres Seq. ID no. 13657525
MPTPVHGAATAADGDLLELDVLWPASSAPGLLAALPDDEAKKKQKRAGGPAVRSAARAVPEKAALTPSSVARSAPVRIPSDAAARRGRWPHVVGGGDDGDAMVPPHEIVARRAAAHSSVLEGAGRTLKGRDLRRVRNTVLRRTGFLD

SEQ ID NO: 11816 - protein, 79 aa, Triticum aestivum
  misc_feature (1)..(79): Ceres Seq. ID no. 13657526
MLRRGEGGGPTSSVAATTGTPWSRRTRSSRGARQRTARCWREPGGRSRAATSAAYATPSCAAPASSTERRRRVASSLSR

SEQ ID NO: 11817 - DNA, 1802 bp, Triticum aestivum
  misc_feature (1)..(1802): Ceres Seq. ID no. 13657707
atccacacacactccactgcgcacaattccaccatcagcaatgcctcctcccctccgcctcctcgccctcctcctcctcctccacctccccttcgccctctcctcccgccaccaccacaaagccccggcgccgccgccccggaaggtgcctcctccggcggccaactacgcggcgccgctccccgtcctcctcgcctgcaacgccacccgcttccggcccgcctgcgtcgccacgctctccgccgccaacgtcaccgccgcgtcctccccctccgacctcctcggcgccacgctctccgcgctccgcgcccgcctcccgccggccgtctccaccgcgcgctccgtcctcgcctcctccaagaacgtcaacctcacgaccgccgccaccaactgcctcaccgccctctccctctcctcgcaccgcctcgagccgccgccctcgccgtcggcgctcatgcccgcctccgcctcgctcctccacctctacgactgctggtccgcctacaagtacgtcaacttctcccggaccatctacgatgccatggcgtacctcaacgacaccatcaccgtcaacagcaactacatctccatgctcgccgcgctgaagcggtacggcgacgacacgtccgtctgggcgccgccgcagacggagcgcgacgggtactggccttcgcccgcggcgtcgggggccgacgtggacgcgctcggcgtgcccaaggggctccccgcggacgcgacggtgtgcggcgccgggtgcgactacaggacagtgcgggaggcggtggcggccgcgccggacaacgggggcaagaggttcgtggtgtacgtgaaggcaggcgtgtacaaggagacggtgagcgtgccgtgggagaagaccaacctggtgctggtcggcgacggcatggggaagacggtcatcaccggcgacctcaacgcggacacgcccggcgtgtccacgttcaacacggccacyktaggcgtgctcgcggacggcttcatggcgcgcgacctgacgatcgcgaacacggcggggccggacgcgcaccaggcggtggcgttccggtccacgggcgaccgcacggtgctggacacggtggagctgctggggcaccaggacacgctgtacgtgcacgccatgcgccagttctacacccgctgccgcgtggccggcacggtggacttcgtcttcggcaactcggccgccgtgctccacgacagcgacctcgtcgtgctgccccggcagctgcggccggagaagggcgagacggacgcgctgacggcgcagggccgcaccgacccggcgcagcccacggggatcgtgctccggggctgccgcgtcaacggcagcgacgagtacatggccttctaccggcagaagcccggcgtgcaccacgtgttcctcggccggccatggaaggagtactcccgcacggtgttcgtcgggtgcacgatggctgagatcgtgcggcccgaggggtggatgccatggagcggcgacttcgcgctcaagacgctctactacggggagtatgatagcgccggccctggcgccggcgggcggggaggcggcagggtggcgtggagcagccaggtgcccaaggagcgcgtcgacgtytacagcgtcgccagcttcatacagggggacgagtggatacccaaagtgaagtagtgggctttttggtcctggtagcatacataatcgagctggcgtgagctcgtgggccggtcggcggtgatcgtgccactcggtcacggatgtactgcagtcgttgcagttatgcaaatgcagtggtgcctaacgc

SEQ ID NO: 11818 - protein, 555 aa, Triticum aestivum
  misc_feature (1)..(555): Ceres Seq. ID no. 15220615
  misc_feature (324)..(324): Xaa is any aa, unknown or other
  misc_feature (325)..(325): Xaa is any aa, unknown or other
  misc_feature (538)..(538): Xaa is any aa, unknown or other
STHTPLRTIPPSAMPPPLRLLALLLLLHLPFALSSRHHHKAPAPPPRKVPPPAANYAAPLPVLLACNATRFRPACVATLSAANVTAASSPSDLLGATLSALRARLPPAVSTARSVLASSKNVNLTTAATNCLTALSLSSHRLEPPPSPSALMPASASLLHLYDCWSAYKYVNFSRTIYDAMAYLNDTITVNSNYISMLAALKRYGDDTSVWAPPQTERDGYWPSPAASGADVDALGVPKGLPADATVCGAGCDYRTVREAVAAAPDNGGKRFVVYVKAGVYKETVSVPWEKTNLVLVGDGMGKTVITGDLNADTPGVSTFNTAXXGVLADGFMARDLTIANTAGPDAHQAVAFRSTGDRTVLDTVELLGHQDTLYVHAMRQFYTRCRVAGTVDFVFGNSAAVLHDSDLVVLPRQLRPEKGETDALTAQGRTDPAQPTGIVLRGCRVNGSDEYMAFYRQKPGVHHVFLGRPWKEYSRTVFVGCTMAEIVRPEGWMPWSGDFALKTLYYGEYDSAGPGAGGRGGGRVAWSSQVPKERVDXYSVASFIQGDEWIPKVK

SEQ ID NO: 11819 - protein, 542 aa, Triticum aestivum
  misc_feature (1)..(542): Ceres Seq. ID no. 15220616
  misc_feature (311)..(311): Xaa is any aa, unknown or other
  misc_feature (312)..(312): Xaa is any aa, unknown or other
  misc_feature (525)..(525): Xaa is any aa, unknown or other
MPPPLRLLALLLLLHLPFALSSRHHHKAPAPPPRKVPPPAANYAAPLPVLLACNATRFRPACVATLSAANVTAASSPSDLLGATLSALRARLPPAVSTARSVLASSKNVNLTTAATNCLTALSLSSHRLEPPPSPSALMPASASLLHLYDCWSAYKYVNFSRTIYDAMAYLNDTITVNSNYISMLAALKRYGDDTSVWAPPQTERDGYWPSPAASGADVDALGVPKGLPADATVCGAGCDYRTVREAVAAAPDNGGKRFVVYVKAGVYKETVSVPWEKTNLVLVGDGMGKTVITGDLNADTPGVSTFNTAXXGVLADGFMARDLTIANTAGPDAHQAVAFRSTGDRTVLDTVELLGHQDTLYVHAMRQFYTRCRVAGTVDFVFGNSAAVLHDSDLVVLPRQLRPEKGETDALTAQGRTDPAQPTGIVLRGCRVNGSDEYMAFYRQKPGVHHVFLGRPWKEYSRTVFVGCTMAEIVRPEGWMPWSGDFALKTLYYGEYDSAGPGAGGRGGGRVAWSSQVPKERVDXYSVASFIQGDEWIPKVK

SEQ ID NO: 11820 - protein, 485 aa, Triticum aestivum
  misc_feature (1)..(485): Ceres Seq. ID no. 15220617
  misc_feature (325)..(325): Xaa is any aa, unknown or other
IHTHSTAHNSTISNASSPPPPRPPPPPPPPLRPLLPPPPQSPGAAAPEGASSGGQLRGAAPRPPRLQRHPLPARLRRHALRRQRHRRVLPLRPPRRHALRAPRPPPAGRLHRALRPRLLQERQPHDRRHQLPHRPLPLLAPPRAAALAVGAHARLRLAPPPLRLLVRLQVRQLLPDHLRCHGVPQRHHHRQQQLHLHARRAEAVRRRHVRLGAAADGARRVLAFARGVGGRRGRARRAQGAPRGRDGVRRRVRLQDSAGGGGGRAGQRGQEVRGVREGRRVQGDGERAVGEDQPGAGRRRHGEDGHHRRPQRGHARRVHVQHGHXRRARGRLHGARPDDREHGGAGRAPGGGVPVHGRPHGAGHGGAAGAPGHAVRARHAPVLHPLPRGRHGGLRLRQLGRRAPRQRPRRAAPAAAAGEGRDGRADGAGPHRPGAAHGDRAPGLPRQRQRRVHGLLPAEARRAPRVPRPAMEGVLPHGVRRVHDG

SEQ ID NO: 11821 - DNA, 1809 bp, Triticum aestivum
  misc_feature (1)..(1809): Ceres Seq. ID no. 13657780
agctcccgtcactttccccctctggtcgagggtttcctctgccctgttacgttccccactccaatccaatggcgacgaccagcaacaagaaaatggcgtcgccgtcgcctatgacggacatgcccgaccagctcctcgccgagatcttcctccggctgcccaccccacaagacctcgcccgcgcctccgccgtttgcctcaccttccgccgaatctccaccgacaggtccttcctccgctgcttccgctgcctccacgcaccaccacttctcggattcctcgaccgcgacggcttccacccagccctaacctccacccccgccgttcgcgcggccgccgtcgccgccgatttcaccttatccttcctcccctaccaccgccgctggaccgtgcaggacgtccgcgacggccgcgtcctcctctgccgcagcatcggaaaacatgggcagcccccggtcttcagagatctcgcggtgtgcgaccccttgcaccggcgctacgtcctgctccccccgctacctcacgacctggctgctttgcttgggcaccctttccccccggtaaccgaggcctgctgcaagcgcttcctcgttcccctcggtgaggaggaggcagcggctggagacacaacattcatagtcatcttgatggcatattgcaaaaccagtctggctgcctttgtcttctcttccagcaacgatcaatggcaagctactgcatccaaggatttgagtgatttggcccttgacgagggcgacatggaggagatgtcaagggtccagccttttattcccatgcgccattatgcttatggctgtttctactgggactgggtgcaattcgggatgaagaagttgctcttgcttgacaccacgaacatggagttctccactgctgacctcccaccaggagaatggagcaaggaaggtatagccattgtggaggcaggggaaggcaggctcgggatctttggtttccatggtggacttgcatccaatctcagctatacagctgcacggaccaaaggcgagagtcccagccagtggcagatggagaagacaatctcactagattctggctacaaatattgtatcagagacgcaacacagaggtacttgctcttgacaaggatagaagcatcatctccaaataatcaccttgttggatatttctcaatggatatcaagacgttgcagcttcagagggtttatgagaaacagcactataagtatccgacatacgcatatatcaacttcccaccatcattgttgtcttcaaggagaatatgaagtggtttgacagagccatacccatacgtaatcatatcagcattcttaattcaaagcgaccatggtttcaacagcttggagttctcacatacgtgatcacgttgcctacaaaacaacaagatctacattgccttgcttggtggtggccatgtcaatgttttggttattaggtctaacatcaatgtggaatttccctgcctaagaatgtgactttgatattaggagttcaagtcaatttttcttcttcattatttgttagagttgctaaaacaggtacaatctgactagtggcagaacgatcacaacggaactgataaccaacataaggacaatwtaagcagcaccagcatgcagttggagggactcggttctttgttgctgctgctgctgtacggtgaagggtaggcagcaaaataggtttgtagagctgtagaaagaggtgagtggaagtcctaaatggtgctcatgtttggatcgccgaagtaccgataatttgtggaatcttgaatatgctgtwtgg

SEQ ID NO: 11822 - protein, 428 aa, Triticum aestivum
  misc_feature (1)..(428): Ceres Seq. ID no. 15219877
LPSLSPSGRGFPLPCYVPHSNPMATTSNKKMASPSPMTDMPDQLLAEIFLRLPTPQDLARASAVCLTFRRISTDRSFLRCFRCLHAPPLLGFLDRDGFHPALTSTPAVRAAAVAADFTLSFLPYHRRWTVQDVRDGRVLLCRSIGKHGQPPVFRDLAVCDPLHRRYVLLPPLPHDLAALLGHPFPPVTEACCKRFLVPLGEEEAAAGDTTFIVILMAYCKTSLAAFVFSSSNDQWQATASKDLSDLALDEGDMEEMSRVQPFIPMRHYAYGCFYWDWVQFGMKKLLLLDTTNMEFSTADLPPGEWSKEGIAIVEAGEGRLGIFGFHGGLASNLSYTAARTKGESPSQWQMEKTISLDSGYKYCIRDATQRYLLLTRIEASSPNNHLVGYFSMDIKTLQLQRVYEKQHYKYPTYAYINFPPSLLSSRRI

SEQ ID NO: 11823 - protein, 406 aa, Triticum aestivum
  misc_feature (1)..(406): Ceres Seq. ID no. 15219878
MATTSNKKMASPSPMTDMPDQLLAEIFLRLPTPQDLARASAVCLTFRRISTDRSFLRCFRCLHAPPLLGFLDRDGFHPALTSTPAVRAAAVAADFTLSFLPYHRRWTVQDVRDGRVLLCRSIGKHGQPPVFRDLAVCDPLHRRYVLLPPLPHDLAALLGHPFPPVTEACCKRFLVPLGEEEAAAGDTTFIVILMAYCKTSLAAFVFSSSNDQWQATASKDLSDLALDEGDMEEMSRVQPFIPMRHYAYGCFYWDWVQFGMKKLLLLDTTNMEFSTADLPPGEWSKEGIAIVEAGEGRLGIFGFHGGLASNLSYTAARTKGESPSQWQMEKTISLDSGYKYCIRDATQRYLLLTRIEASSPNNHLVGYFSMDIKTLQLQRVYEKQHYKYPTYAYINFPPSLLSSRRI

SEQ ID NO: 11824 - protein, 398 aa, Triticum aestivum
  misc_feature (1)..(398): Ceres Seq. ID no. 15219879
MASPSPMTDMPDQLLAEIFLRLPTPQDLARASAVCLTFRRISTDRSFLRCFRCLHAPPLLGFLDRDGFHPALTSTPAVRAAAVAADFTLSFLPYHRRWTVQDVRDGRVLLCRSIGKHGQPPVFRDLAVCDPLHRRYVLLPPLPHDLAALLGHPFPPVTEACCKRFLVPLGEEEAAAGDTTFIVILMAYCKTSLAAFVFSSSNDQWQATASKDLSDLALDEGDMEEMSRVQPFIPMRHYAYGCFYWDWVQFGMKKLLLLDTTNMEFSTADLPPGEWSKEGIAIVEAGEGRLGIFGFHGGLASNLSYTAARTKGESPSQWQMEKTISLDSGYKYCIRDATQRYLLLTRIEASSPNNHLVGYFSMDIKTLQLQRVYEKQHYKYPTYAYINFPPSLLSSRRI

SEQ ID NO: 11825 - DNA, 1644 bp, Triticum aestivum
  misc_feature (1)..(1644): Ceres Seq. ID no. 13657789
atccaattccaaaaccacgcactagtcgacgacggccacctcgccgccgccgtaacgcgcacggtctcaccttaccactcattaccgcgcttccagttccgtacgcctcatgccgccggccgcgcgggtcaaacctcccaaaacatgaaactcggtgcaatggggtcgtgccgcttgcccccggccatcgcggccgccgcgctggccgcggctgcgctgctggtgctcttccgcgcctccccgtacgggctcgcctacccccgcgcgggcgtccagccagggccgccgctcgtggcgaggggtcccgggagcccgccctccttcgcgtactggatatccggcacgggcggagagggccgcagggtcctcaggctgctcagggcggtgtatcacccgaggaaccggtacctgctgcacctggacgcgggggcgtcgcgggacgagcggacggagctggccgccgctgcgcgggacgaggcggcgtggagggagttctcaaacgtcgacgtggtaggggagagctacgcggtagacaggacgggctcctcggtgctcgccgcggcgctgcacggcgccgccgtgctgctcaggattggggctgactgggactggttcgtcacgctcagctcctgggactatcctctcgtcacgcaggacgatctcttttatgcattttcttctgtaccaaggcacctcaactttattgatcacacaagtaacctcggatggaaagagcatgaaaggtttgaaaaacttattgtcgacgcaagtctatatatggacaagaatacccagccctttcctgcgacagaaacaagacaaatgcctgaggcattcaagatattcacaggctctccatgggtaattctgagtaggaacttcactgaacattgcgtgcatggctgggacaacctcccccgcaggctactgatgtactttgccaacgctgcttactccatggaatcatatttccagactgtcatatgcagttcatctgactttagaaacaccactgtcaacggcgatctacgtttctttgtttgggacgatcctcctgggctggagccgcgtattcttgatgaaacgcatctcgataacatggtgaacagcagcgctgccttcgcaaggcggtttgtggaggaagcaccagtgctgaagaaggttgatgatgagctactgaaccgttcttcggcccagttggttcctggtgtgtggtgccggaatttgggtgaaaagcaaggaggcggggatgtggaggcgtgctcggaatggggcgacattaacgttgtcaggcctgggcgtgctggagagcggttgaggcgcttcatatctgagatcattcatataagaggatgcacggtcgcagcagctagctgaaagccgaacccaccacaagtctggaattctttgtcaagagagcagttaaacaaagaatttaaggaacacattcttcgctgcaggtaaagcacgcgttgctgcagtcgacagttctaccaggctgcataataccactgacgctccttctacacaaactaggtacaagtattttcgaacgaagggaactgtataaagctgtaactgatttgccctttttttaaccatatggataggacatagaataggttacactgcagtagttacagt

SEQ ID NO: 11826 - protein, 458 aa, Triticum aestivum
  misc_feature (1)..(458): Ceres Seq. ID no. 13657790
IQFQNHALVDDGHLAAAVTRTVSPYHSLPRFQFRTPHAAGRAGQTSQNMKLGAMGSCRLPPAIAAAALAAAALLVLFRASPYGLAYPRAGVQPGPPLVARGPGSPPSFAYWISGTGGEGRRVLRLLRAVYHPRNRYLLHLDAGASRDERTELAAAARDEAAWREFSNVDVVGESYAVDRTGSSVLAAALHGAAVLLRIGADWDWFVTLSSWDYPLVTQDDLFYAFSSVPRHLNFIDHTSNLGWKEHERFEKLIVDASLYMDKNTQPFPATETRQMPEAFKIFTGSPWVILSRNFTEHCVHGWDNLPRRLLMYFANAAYSMESYFQTVICSSSDFRNTTVNGDLRFFVWDDPPGLEPRILDETHLDNMVNSSAAFARRFVEEAPVLKKVDDELLNRSSAQLVPGVWCRNLGEKQGGGDVEACSEWGDINVVRPGRAGERLRRFISEIIHIRGCTVAAAS

SEQ ID NO: 11827 - protein, 410 aa, Triticum aestivum
  misc_feature (1)..(410): Ceres Seq. ID no. 13657791
MKLGAMGSCRLPPAIAAAALAAAALLVLFRASPYGLAYPRAGVQPGPPLVARGPGSPPSFAYWISGTGGEGRRVLRLLRAVYHPRNRYLLHLDAGASRDERTELAAAARDEAAWREFSNVDVVGESYAVDRTGSSVLAAALHGAAVLLRIGADWDWFVTLSSWDYPLVTQDDLFYAFSSVPRHLNFIDHTSNLGWKEHERFEKLIVDASLYMDKNTQPFPATETRQMPEAFKIFTGSPWVILSRNFTEHCVHGWDNLPRRLLMYFANAAYSMESYFQTVICSSSDFRNTTVNGDLRFFVWDDPPGLEPRILDETHLDNMVNSSAAFARRFVEEAPVLKKVDDELLNRSSAQLVPGVWCRNLGEKQGGGDVEACSEWGDINVVRPGRAGERLRRFISEIIHIRGCTVAAAS

SEQ ID NO: 11828 - protein, 405 aa, Triticum aestivum
  misc_feature (1)..(405): Ceres Seq. ID no. 13657792
MGSCRLPPAIAAAALAAAALLVLFRASPYGLAYPRAGVQPGPPLVARGPGSPPSFAYWISGTGGEGRRVLRLLRAVYHPRNRYLLHLDAGASRDERTELAAAARDEAAWREFSNVDVVGESYAVDRTGSSVLAAALHGAAVLLRIGADWDWFVTLSSWDYPLVTQDDLFYAFSSVPRHLNFIDHTSNLGWKEHERFEKLIVDASLYMDKNTQPFPATETRQMPEAFKIFTGSPWVILSRNFTEHCVHGWDNLPRRLLMYFANAAYSMESYFQTVICSSSDFRNTTVNGDLRFFVWDDPPGLEPRILDETHLDNMVNSSAAFARRFVEEAPVLKKVDDELLNRSSAQLVPGVWCRNLGEKQGGGDVEACSEWGDINVVRPGRAGERLRRFISEIIHIRGCTVAAAS

SEQ ID NO: 11829 - DNA, 1535 bp, Triticum aestivum
  misc_feature (1)..(1535): Ceres Seq. ID no. 13657850
cccacctagaacatcctaatcgataagccgtcgtcctcgtcctcgccttccccatcaagctaaaacctccctcttttcgtcgaatccagccaccatgaaaccctaagaccaccgtcctcccgaatcctccattgccctccccgatgcaggcgttcgcgcgcctctcctcccccgccgcctccagaaaggtgatttcgggcgtctctggagcggtcgcaaggccgtgctaccggacatggcggtggaaggcgcatgcggcgccgctgtcggctccgggcccacccaagggcaagaagagggaatacatatccaagaatgaaaggaaggctaggatgaaggagtttattgagggttatcaggcatcaaatgacggtagatttccgactatgcaaatgattcgtcaaagtgttggagggggtcactacacaattagggatgtactctcggaagtgaagtataaccagataaagtttccgtttgataagtctaaggcagcccagcttcaggagacagctgaaggtgctgagcagtcaaggccagaggaggagagtggaaacagttcatttaactctcagagctttaacggaaatcaggatgaagatgacacgctcctatcccagaaagattctcctgctggcaatacaatcatggaaaacactgaagcttccatatctttggacgcaaaggaggtgaagttaccgctatataactccgaggcagcccagctccatgagacaggtgaatgtgctgagcaatcaaggctcggggaaagcgggagcagtgcattgaacccagatgacacactcctctcccagaaagactctgctatgggcactacaatcatagaaaacaatcaaccattgggatctctagagtcacaagactcctctcattacagtggagaaactgaggttgccaagcaagattcatgtactgcagcagcagatgcaaatgacctgactgtatcgaaacaagcagaaattgatggcatgaagactgaagcacccatatctttggaactggagactaagtcagacaacgggaatcgtcaaggggaaactgaagttaacaaggtgcattcgaacaatgtgaaaaaattccaggatccaactgaaccaactgtatctgatcaaactgaacatgacatagtgatcaaaggaaatgtacttcacagagaagagaaccccgaggtcgaggagcagggatcaagcaagacaagtcttttagggagcctgaaatcgcttgcttctgggatcagaaacttctggagaaatctgtaaatttgtctcattttggcttggagctaacacacatgaagtccccttatttatcattttgtgagcctggagcagcttgtgaagctttgtcaaggctacagagttaatgatccaagtgccccttgtttagtgttttttgcgaggctgaagaaagctgtaaagttttattttttgcactactgaacactggtctgactcctgcaaaaaaaaaaaaaaaaaagcttatcgataccgtcgacctcgagggggggcccggta

SEQ ID NO: 11830 - protein, 378 aa, Triticum aestivum
  misc_feature (1)..(378): Ceres Seq. ID no. 15219880
MQAFARLSSPAASRKVISGVSGAVARPCYRTWRWKAHAAPLSAPGPPKGKKREYISKNERKARMKEFIEGYQASNDGRFPTMQMIRQSVGGGHYTIRDVLSEVKYNQIKFPFDKSKAAQLQETAEGAEQSRPEEESGNSSFNSQSFNGNQDEDDTLLSQKDSPAGNTIMENTEASISLDAKEVKLPLYNSEAAQLHETGECAEQSRLGESGSSALNPDDTLLSQKDSAMGTTIIENNQPLGSLESQDSSHYSGETEVAKQDSCTAAADANDLTVSKQAEIDGMKTEAPISLELETKSDNGNRQGETEVNKVHSNNVKKFQDPTEPTVSDQTEHDIVIKGNVLHREENPEVEEQGSSKTSLLGSLKSLASGIRNFWRNL

SEQ ID NO: 11831 - protein, 315 aa, Triticum aestivum
  misc_feature (1)..(315): Ceres Seq. ID no. 15219881
MKEFIEGYQASNDGRFPTMQMIRQSVGGGHYTIRDVLSEVKYNQIKFPFDKSKAAQLQETAEGAEQSRPEEESGNSSFNSQSFNGNQDEDDTLLSQKDSPAGNTIMENTEASISLDAKEVKLPLYNSEAAQLHETGECAEQSRLGESGSSALNPDDTLLSQKDSAMGTTIIENNQPLGSLESQDSSHYSGETEVAKQDSCTAAADANDLTVSKQAEIDGMKTEAPISLELETKSDNGNRQGETEVNKVHSNNVKKFQDPTEPTVSDQTEHDIVIKGNVLHREENPEVEEQGSSKTSLLGSLKSLASGIRNFWRNL

SEQ ID NO: 11832 - protein, 297 aa, Triticum aestivum
  misc_feature (1)..(297): Ceres Seq. ID no. 15219882
MQMIRQSVGGGHYTIRDVLSEVKYNQIKFPFDKSKAAQLQETAEGAEQSRPEEESGNSSFNSQSFNGNQDEDDTLLSQKDSPAGNTIMENTEASISLDAKEVKLPLYNSEAAQLHETGECAEQSRLGESGSSALNPDDTLLSQKDSAMGTTIIENNQPLGSLESQDSSHYSGETEVAKQDSCTAAADANDLTVSKQAEIDGMKTEAPISLELETKSDNGNRQGETEVNKVHSNNVKKFQDPTEPTVSDQTEHDIVIKGNVLHREENPEVEEQGSSKTSLLGSLKSLASGIRNFWRNL

SEQ ID NO: 11833 - DNA, 1683 bp, Triticum aestivum
  misc_feature (1)..(1683): Ceres Seq. ID no. 13657964
ttctgccgctcctgaatctccgccgcccgcgtgctccccggcacccaggaaacggccatgccgacgaccctagagggcggccccgccgccgcgccaccgctgccccgcgcgcgcgtggagctggagctggagctcccgctcggcgcggcgccgttcgacctggaagcggccgtgtgcagccacgggctgttcatgatggcgcccaaccgctgggacccggcctcccgcgcgctcctccgcccgctccgcctcgcctccgaccgctccaggtccctgctcgcccgcgtctcccgccaccccgcgcgcccctcccgctccctcctcgtctccctcttcggcgccgacgccctctccccgctcgaccaggactgcatcctcgagcaagtgcggcggatgctgcggctgtcggaggaggacggcagggtggtggcggagttccaggcgatgcacgccgccgcgagggaggcggggttcggccgcatcttccgctcgcccacgctgttcgaggacatggtcaagtgcatcctcctctgcaattgccaatggacaagaacattggcaatggctactgcgctgtgcgagcttcagttggagttgagacattcatctggtactgaagttcttgagttaaggacacctccaatcagggagcttaaaaggaagcgcggcaagaatcggaatgtccgtgtcaagctagaaacaaagtttaccgagttggagtgcttggaggatccaagagtagaaaccgcggaggatgcaagagtggcaactggtactagcgatgtcataacacatttggaaacggatgaaaaatcggctagcttgccccaagttgcgcctgaaacaggcagtgcatgtcagtcatttgattcttcagagctcagcttggaaggttgcattggagatttccctactccggaagaattggcgtatctggatgaagacttcttagcgaaatgctgtaaccttggatatcgagcggagcggattgtgttgcttgcacgcagcattgtggaaggaaaggtatgcctacaaaatcttgaagaaatgcagaaaatgtctttaccagctacagaagagctatctactatcccgtctacctatgaaagactgaataacgagttaaccactatctccggattcggccctttcactcgtgccaatgtgctcatgtgcatgggatttttccacatgatcccagctgataccgagacaattaggcatttaaagcagtgtcataaaattgcaagcaccatcaaatctgttcatatggaattggataaaatctacggcgagtatgctccatttcagttcttagcatactggttcgagctatggggcttctatgacaagcaatttgggaagatcgctgagatggatccgtccacatataggctatttactgcaagcgctttaaagaagcaacatcggttagttaggaaatagagcctttctttcgtttgtgaaaggggccctgccaaaatcaacttacaacatagaggaattttgagattgttgtagttgctgcctgttctagtaagcagaaagtccgtagcctattttccccttcatgaatgcatctcatactttaggggaacagagtcctgcaagtttttagtttgtagcattccagactgaactaatgtgttatcaggtacttcaattaatttagtggtcaacttt

SEQ ID NO: 11834 - protein, 462 aa, Triticum aestivum
  misc_feature (1)..(462): Ceres Seq. ID no. 13657965
MPTTLEGGPAAAPPLPRARVELELELPLGAAPFDLEAAVCSHGLFMMAPNRWDPASRALLRPLRLASDRSRSLLARVSRHPARPSRSLLVSLFGADALSPLDQDCILEQVRRMLRLSEEDGRVVAEFQAMHAAAREAGFGRIFRSPTLFEDMVKCILLCNCQWTRTLAMATALCELQLELRHSSGTEVLELRTPPIRELKRKRGKNRNVRVKLETKFTELECLEDPRVETAEDARVATGTSDVITHLETDEKSASLPQVAPETGSACQSFDSSELSLEGCIGDFPTPEELAYLDEDFLAKCCNLGYRAERIVLLARSIVEGKVCLQNLEEMQKMSLPATEELSTIPSTYERLNNELTTISGFGPFTRANVLMCMGFFHMIPADTETIRHLKQCHKIASTIKSVHMELDKIYGEYAPFQFLAYWFELWGFYDKQFGKIAEMDPSTYRLFTASALKKQHRLVRK

SEQ ID NO: 11835 - protein, 417 aa, Triticum aestivum
  misc_feature (1)..(417): Ceres Seq. ID no. 13657966
MMAPNRWDPASRALLRPLRLASDRSRSLLARVSRHPARPSRSLLVSLFGADALSPLDQDCILEQVRRMLRLSEEDGRVVAEFQAMHAAAREAGFGRIFRSPTLFEDMVKCILLCNCQWTRTLAMATALCELQLELRHSSGTEVLELRTPPIRELKRKRGKNRNVRVKLETKFTELECLEDPRVETAEDARVATGTSDVITHLETDEKSASLPQVAPETGSACQSFDSSELSLEGCIGDFPTPEELAYLDEDFLAKCCNLGYRAERIVLLARSIVEGKVCLQNLEEMQKMSLPATEELSTIPSTYERLNNELTTISGFGPFTRANVLMCMGFFHMIPADTETIRHLKQCHKIASTIKSVHMELDKIYGEYAPFQFLAYWFELWGFYDKQFGKIAEMDPSTYRLFTASALKKQHRLVRK

SEQ ID NO: 11836 - protein, 416 aa, Triticum aestivum
  misc_feature (1)..(416): Ceres Seq. ID no. 13657967
MAPNRWDPASRALLRPLRLASDRSRSLLARVSRHPARPSRSLLVSLFGADALSPLDQDCILEQVRRMLRLSEEDGRVVAEFQAMHAAAREAGFGRIFRSPTLFEDMVKCILLCNCQWTRTLAMATALCELQLELRHSSGTEVLELRTPPIRELKRKRGKNRNVRVKLETKFTELECLEDPRVETAEDARVATGTSDVITHLETDEKSASLPQVAPETGSACQSFDSSELSLEGCIGDFPTPEELAYLDEDFLAKCCNLGYRAERIVLLARSIVEGKVCLQNLEEMQKMSLPATEELSTIPSTYERLNNELTTISGFGPFTRANVLMCMGFFHMIPADTETIRHLKQCHKIASTIKSVHMELDKIYGEYAPFQFLAYWFELWGFYDKQFGKIAEMDPSTYRLFTASALKKQHRLVRK

SEQ ID NO: 11837 - DNA, 1470 bp, Triticum aestivum
  misc_feature (1)..(1470): Ceres Seq. ID no. 13658153
aaaactacttccccatttatcttttcctttcctatctatctggttcctgcagattcaagatctcgagttttgctctgctccaagcaaagccatggcctccgaacagatggtgcatatgagtcaaggacaaggggaaactagctatgctcgcaactccagtttccagaaggctgagcagaacaggatgaaatccctcatagaagcggtcatcgccgacttatgcggcagcagcagtaccttgttgcatggaaaggtagtaatcgcggacttgggatgctcctccggcccaaatgcgctagcactggtatcaactgccatcaatgccatccacagccaatgccttcacttacagcagccaccacctgaagtatgcgtgctactcaacgacctgcctgacaatgacttcaacacggtggtgaagagcttggtcacgctccttcaaagcaaggatcctgttgtcctgaccggtgtcataccggggtcgttttacgagcggctctttactagtgactccttgcatcttgtatgcgcgtccaacagcttgcaatggctctcaaaggctcctgaggatctaacgagaaatcgcatcccagcgttcgatactgatgaacatgttaggcatgaaaggctcccaatcgtccgtgaggcttatgcacatcagttcagggaagatttcacacttttcctgcagctgagagccaaagaattggtctcgggaggccgaatggttatttccctagtagggacgcgttctaatgtaattgcttccaaattctttcttttcccaggaattgtagctcaaattctaagtgtcatggtcactgagggtgtgatcgacaaagaaaagtttgattctttctatgtgcccgtgcatggaccttccggcgaagaggtgagagaaatcattgaagaagagggctccttttccaccagggagatgcgggtgcacgaccctacgaccgaaatgaacactgctctgagcaccccaaggaagttcgtcaataatctgagagccttattcgagccgataatagtccagcattttggagacattatggatgaatttgtgaggactgcggagctgcactggagcctggatccggatgggagcttgcaagaggagcgggccagaacctctcgagctacgctggttgtatccctcgcaaaggtgtcatgatgaagtaaaggtgcctgaagattacatgcaccgaatttcataaaattgtactattgcttactttgaagcaacaatgtgtgcccatttaattgtgtgaactactgtagtagtggtgttccgtgaatgtactcatggatgcaccaaatgaacttccatctcgcatataaataagcaaaatgccgttgcgtgtgcaatgtggtgtgatgtatggtgtgcacaaattcagccagacatttgtgtcatgtatctgttttagtaagatctgcaatgagagtgaagcagccagaaattcc

SEQ ID NO: 11838 - protein, 391 aa, Triticum aestivum
  misc_feature (1)..(391): Ceres Seq. ID no. 13658154
KLLPHLSFPFLSIWFLQIQDLEFCSAPSKAMASEQMVHMSQGQGETSYARNSSFQKAEQNRMKSLIEAVIADLCGSSSTLLHGKVVIADLGCSSGPNALALVSTAINAIHSQCLHLQQPPPEVCVLLNDLPDNDFNTVVKSLVTLLQSKDPVVLTGVIPGSFYERLFTSDSLHLVCASNSLQWLSKAPEDLTRNRIPAFDTDEHVRHERLPIVREAYAHQFREDFTLFLQLRAKELVSGGRMVISLVGTRSNVIASKFFLFPGIVAQILSVMVTEGVIDKEKFDSFYVPVHGPSGEEVREIIEEEGSFSTREMRVHDPTTEMNTALSTPRKFVNNLRALFEPIIVQHFGDIMDEFVRTAELHWSLDPDGSLQEERARTSRATLVVSLAKVS

SEQ ID NO: 11839 - protein, 361 aa, Triticum aestivum
  misc_feature (1)..(361): Ceres Seq. ID no. 13658155
MASEQMVHMSQGQGETSYARNSSFQKAEQNRMKSLIEAVIADLCGSSSTLLHGKVVIADLGCSSGPNALALVSTAINAIHSQCLHLQQPPPEVCVLLNDLPDNDFNTVVKSLVTLLQSKDPVVLTGVIPGSFYERLFTSDSLHLVCASNSLQWLSKAPEDLTRNRIPAFDTDEHVRHERLPIVREAYAHQFREDFTLFLQLRAKELVSGGRMVISLVGTRSNVIASKFFLFPGIVAQILSVMVTEGVIDKEKFDSFYVPVHGPSGEEVREIIEEEGSFSTREMRVHDPTTEMNTALSTPRKFVNNLRALFEPIIVQHFGDIMDEFVRTAELHWSLDPDGSLQEERARTSRATLVVSLAKVS

SEQ ID NO: 11840 - protein, 356 aa, Triticum aestivum
  misc_feature (1)..(356): Ceres Seq. ID no. 13658156
MVHMSQGQGETSYARNSSFQKAEQNRMKSLIEAVIADLCGSSSTLLHGKVVIADLGCSSGPNALALVSTAINAIHSQCLHLQQPPPEVCVLLNDLPDNDFNTVVKSLVTLLQSKDPVVLTGVIPGSFYERLFTSDSLHLVCASNSLQWLSKAPEDLTRNRIPAFDTDEHVRHERLPIVREAYAHQFREDFTLFLQLRAKELVSGGRMVISLVGTRSNVIASKFFLFPGIVAQILSVMVTEGVIDKEKFDSFYVPVHGPSGEEVREIIEEEGSFSTREMRVHDPTTEMNTALSTPRKFVNNLRALFEPIIVQHFGDIMDEFVRTAELHWSLDPDGSLQEERARTSRATLVVSLAKVS

SEQ ID NO: 11841 - DNA, 549 bp, Triticum aestivum
  misc_feature (1)..(549): Ceres Seq. ID no. 13658217
atccaaacgttgcgagctgccaagcgactccaacagtcgaactaggtggagcagtcgaggtcggcgcgagcgagcaaccaatggaggagaagctgtcagaggcgtcgaagcgggcggccccgtcgcccatccagcagctctcccacctcgcgcagcgcgtcggggccgtcaacctcgccgaggggttccccgacttccccgcgcccgcccacgtcaaggccgccgccgccgccgccatcgccgccgacctcaaccagtacaggcatgtgcagggagtctgcgacgtcctcgcggcgaccatgaaacgggaccacggcttcgatgtcgaccccctcacggacttcgccatctgctgcgggcaatccgaggcctttgccgcggcagtatttgcaattatagacccaggggatgaggttctcctctttgacccggcttacgaaacgtatcaaacatgcattgagctggcccggggcgtccctgtgtatgtgccattggatccaccttcttggacactggatgcggataaatttctgaagtggtttactagtc

SEQ ID NO: 11842 - protein, 182 aa, Triticum aestivum
  misc_feature (1)..(182): Ceres Seq. ID no. 13658218
PNVASCQATPTVELGGAVEVGASEQPMEEKLSEASKRAAPSPIQQLSHLAQRVGAVNLAEGFPDFPAPAHVKAAAAAAIAADLNQYRHVQGVCDVLAATMKRDHGFDVDPLTDFAICCGQSEAFAAAVFAIIDPGDEVLLFDPAYETYQTCIELARGVPVYVPLDPPSWTLDADKFLKWFTS

SEQ ID NO: 11843 - protein, 156 aa, Triticum aestivum
  misc_feature (1)..(156): Ceres Seq. ID no. 13658219
MEEKLSEASKRAAPSPIQQLSHLAQRVGAVNLAEGFPDFPAPAHVKAAAAAAIAADLNQYRHVQGVCDVLAATMKRDHGFDVDPLTDFAICCGQSEAFAAAVFAIIDPGDEVLLFDPAYETYQTCIELARGVPVYVPLDPPSWTLDADKFLKWFTS

SEQ ID NO: 11844 - protein, 136 aa, Triticum aestivum
  misc_feature (1)..(136): Ceres Seq. ID no. 13658220
SKRCELPSDSNSRTRWSSRGRRERATNGGEAVRGVEAGGPVAHPAALPPRAARRGRQPRRGVPRLPRARPRQGRRRRRHRRRPQPVQACAGSLRRPRGDHETGPRLRCRPPHGLRHLLRAIRGLCRGSICNYRPRG

SEQ ID NO: 11845 - DNA, 1662 bp, Triticum aestivum
  misc_feature (1)..(1662): Ceres Seq. ID no. 13658411
ttttagagttcaggattgaaacataaacttttgaaggctggaccatatacaaactcactgaaaaagagacccctcgcgtcgctcccgcgagcgaccgaggggataaccctagccgccggcgcgcgtccctcctcccccctcccccccctcgccgccgcctgtccgcgccgccgggcaaagcccggtgggtgctggcggcggcggggccctttctctccccgctcgtggaggctggcgcgggcgggctctcccgggcgacggcgcggcgcggatccggggcgcggcggcgcatggctgcgctcggcgtcggtgtgcggcacggcaggcctggcgcggagggctggacgcgggtgggtgacgcgcttgtgcccgagacggcggtggcttcggcgcggtcagatctggctcaagacggcgcgggctgcgggcggcgcgggctgcaggtggccacctctctgtcgtggtcgcggcaggtggtggtgacttcgcggcagttggtggtggtggtgcgggccggaggttggggacgacggccgcggcggctctttcggatccgacctcccggctgcgtgggccgagaaggcttgggctgtgggcagcggccctgaccgaggccccctcggctggtcggggtggcggcgcactggcggtggctgcgggggttcgttcccggcggctgctgtggtggtggcaggttgattgcggcggcggccagattttcctggcgtcggcccgtctgtaggctgcctgtatcggccctcgacccctttcctcggcgtccgttcgcttctctcccggagggctggccttctcccggctgcggtccatcatccgtcttgcacccggtgccataggaccgagctggtctcgcgcccggcagcaggaccggctcgtctcgcgcccggcagcaggactgcgctcgtctcgcgcccggcagcaggaccggcccgtctcgtgcccggcggcaggactgtgctcgtctcgcgcccgatgtagcaggacggctcgatggaggcttgttgtggccagcctattgggtctcggcgttgggaccggccaggggtgtgaaaggcggatcctttccgcccgtctctacggtgggggtagcggtggggctcgggggacttggtgtcagggtcttggattccggggcggcggccttggtggtggtggcgcggtgctcatgggcagagctcgtgccttggtgctgcccggctaccacggccgtgtgggcggcgtggtagccggggtgtggcgttcggtggcggtgaaggttggccggggtgaaaacctactctatcttcggacggactggcgacggcgaagatcgctcccttcttgaaggcgtcgtcgcggctatcactgcccgtcgtggtgctccaggggaaactctgatcctcggatcgggcggtggcgactctccagtgccgtatccttcctgaaggcaccgccttggagcccacgattcgtcatatgcggccttacttcttcggatgaagccctcggcggctcttgtagtgctagggtgtgtgttgctgcgctcagcgcctatgtatcatgccttgggtgcgtgtgtgtgtgtttgtggtgggtgtgtgcggttgtaccgggcgttgtggatctttgctttatatataaagcggggcgaaagcctttttcggt

SEQ ID NO: 11846 - protein, 105 aa, Triticum aestivum
  misc_feature (1)..(105): Ceres Seq. ID no. 15220635
MAALGVGVRHGRPGAEGWTRVGDALVPETAVASARSDLAQDGAGCGRRGLQVATSLSWSRQVVVTSRQLVVVVRAGGWGRRPRRLFRIRPPGCVGREGLGCGQRP

SEQ ID NO: 11847 - protein, 56 aa, Triticum aestivum
  misc_feature (1)..(56): Ceres Seq. ID no. 15220636
MKPSAALVVLGCVLLRSAPMYHALGACVCVCGGCVRLYRALWIFALYIKRGESLFR

SEQ ID NO: 11848 - protein, 52 aa, Triticum aestivum
  misc_feature (1)..(52): Ceres Seq. ID no. 15220637
MGRARALVLPGYHGRVGGVVAGVWRSVAVKVGRGENLLYLRTDWRRRRSLPS

SEQ ID NO: 11849 - DNA, 1732 bp, Triticum aestivum
  misc_feature (1)..(1732): Ceres Seq. ID no. 13658498
ctagaacmyccctmmtcgwtaaaacatgagcccatccaaagccgtgaccagtagccataacctgctccattaacacccacacccgcagagaaataagacaccaccggctcgggctctggtaatcaggcaggctcaatcagtgggaataagttgatgatctgtcgtctctaagccgcccgccacgacgcgccatcctccaccacctccctcttaaaagcccccgcttccttgcttcttcaagcccaattccccgcccgctccctccgtccaccgccacccaagagagagaggctctctagattctagccccgcagcaacattagccccatggtgtccttcctgctgggcgccgccgtggccaccgtctgcgtcctcttcttcatgtccgccagccccggccgcagcctcgtcgacgtcgccgcatggagccacaacaacggcaccgccgcccagcaccaccaccacctgcgctccgtcgccgacgacgccgacgccgcccgcaacctctccgtcgtcgtcgccgctccggcacccgcccccgtccaggcgtcgccgtacggggacctggaggaggtgctggcgcgggcggcgacggcggaccggacggtgatcatgacgcagatcaacgcggcgtggaccaagccgggctcgctgctggacctcttcttcgagagcttccgcaccggggagggcggcgtggcgcgcctgctcgaccacctcgtcatcgtcaccatggacccggcggcgtacgcggggtgccagctcgtgcacccgcactgctactttctcaggacgaccggcgtcgactaccgcggcgagaagttcttcatgagcaaggactacctcgagatgatgtggggccgcaacaagttccagcagaccatcctccagctcggatacaacttcctcttcacggacgtggacgtgatgtggttccgtgacccgttcaagcacatctccatgggggcggacatcgccatctccagcgacgtcttcatgggggacccctacagcctcggcaacttccccaacggcggcttcctcttcgtgcgctcctgcaacaagaccatcgagttctaccgccactggcaggccggccgctaccgcttcttcggcaagcacgagcaggacgtgttcaacctcatcaagcacgacatgacggaccgcctcggcgtcgccatccagttcctcgacaccacctacatcagcggcttctgtcagctcagcagggacctcaacaagatctgcaccctgcacgccaactgctgcgtcgggctcggggccaagctgcatgatttgaggaatgtgctggacgtgtggaggaactacacggcggcgccggtgcccgacaagagggccggcaagttccagtggaaggtgcccgggatatgcatccactgatccaactcatggatgagttggttgcccattctttctgttcttcttgcttcgccttctccttctcgtggaaagagagggaggggattgagagggtcagcatcgatcgattgattcattttgtgaaatcatttcagctagatgattattactccctcttatattagtttacggagggagtagtaagttattatactatatatgtacacaaacatacacagagtagcagtactccagtatgcgtgcagcacatgcatgcatgtatgctggtcctggccgaccctccctggcctgtaattaaagatgaatgagtaaagcagtagcctgtttatgc

SEQ ID NO: 11850 - protein, 357 aa, Triticum aestivum
  misc_feature (1)..(357): Ceres Seq. ID no. 15220638
MVSFLLGAAVATVCVLFFMSASPGRSLVDVAAWSHNNGTAAQHHHHLRSVADDADAARNLSVVVAAPAPAPVQASPYGDLEEVLARAATADRTVIMTQINAAWTKPGSLLDLFFESFRTGEGGVARLLDHLVIVTMDPAAYAGCQLVHPHCYFLRTTGVDYRGEKFFMSKDYLEMMWGRNKFQQTILQLGYNFLFTDVDVMWFRDPFKHISMGADIAISSDVFMGDPYSLGNFPNGGFLFVRSCNKTIEFYRHWQAGRYRFFGKHEQDVFNLIKHDMTDRLGVAIQFLDTTYISGFCQLSRDLNKICTLHANCCVGLGAKLHDLRNVLDVWRNYTAAPVPDKRAGKFQWKVPGICIH

SEQ ID NO: 11851 - protein, 339 aa, Triticum aestivum
  misc_feature (1)..(339): Ceres Seq. ID no. 15220639
MSASPGRSLVDVAAWSHNNGTAAQHHHHLRSVADDADAARNLSVVVAAPAPAPVQASPYGDLEEVLARAATADRTVIMTQINAAWTKPGSLLDLFFESFRTGEGGVARLLDHLVIVTMDPAAYAGCQLVHPHCYFLRTTGVDYRGEKFFMSKDYLEMMWGRNKFQQTILQLGYNFLFTDVDVMWFRDPFKHISMGADIAISSDVFMGDPYSLGNFPNGGFLFVRSCNKTIEFYRHWQAGRYRFFGKHEQDVFNLIKHDMTDRLGVAIQFLDTTYISGFCQLSRDLNKICTLHANCCVGLGAKLHDLRNVLDVWRNYTAAPVPDKRAGKFQWKVPGICIH

SEQ ID NO: 11852 - protein, 262 aa, Triticum aestivum
  misc_feature (1)..(262): Ceres Seq. ID no. 15220640
MTQINAAWTKPGSLLDLFFESFRTGEGGVARLLDHLVIVTMDPAAYAGCQLVHPHCYFLRTTGVDYRGEKFFMSKDYLEMMWGRNKFQQTILQLGYNFLFTDVDVMWFRDPFKHISMGADIAISSDVFMGDPYSLGNFPNGGFLFVRSCNKTIEFYRHWQAGRYRFFGKHEQDVFNLIKHDMTDRLGVAIQFLDTTYISGFCQLSRDLNKICTLHANCCVGLGAKLHDLRNVLDVWRNYTAAPVPDKRAGKFQWKVPGICIH

SEQ ID NO: 11853 - DNA, 1555 bp, Triticum aestivum
  misc_feature (1)..(1555): Ceres Seq. ID no. 13658514
cactcatgggagtctggaattcataggccctttgaggctcaaatggaagaggggcgcattcgtcttgtggagctacttcggaggtccatgattagtgcaagaaaagcagatctcaaaaacatccctccttgcataaaaagaataacatttgtagacttcagtgaagggcatgcgaaaagttacaatgaactggttgttactattcgccggaatatactgatggctgattggaatgacccttcccatgttgaatcacttctgaatcccaagcagtggaaatttcgtactactactataagaaatgtccggttgtcttgctgtgttgctgggcatattaaagtagcagaggctggtcatgatatacaagaaactatggatgagttgatgcaggggggtcttgatccttcttcagaggaatatcaatccataagatttgctcttttaaatggcaccgattgtatcaggtgtcgagattggtgccgcttacctgttataacaccttgtcggcatctgctgtgccatgattgtgtagctttggatagtgagaaatgcatagaatgtgggaacaactacgagatgcagtctcccgaaactcgtgcacgtccagaaaatccaaacccaaaatggccagtcccaaaggatctaattgaactgcagccttcatataagcaggatgactgggatccagattggcagtcaacgactagcagcaaagttgcttacttgatcgacaagttgagaagtttgcgagaagctaacatgaaacatgtgcactcgactaacataaccattggtgctggtcctgctactacatcgtcttatcaagatgataataacacgcagaccaggttaccacaggcattgcctgacaaagtaattatattctctcagtttctggagcatattcatgttattgagcagcagctgactattgctggagtaacatacgctggaatgtacagtcccatgcctttaggcactaagagaagcgcattgacgaagtttaaagaggatccaacatgcatggctttactgatggatggcactgcagcactgggccttgatttgagttttgtgaatcatgtttttctgatggaacccatttgggacaggagtatggaggagcaagttattagtcgcgcgcatagaatgggtgcaacccgtccaataaatgtcgagaccctggctatgcgcggtaccatcgaggagcaaatgctccaacttctgcaggactctagcgcctgcagaaatatggtcaataaaggtggaggcggcaccgagaatgaaggggctcggcctcaccgcagcctgcacgatttcgccgagagtagttatcttgcgaaactcaccttcgtgaagggatctaacacggcatgcatggatgcttagtatgaattgagctgtcaccataagttctttgtttgtttcttttgttttgagatattagcgaggtccttccaagtcattcttttgcagcagaaataaacagaactctgatggtcgttcggtgggaactatgcgcttttcctttcaacagatgttcttgtttttcgct

SEQ ID NO: 11854 - protein, 462 aa, Triticum aestivum
  misc_feature (1)..(462): Ceres Seq. ID no. 15220647
HSWESGIHRPFEAQMEEGRIRLVELLRRSMISARKADLKNIPPCIKRITFVDFSEGHAKSYNELVVTIRRNILMADWNDPSHVESLLNPKQWKFRTTTIRNVRLSCCVAGHIKVAEAGHDIQETMDELMQGGLDPSSEEYQSIRFALLNGTDCIRCRDWCRLPVITPCRHLLCHDCVALDSEKCIECGNNYEMQSPETRARPENPNPKWPVPKDLIELQPSYKQDDWDPDWQSTTSSKVAYLIDKLRSLREANMKHVHSTNITIGAGPATTSSYQDDNNTQTRLPQALPDKVIIFSQFLEHIHVIEQQLTIAGVTYAGMYSPMPLGTKRSALTKFKEDPTCMALLMDGTAALGLDLSFVNHVFLMEPIWDRSMEEQVISRAHRMGATRPINVETLAMRGTIEEQMLQLLQDSSACRNMVNKGGGGTENEGARPHRSLHDFAESSYLAKLTFVKGSNTACMDA

SEQ ID NO: 11855 - protein, 448 aa, Triticum aestivum
  misc_feature (1)..(448): Ceres Seq. ID no. 15220648
MEEGRIRLVELLRRSMISARKADLKNIPPCIKRITFVDFSEGHAKSYNELVVTIRRNILMADWNDPSHVESLLNPKQWKFRTTTIRNVRLSCCVAGHIKVAEAGHDIQETMDELMQGGLDPSSEEYQSIRFALLNGTDCIRCRDWCRLPVITPCRHLLCHDCVALDSEKCIECGNNYEMQSPETRARPENPNPKWPVPKDLIELQPSYKQDDWDPDWQSTTSSKVAYLIDKLRSLREANMKHVHSTNITIGAGPATTSSYQDDNNTQTRLPQALPDKVIIFSQFLEHIHVIEQQLTIAGVTYAGMYSPMPLGTKRSALTKFKEDPTCMALLMDGTAALGLDLSFVNHVFLMEPIWDRSMEEQVISRAHRMGATRPINVETLAMRGTIEEQMLQLLQDSSACRNMVNKGGGGTENEGARPHRSLHDFAESSYLAKLTFVKGSNTACMDA

SEQ ID NO: 11856 - protein, 433 aa, Triticum aestivum
  misc_feature (1)..(433): Ceres Seq. ID no. 15220649
MISARKADLKNIPPCIKRITFVDFSEGHAKSYNELVVTIRRNILMADWNDPSHVESLLNPKQWKFRTTTIRNVRLSCCVAGHIKVAEAGHDIQETMDELMQGGLDPSSEEYQSIRFALLNGTDCIRCRDWCRLPVITPCRHLLCHDCVALDSEKCIECGNNYEMQSPETRARPENPNPKWPVPKDLIELQPSYKQDDWDPDWQSTTSSKVAYLIDKLRSLREANMKHVHSTNITIGAGPATTSSYQDDNNTQTRLPQALPDKVIIFSQFLEHIHVIEQQLTIAGVTYAGMYSPMPLGTKRSALTKFKEDPTCMALLMDGTAALGLDLSFVNHVFLMEPIWDRSMEEQVISRAHRMGATRPINVETLAMRGTIEEQMLQLLQDSSACRNMVNKGGGGTENEGARPHRSLHDFAESSYLAKLTFVKGSNTACMDA

SEQ ID NO: 11857 - DNA, 1706 bp, Triticum aestivum
  misc_feature (1)..(1706): Ceres Seq. ID no. 13658584
ggtggttgctcctagtcgcagacttctttattaatctcaatctggatccgggcacggggagcgattgactgatcgacgagactcgagagcctggagagccgggggtttcgcttctcgttgcgtttggagtcttgccgggtctcggttttcgagcaggcaagaatttccttttaattttgggtgatctgttttcgtgtgctaagattttggatcatcgccccccccagtgttgttcctgctgatttaccgcctggattggattttttttggacgggttacctttaatggggcttctcccttctcgtcgtcgcgaatcagtggactagaacaagaaaccttcccgattggagcggattttctgtggtcgccgcgcttagtttcgaaaggcggcacctttatttgctaccacgctttgctgtggcccaaaagttacccattgtgtctgtttcaagaaatagattgggttttcttttcttttttctgaggtgtttgttttacttggcagatccagggaacaccggttttcctttgattttgccgaaatttttgatctgatcggagcgatcccggagcttcgcaaggagcaaggcatttttctgggggccatggccatggggctcggccgattcacacactggctctggccgggtaacgccgcgcgagttggcaaccacgagctccccggcatcgccttgacgggcgcctccttcccggagttcccctccgggttccgtgaggcggacgctatcgccttctccagtgccgccgccggccgccgcacgcggccgaggagggtcaagaaccagcggcgcagtcgcggggagcccagaatcgacagggagtacgacatggtcatcgtgccgtccgacggcggcgggtgcctttccgggtccgagtccgacgactccgactggtccatcggctggctggagccgcaggcgccggagatgcagacggacggtgaccaggagacctccttcgccgtcctcgtgccctgctaccgccacggccgcgccgagcagcccgcgatgccccagggacgcttccttggcgctggccctctcgccgatggcggcctctctgatattgctgagcttaaccttccaaagacaactaaaatttcttttccaaatggaaaggatgatctcatgaactttgaggccactctacgtcctgatgaaggatactatgtaggtgggacatttactttcaccttccaagtatctccttcctaccctcacgaggctccgaaggtcaagtgcaagactaaggtttaccatcctaatattgacctagaaggaaatgtctgcctgaacattctgcgtgaagactggaagcctgtcttgaacatcaacaccataatatatggtttaaaccttcttttctcacaacccaatgacgaggaccccttgaatcatgaagctgcggccgtcctccgagacaacccacagaagttccagagaaatgttcaaacggcgatgtcgggaggctatgttgataatacccatttcccaaggtgcaagtaaggtctgctatgtggagctctggttccgactcttgcccaattaccctgaatgccgttgcacagtctgaaggatgtggcatgtacccaggaaatgtatcgcatttgtgttagacgtgactgttattatgcttgtttggtggatgtaacggagtcatgcatgttgaagaaacatgctaagcmg

SEQ ID NO: 11858 - protein, 306 aa, Triticum aestivum
  misc_feature (1)..(306): Ceres Seq. ID no. 15219908
MAMGLGRFTHWLWPGNAARVGNHELPGIALTGASFPEFPSGFREADAIAFSSAAAGRRTRPRRVKNQRRSRGEPRIDREYDMVIVPSDGGGCLSGSESDDSDWSIGWLEPQAPEMQTDGDQETSFAVLVPCYRHGRAEQPAMPQGRFLGAGPLADGGLSDIAELNLPKTTKISFPNGKDDLMNFEATLRPDEGYYVGGTFTFTFQVSPSYPHEAPKVKCKTKVYHPNIDLEGNVCLNILREDWKPVLNINTIIYGLNLLFSQPNDEDPLNHEAAAVLRDNPQKFQRNVQTAMSGGYVDNTHFPRCK

SEQ ID NO: 11859 - protein, 304 aa, Triticum aestivum
  misc_feature (1)..(304): Ceres Seq. ID no. 15219909
MGLGRFTHWLWPGNAARVGNHELPGIALTGASFPEFPSGFREADAIAFSSAAAGRRTRPRRVKNQRRSRGEPRIDREYDMVIVPSDGGGCLSGSESDDSDWSIGWLEPQAPEMQTDGDQETSFAVLVPCYRHGRAEQPAMPQGRFLGAGPLADGGLSDIAELNLPKTTKISFPNGKDDLMNFEATLRPDEGYYVGGTFTFTFQVSPSYPHEAPKVKCKTKVYHPNIDLEGNVCLNILREDWKPVLNINTIIYGLNLLFSQPNDEDPLNHEAAAVLRDNPQKFQRNVQTAMSGGYVDNTHFPRCK

SEQ ID NO: 11860 - protein, 225 aa, Triticum aestivum
  misc_feature (1)..(225): Ceres Seq. ID no. 15219910
MVIVPSDGGGCLSGSESDDSDWSIGWLEPQAPEMQTDGDQETSFAVLVPCYRHGRAEQPAMPQGRFLGAGPLADGGLSDIAELNLPKTTKISFPNGKDDLMNFEATLRPDEGYYVGGTFTFTFQVSPSYPHEAPKVKCKTKVYHPNIDLEGNVCLNILREDWKPVLNINTIIYGLNLLFSQPNDEDPLNHEAAAVLRDNPQKFQRNVQTAMSGGYVDNTHFPRCK

SEQ ID NO: 11861 - DNA, 1048 bp, Triticum aestivum
  misc_feature (1)..(1048): Ceres Seq. ID no. 13658590
atcttttgtcctcctcctccgttgcgcagttggctcgcttgcttgcttgctgtaggtgagtgctgctggagacgggagccgggccgaggcggatcggggagaaggtgggaggcgggcgggtggtagatccggcgggcgtggctcgcgagaaggttggtgcgaggttggtggaggaggggagagaaggaggggatggagcggaaggcggtggtggtgtgcgcgctcgtcggcttcctcggcgtcctctccgccgcgctaggcttcgccgccgagggcacccgcgcgcaaggcctcctacctccatgacctcgcccgcaagtatgcgtcggggatcctctccgacgacaacatcgttgccatggacgaccgctccctcgccgccatgctcaccatggtcaacggcatcggcgcctggagtgttcacatgttcatgatcttctccctagcgcgcccggatgtgctcccctccgcggatctcgggatccgcaagggcgtgcagatgctgtatgggctggaggatgtgccccggccgtcgcagatggagaagctctgcgagcgctggcgcccttaccgctccgtcgccgcgtggtacatgtggcgcctcatcgagtccaaggcggcgcagacggcaggggccatgcctgtagtgccacctgcaatgcctgcgcccagtgaggagttcatgctccagcagcaccagcagcagcaccaccatcagcatcagcagcaacagcaacaagctgccatccaaatgctcgatccggttcagatgcttccaggattggggtgaatttggtatatactcgctctgctcatttgttcttgatgtgaaatggatgtcttaaacctgaatttgtcacttcatttgtgtatcattgttctgtatcggttgagaagtgtagcattggacaggaggatctcgaggcaacttcattatcagttatagttggtgttgtgttgttcatttgtaaatttntgctattttagacattgttgccctagacatatttgtatccgacgaataaatttagaccnagctgttatgtcc

SEQ ID NO: 11862 - protein, 143 aa, Triticum aestivum
  misc_feature (1)..(143): Ceres Seq. ID no. 13658591
MDDRSLAAMLTMVNGIGAWSVHMFMIFSLARPDVLPSADLGIRKGVQMLYGLEDVPRPSQMEKLCERWRPYRSVAAWYMWRLIESKAAQTAGAMPVVPPAMPAPSEEFMLQQHQQQHHHQHQQQQQQAAIQMLDPVQMLPGLG

SEQ ID NO: 11863 - protein, 135 aa, Triticum aestivum
  misc_feature (1)..(135): Ceres Seq. ID no. 13658592
MLTMVNGIGAWSVHMFMIFSLARPDVLPSADLGIRKGVQMLYGLEDVPRPSQMEKLCERWRPYRSVAAWYMWRLIESKAAQTAGAMPVVPPAMPAPSEEFMLQQHQQQHHHQHQQQQQQAAIQMLDPVQMLPGLG

SEQ ID NO: 11864 - protein, 132 aa, Triticum aestivum
  misc_feature (1)..(132): Ceres Seq. ID no. 13658593
MVNGIGAWSVHMFMIFSLARPDVLPSADLGIRKGVQMLYGLEDVPRPSQMEKLCERWRPYRSVAAWYMWRLIESKAAQTAGAMPVVPPAMPAPSEEFMLQQHQQQHHHQHQQQQQQAAIQMLDPVQMLPGLG

SEQ ID NO: 11865 - DNA, 581 bp, Triticum aestivum
  misc_feature (1)..(581): Ceres Seq. ID no. 13658607
aaaaccaaaccaaaccaaaccaaaggagaaatcgaaccctatcctctcctccccgcagccgcccaaaaccctagcgccggatctttctctgcagctcctctccccctaccaaccggattcatccgtcaatccatccatccatgatgggggaggccaaggagaacgacgtgtacgaggaggagctgctcgactacgaggaggacgacgacaaggccctcgacgcctcctccaccgccaacgccaagcccgccgccgacgccgcccaggccaagaagggctacgtcggcatccacagctccggattccgcgacttcctcctcaagcccgagctgctccgggccatccaggactgcggattcgagcacccctccgaaggtatactttctcctgacatttcccgttggagggaaatatggtaaaactttccattaacccgggacccagaagcttcactttttactcactggggtgctgctccgattttatttggttccttcctccacatcagtgcaacatgagtgcatccctcaagcaatcctcggaatggtgttaaacacaataaagttggaactggagggggg

SEQ ID NO: 11866 - protein, 129 aa, Triticum aestivum
  misc_feature (1)..(129): Ceres Seq. ID no. 13658608
KPNQTKPKEKSNPILSSPQPPKTLAPDLSLQLLSPYQPDSSVNPSIHDGGGQGERRVRGGAARLRGGRRQGPRRLLHRQRQARRRRRPGQEGLRRHPQLRIPRLPPQARAAPGHPGLRIRAPLRRYTFS

SEQ ID NO: 11867 - protein, 92 aa, Triticum aestivum
  misc_feature (1)..(92): Ceres Seq. ID no. 13658609
MMGEAKENDVYEEELLDYEEDDDKALDASSTANAKPAADAAQAKKGYVGIHSSGFRDFLLKPELLRAIQDCGFEHPSEGILSPDISRWREIW

SEQ ID NO: 11868 - protein, 91 aa, Triticum aestivum
  misc_feature (1)..(91): Ceres Seq. ID no. 13658610
MGEAKENDVYEEELLDYEEDDDKALDASSTANAKPAADAAQAKKGYVGIHSSGFRDFLLKPELLRAIQDCGFEHPSEGILSPDISRWREIW

SEQ ID NO: 11869 - DNA, 719 bp, Triticum aestivum
  misc_feature (1)..(719): Ceres Seq. ID no. 13658677
acatggtaatggattttcaaaagaagaacaggaagcgaaagaccaaggtggaaacctcagacgacgagttatcacaggcgtcacttgatgaacaggcgccacttgatgaacggtcaccaaaagccaatgcggtaaccttaaatgagaagtatcacagacggtctttcctcctgttgtaaacaaaactggcatccagattgaacaggcgccacttggtgaacgagagaagtacattgttgagctggaaaggaagttgagtgaaagggatagagaattggaagctttgaagtttgatcataaaaaggcaggatcttcttgcagtgcagacgaaatagcttgcaaaagacagtgccatggagcgcgaagcgaggatgctcagggagaacacttactttgatgtggatctgtgcagcggcggacgatgctaccgcaagctgatggtgcctgggcttagtggaggatgtttgggaccttgtttgtgcgttttatcttcagctctgagcatcccctttctttcagactttattctctattgctggtgtcgtctgcttttcgccccataacaattgttttgatggtgagcattttctgtgggtttcaaaaaaaaaaaaaaaaaaaaaaaaaaaaaaaaaaaaaaaaaaaaaaaaaaaaaaaaaaaaaaaaggaaaaaaaaaaaaaaaaaggtttatcgataccgccaacctcaagggggggcccgg

SEQ ID NO: 11870 - protein, 86 aa, Triticum aestivum
  misc_feature (1)..(86): Ceres Seq. ID no. 13658678
MFGTLFVRFIFSSEHPLSFRLYSLLLVSSAFRPITIVLMVSIFCGFQKKKKKKKKKKKKKKKKKKKKKEKKKKKGLSIPPTSRGGP

SEQ ID NO: 11871 - protein, 69 aa, Triticum aestivum
  misc_feature (1)..(69): Ceres Seq. ID no. 13658679
MEREARMLRENTYFDVDLCSGGRCYRKLMVPGLSGGCLGPCLCVLSSALSIPFLSDFILYCWCRLLFAP

SEQ ID NO: 11872 - protein, 63 aa, Triticum aestivum
  misc_feature (1)..(63): Ceres Seq. ID no. 13658680
MLRENTYFDVDLCSGGRCYRKLMVPGLSGGCLGPCLCVLSSALSIPFLSDFILYCWCRLLFAP

SEQ ID NO: 11873 - DNA, 2283 bp, Triticum aestivum
  misc_feature (1)..(2283): Ceres Seq. ID no. 13658707
catcctaatcgaaaacmmycmtcccgttaaaacttyatyrwrttsmkcwtgctggggctgctgctgctgctgcttcttcttcttctctctccccaccgcctcccccttcctcatcctcctctctcagtccgaagccgattacttagcagcttgccttcgtcttcctctcctgcggttcctggagctacgtcttctcggcccctgccctttggttcgccgctccgctctcccccttctgccgcaaagggggacactcatggcgagtctagtaagtacgtttatcaccgcttgggttaaggaattcctgtggttttttggccgagaaggtgctcttcacggcgcttccttcccagattggttcagtttggttgttgcacggcgccgtggtgagctagggcgccccactgctattgatttccgccgcttggtgtcctccccaaattcgagatcctcctgttgagatcttgcgatccgacgcgcggtttcttgcttcttgcgaattggatttcctgattgatctggaaatctttttgaagcttcgtgttggattcatggagttgcagtgcaaactagtactgactggttcgtgttcttgtgctgctctgttttgttgcaggtagttctggcatcgctgcttaccgtaattgggctcgcgcagggggaggcgcaatgtgcgcggtacagcgggcggccgcggccacatagcgtgaccatcactgagtttggggccgtcggcgacggcctgaccgtcaatacggtgcccttccagaacgccatcttctacctgcggtcctttgccgacaagggcggcgcacagctgtacgtgcccaaggggcggtggctcaccggcagcttcaacctcaccagccacctcacccttttcctggagaaggacgctgtcatcatcggcaccgaggatgtgacacaatggccaattgtggaacctttgccatcatatggccaaggaattgatcttccgggtgcaaggcatcgcagcttaataaatgggcacaatgttaccgatgtcataattacagggaacaatggaatcgtagacggccagggtttgatatggtggaactggtttcgctcgaataaattgaattatagccggcctcatcttgtggagtttgagtattcggaagaaattgtgatttcgaacttgacattcttagattccccagcatggggtatacatcctgtgtattgcagcaatgtaacaatcagtaatgtcacaatcgagactgaattggatgctccactcaccaatggaattgtcccagattcatgctcgaatctgtgcattgaggacagcataattagtgtcggtcatgatgccatctcattaaaaagtgggtgggacaactatggcattacatttggaaggccaacctcagacattcacattagtagagtggatctgcaagcctcactgggagctgctcttgcatttggcagtgagatgtctggtgggatctcggatgttcatgttgatcacctttatattcatggttcatccaaaggtatctccttcaggacagcaccaggccgtggtggttatataagggatgcgatagtatcaaatgtccagatggaagatgtccatgttgcaatcgagttcaccggcgattggtcaagccatcctgatgaacattttgatttgtctgcactcccggagatcagtggaatcaccttaaaagacatggttggaataaacatttcgtttgcaggagttttgtcgggaatcgatggcgatcctttcaccaatatctgcctctccaatatcaatttcaccatagctgattcagcgcattctgcctcttggtcttgctccaacgtttctggatactccgagtcggtatttcccgaggcttgttctgacctccacagtcaatcatcaaattcctccatctgctcatccacccttaggtaccatgccctcgcgacagcgtaaatgcatatagcacccaatattcatcctttcatgtttctgtccatgtacaatctggagacatcaagctgtagcttcatcaccatctttccccccaaaaaattctcttccgttataggtgcatcaaagaatcatcgggcttcgtacagtcagctttgaggctcataatacaaaaatttggctggcgtccttgatgagtccagagaggtgtttccttgtacagttacatttgttcattcaatctgtaagaaattttgtccggtaggttgtctgagtccaaagagttggtttatattgttgtttattttattgccatatataaaataaacatt

SEQ ID NO: 11874 - protein, 163 aa, Triticum aestivum
  misc_feature (1)..(163): Ceres Seq. ID no. 15219913
MSGGISDVHVDHLYIHGSSKGISFRTAPGRGGYIRDAIVSNVQMEDVHVAIEFTGDWSSHPDEHFDLSALPEISGITLKDMVGINISFAGVLSGIDGDPFTNICLSNINFTIADSAHSASWSCSNVSGYSESVFPEACSDLHSQSSNSSICSSTLRYHALATA

SEQ ID NO: 11875 - protein, 152 aa, Triticum aestivum
  misc_feature (1)..(152): Ceres Seq. ID no. 15219914
  misc_feature (6)..(6): Xaa is any aa, unknown or other
  misc_feature (7)..(7): Xaa is any aa, unknown or other
  misc_feature (12)..(12): Xaa is any aa, unknown or other
  misc_feature (13)..(13): Xaa is any aa, unknown or other
  misc_feature (14)..(14): Xaa is any aa, unknown or other
  misc_feature (15)..(15): Xaa is any aa, unknown or other
  misc_feature (16)..(16): Xaa is any aa, unknown or other
ILIENXXPVKTXXXXXCWGCCCCCFFFFSLPTASPFLILLSQSEADYLAACLRLPLLRFLELRLLGPCPLVRRSALPLLPQRGTLMASLVSTFITAWVKEFLWFFGREGALHGASFPDWFSLVVARRRGELGRPTAIDFRRLVSSPNSRSSC

SEQ ID NO: 11876 - protein, 120 aa, Triticum aestivum
  misc_feature (1)..(120): Ceres Seq. ID no. 15219915
MEDVHVAIEFTGDWSSHPDEHFDLSALPEISGITLKDMVGINISFAGVLSGIDGDPFTNICLSNINFTIADSAHSASWSCSNVSGYSESVFPEACSDLHSQSSNSSICSSTLRYHALATA

SEQ ID NO: 11877 - DNA, 1880 bp, Triticum aestivum
  misc_feature (1)..(1880): Ceres Seq. ID no. 13658728
agaacatcctaatcgaaaaaaggcccatctgagcccattccccattcccccaaaccctcaccctcctccgccggcatcgaaccgccggagcggccgcgccaccatgcaccacctcctccctcctcgcggctgcctgctccgacgcctgtccacggccgccgagaccgccgcagcctcgccccatccaccgcggcgcccgctggccgattcactctaccgccgcgtcactgccgtatggaacccgcgcctcccgctgactcccgtgctggagcaatgggcggtcacggagggccgggccgtcgagaagaacaacctcatgtgcatcgtcaagaagcccgtccgcatccgccgcttatcccacgcgctcgagctttcaatgtggatgaccgaccggcggtacatgtacctgtcgcctggcgacgtcgcgtaccggctggagctgatcagcaaggtgcagggccccgagagtgccgtgaactactggaagggcttgtcgatccaggtgaagaactctcattgctacggctccctcctgaaatgctatgcggaggcaaagtccgtagacgaggccgaaaagctcttcgcggagatgcaggacttgggaatgatgagatcatatccttacaatgtgatgatgaagctttactgggagaccgggcaggttgagagggtgcacgccatgtacaggaccatggaagagagcggcatcaagcctgatgtcttcagtatcaacattctgttgacggtgctcgcagctgctgggaattttgatggcattgaggaaattatcaagaaggtcgacccgaagatcgtgaattggcactcacatgccattgtagccagggccttcatggaagccgggcagcaaggaaaggccttgcgagctatccaggaatcagaaaagcagataggtcggaaggatgagagggttgcatatgggttcttgctttccatgtttgctgatttgggaatgagtagtgaggcggaccgggtttggaatgtctacaagtccaaagtgccggcatgcaactcgatgtacatgtgcaggataactgcgctgcttaagatgaatgacattgatggtgctgagaaagcctttggagagtgggaaagtaggtatgttcaccatgatatccacttaacaaacttactgctaaatgcttactgtgccaaaggtcttatggagaaggcagaagctctcctggatgaagccatcgccaaagggaggacacctcaccgtagtacttggtatagtttggctagtggatttttccaggacggccaggtgtcgaaggcggtggatatgacaaggaaagctcttgcttgtgcgtcttctcgatgggaacctgacctaacaaatgtgctaatgagcctggaacatttcatggagcaaaagaatgttgaagcagccgaggagatggcaagcctgctacggaatttagtacctttgacaagggatgtttaccacattttactgcagacatatgttcatgcaggacaaccagtgtcagatttacttgatcgcatgaaaaaagatggttttgaggctgatgaagaaacagataaaatcatcgctggaatatgccagtagatatccgcatcttcctatcactaagcaatttcgttggttgtttatttcccatggcaggtagctgctaaaccatccaattattaattagtttgacttccttccactgcttagtgcttatctaagacactgtaattctttaatcttctatatgacggtgtcacagggcagtggggatgtcaaatatattcttagagtatgttcatttgaaaaaaaaaaaaaaaaaagcttatcgataccgtcgacctcgagggggggcccggtacccaataaagtgggaacgggagggggg

SEQ ID NO: 11878 - protein, 529 aa, Triticum aestivum
  misc_feature (1)..(529): Ceres Seq. ID no. 15220659
EHPNRKKAHLSPFPIPPNPHPPPPASNRRSGRATMHHLLPPRGCLLRRLSTAAETAAASPHPPRRPLADSLYRRVTAVWNPRLPLTPVLEQWAVTEGRAVEKNNLMCIVKKPVRIRRLSHALELSMWMTDRRYMYLSPGDVAYRLELISKVQGPESAVNYWKGLSIQVKNSHCYGSLLKCYAEAKSVDEAEKLFAEMQDLGMMRSYPYNVMMKLYWETGQVERVHAMYRTMEESGIKPDVFSINILLTVLAAAGNFDGIEEIIKKVDPKIVNWHSHAIVARAFMEAGQQGKALRAIQESEKQIGRKDERVAYGFLLSMFADLGMSSEADRVWNVYKSKVPACNSMYMCRITALLKMNDIDGAEKAFGEWESRYVHHDIHLTNLLLNAYCAKGLMEKAEALLDEAIAKGRTPHRSTWYSLASGFFQDGQVSKAVDMTRKALACASSRWEPDLTNVLMSLEHFMEQKNVEAAEEMASLLRNLVPLTRDVYHILLQTYVHAGQPVSDLLDRMKKDGFEADEETDKIIAGICQ

SEQ ID NO: 11879 - protein, 495 aa, Triticum aestivum
  misc_feature (1)..(495): Ceres Seq. ID no. 15220660
MHHLLPPRGCLLRRLSTAAETAAASPHPPRRPLADSLYRRVTAVWNPRLPLTPVLEQWAVTEGRAVEKNNLMCIVKKPVRIRRLSHALELSMWMTDRRYMYLSPGDVAYRLELISKVQGPESAVNYWKGLSIQVKNSHCYGSLLKCYAEAKSVDEAEKLFAEMQDLGMMRSYPYNVMMKLYWETGQVERVHAMYRTMEESGIKPDVFSINILLTVLAAAGNFDGIEEIIKKVDPKIVNWHSHAIVARAFMEAGQQGKALRAIQESEKQIGRKDERVAYGFLLSMFADLGMSSEADRVWNVYKSKVPACNSMYMCRITALLKMNDIDGAEKAFGEWESRYVHHDIHLTNLLLNAYCAKGLMEKAEALLDEAIAKGRTPHRSTWYSLASGFFQDGQVSKAVDMTRKALACASSRWEPDLTNVLMSLEHFMEQKNVEAAEEMASLLRNLVPLTRDVYHILLQTYVHAGQPVSDLLDRMKKDGFEADEETDKIIAGICQ

SEQ ID NO: 11880 - protein, 424 aa, Triticum aestivum
  misc_feature (1)..(424): Ceres Seq. ID no. 15220661
MCIVKKPVRIRRLSHALELSMWMTDRRYMYLSPGDVAYRLELISKVQGPESAVNYWKGLSIQVKNSHCYGSLLKCYAEAKSVDEAEKLFAEMQDLGMMRSYPYNVMMKLYWETGQVERVHAMYRTMEESGIKPDVFSINILLTVLAAAGNFDGIEEIIKKVDPKIVNWHSHAIVARAFMEAGQQGKALRAIQESEKQIGRKDERVAYGFLLSMFADLGMSSEADRVWNVYKSKVPACNSMYMCRITALLKMNDIDGAEKAFGEWESRYVHHDIHLTNLLLNAYCAKGLMEKAEALLDEAIAKGRTPHRSTWYSLASGFFQDGQVSKAVDMTRKALACASSRWEPDLTNVLMSLEHFMEQKNVEAAEEMASLLRNLVPLTRDVYHILLQTYVHAGQPVSDLLDRMKKDGFEADEETDKIIAGICQ

SEQ ID NO: 11881 - DNA, 2475 bp, Triticum aestivum
  misc_feature (1)..(2475): Ceres Seq. ID no. 13658778
atctccttgagcggtttggcactctgactcgatcttgtctcttggactagcttgccgccggcggcacaagattcgccttttcttcttcttcttgttccgcgctctgctgtccatcgcgcaaggggaataatggcgacgaagccttcgcaggacgcgccgctcccgctccacaccgtgcaaacggaccagcccctcgccaccgtcaaccggctcctcgccgccgtccacctggcgctcggcgcggcagccatcgcccaccgcggcgcccacgtgatgctggcggccgacctggtcctcctcttcctgtgggcgctgtcgcaggcgcccatgtggcgccccgtgtcccgcaccgccttcccgtcccggctctcgcgcgccgccctcccggccgtggacgtgatggtggtgacggccgacccggagaaggagcccgcggcgaaggtgatgaacacggtggtctccgccatggcgctcgactacccgggcgggcggctgagcgtgtacctctccgacgacgccgggtcaccgcggacgctgctcgccgccaggaaggcctacgccttcgccagggcctgggtgcccttctgcaggaagtacggcgtgcggtgcccgtgccccgacaggttcttcgccggcgatgacaagctcgacctcggtagtcaccaccaccacgagctcgccgacgacaggctaagaatcaagaatatgtacgagacgttcaatgagggtgtccgggaggtgatgagcgacgcagatctttctcagagktgcacaaaagcagatcacgatgctcacgtcgagatcatcaccggcgatgagcaagacagcagcaacagcaactccggcgacggcgaggaggatgaggacgccatgcccttgctggtctacgtgtctcgcgagaagcggaggtcgtcgactcaccacttcaaagccggcgcactcaacgtccttctccgtgtgtcgagcctgttgagcaactcgccgtacgtgatggtgctggactgcgacatgtactgcaacagccggagctccatcctcgaggccatgtgcttccacctcgacggccgccgccgcgccgatctcgccttcgtgcagttccctcagatgttccacaacctcagcagcagcgacatctacgccaacgagctcagatccatcttctggacgcggtggaaaggcttggatggcctccggggcccgatcctctccggcaccggcttctgcgccaggagagacgccatctacggcgcccggccggccagctcgcaagatcagttctccggtgtggaggtcggcgagcttaagagaaggtttggcgtctcgaatggtcacatagcgtcgctgcgccgatccgggaccgggagcaccattgttgcacgtgatgctctcccacaggaggatgcagagttggtggcgtcctgcgcttacgagacgggcaccgaatggggcgagcaggtcggcttcttgtaccagtcggtggtggaggactacttcacgggctaccggcagctctactgccgagggtggacgtccgtctactgcttcccggcggcggcgtcgaggccgccgttcctcggcagcgtgcccaccaacctcaacgacgcgctggtgcagaacaagcggtggatgtccggcatgctcgccgtcggcctgtccaggcactgccccctcgcctccgccgccatctgcgtgcctcagagcatgggcttcgcctactacgccttcatggccctgtacgccttccccgtgctctgctacgccaccgtgccgcagctctgcttcctccgcggcggcacgtcgttcccaggggcggcttcgacgctctggttcgccgccgtgttcgcgtcgtcgtcgctgcagcacctggtggaggtgtcggtggccaagcgtgggctggcgttgaggacgtggtggaacgagcagaggttctgggcgctcaacgccgtcacgggccagctcttcgcctgcctcggcgtcgccctcaacctggtcggcgccggcggccgggcggtggacttcgacctcaccagcaaggcgtccgacgacaggctctaccgggatggcgtgttcgacttcgccggatgcaccacgctgctcctgccggccaccacgctctgcctgctcaacgccgcggcgctcgtcggcggggtctggaagatggtcggcaggggcggcagcgtgtccggcgagctgttcctcctctgctacgtcgcggcgctgagctatccgctgctgcaagggatgttcctcaggcgggatcccgcaagagttcctgcgccgatcacggcgatgtccgtcgccatggttgccgctctgctgtccttgtttggttaaggcggccactttcattccagagagtttgagtgacacctaagataccttgatactcctaccagtttggtttgattcatccaagcttccaaataccgtgcatatatgagcagaaaagacaagaataaaacggcattttttttt

SEQ ID NO: 11882 - protein, 734 aa, Triticum aestivum
  misc_feature (1)..(734): Ceres Seq. ID no. 15219919
  misc_feature (213)..(213): Xaa is any aa, unknown or other
MATKPSQDAPLPLHTVQTDQPLATVNRLLAAVHLALGAAAIAHRGAHVMLAADLVLLFLWALSQAPMWRPVSRTAFPSRLSRAALPAVDVMVVTADPEKEPAAKVMNTVVSAMALDYPGGRLSVYLSDDAGSPRTLLAARKAYAFARAWVPFCRKYGVRCPCPDRFFAGDDKLDLGSHHHHELADDRLRIKNMYETFNEGVREVMSDADLSQXCTKADHDAHVEIITGDEQDSSNSNSGDGEEDEDAMPLLVYVSREKRRSSTHHFKAGALNVLLRVSSLLSNSPYVMVLDCDMYCNSRSSILEAMCFHLDGRRRADLAFVQFPQMFHNLSSSDIYANELRSIFWTRWKGLDGLRGPILSGTGFCARRDAIYGARPASSQDQFSGVEVGELKRRFGVSNGHIASLRRSGTGSTIVARDALPQEDAELVASCAYETGTEWGEQVGFLYQSVVEDYFTGYRQLYCRGWTSVYCFPAAASRPPFLGSVPTNLNDALVQNKRWMSGMLAVGLSRHCPLASAAICVPQSMGFAYYAFMALYAFPVLCYATVPQLCFLRGGTSFPGAASTLWFAAVFASSSLQHLVEVSVAKRGLALRTWWNEQRFWALNAVTGQLFACLGVALNLVGAGGRAVDFDLTSKASDDRLYRDGVFDFAGCTTLLLPATTLCLLNAAALVGGVWKMVGRGGSVSGELFLLCYVAALSYPLLQGMFLRRDPARVPAPITAMSVAMVAALLSLFG

SEQ ID NO: 11883 - protein, 686 aa, Triticum aestivum
  misc_feature (1)..(686): Ceres Seq. ID no. 15219920
  misc_feature (165)..(165): Xaa is any aa, unknown or other
MLAADLVLLFLWALSQAPMWRPVSRTAFPSRLSRAALPAVDVMVVTADPEKEPAAKVMNTVVSAMALDYPGGRLSVYLSDDAGSPRTLLAARKAYAFARAWVPFCRKYGVRCPCPDRFFAGDDKLDLGSHHHHELADDRLRIKNMYETFNEGVREVMSDADLSQXCTKADHDAHVEIITGDEQDSSNSNSGDGEEDEDAMPLLVYVSREKRRSSTHHFKAGALNVLLRVSSLLSNSPYVMVLDCDMYCNSRSSILEAMCFHLDGRRRADLAFVQFPQMFHNLSSSDIYANELRSIFWTRWKGLDGLRGPILSGTGFCARRDAIYGARPASSQDQFSGVEVGELKRRFGVSNGHIASLRRSGTGSTIVARDALPQEDAELVASCAYETGTEWGEQVGFLYQSVVEDYFTGYRQLYCRGWTSVYCFPAAASRPPFLGSVPTNLNDALVQNKRWMSGMLAVGLSRHCPLASAAICVPQSMGFAYYAFMALYAFPVLCYATVPQLCFLRGGTSFPGAASTLWFAAVFASSSLQHLVEVSVAKRGLALRTWWNEQRFWALNAVTGQLFACLGVALNLVGAGGRAVDFDLTSKASDDRLYRDGVFDFAGCTTLLLPATTLCLLNAAALVGGVWKMVGRGGSVSGELFLLCYVAALSYPLLQGMFLRRDPARVPAPITAMSVAMVAALLSLFG

SEQ ID NO: 11884 - protein, 668 aa, Triticum aestivum
  misc_feature (1)..(668): Ceres Seq. ID no. 15219921
  misc_feature (147)..(147): Xaa is any aa, unknown or other
MWRPVSRTAFPSRLSRAALPAVDVMVVTADPEKEPAAKVMNTVVSAMALDYPGGRLSVYLSDDAGSPRTLLAARKAYAFARAWVPFCRKYGVRCPCPDRFFAGDDKLDLGSHHHHELADDRLRIKNMYETFNEGVREVMSDADLSQXCTKADHDAHVEIITGDEQDSSNSNSGDGEEDEDAMPLLVYVSREKRRSSTHHFKAGALNVLLRVSSLLSNSPYVMVLDCDMYCNSRSSILEAMCFHLDGRRRADLAFVQFPQMFHNLSSSDIYANELRSIFWTRWKGLDGLRGPILSGTGFCARRDAIYGARPASSQDQFSGVEVGELKRRFGVSNGHIASLRRSGTGSTIVARDALPQEDAELVASCAYETGTEWGEQVGFLYQSVVEDYFTGYRQLYCRGWTSVYCFPAAASRPPFLGSVPTNLNDALVQNKRWMSGMLAVGLSRHCPLASAAICVPQSMGFAYYAFMALYAFPVLCYATVPQLCFLRGGTSFPGAASTLWFAAVFASSSLQHLVEVSVAKRGLALRTWWNEQRFWALNAVTGQLFACLGVALNLVGAGGRAVDFDLTSKASDDRLYRDGVFDFAGCTTLLLPATTLCLLNAAALVGGVWKMVGRGGSVSGELFLLCYVAALSYPLLQGMFLRRDPARVPAPITAMSVAMVAALLSLFG

SEQ ID NO: 11885 - DNA, 1663 bp, Triticum aestivum
  misc_feature (1)..(1663): Ceres Seq. ID no. 13658779
cctaatcgaaaactcttctctcagtccttctggaccaatatctttggatctgttatttatcctctatttaatagtgaaatctgtacacccaatggtcaaagtgatagcactgaggatggttcatggaattttgaaactaaaacagtggctgtgaaatgtttagtggatctgtatgttacattttttgatgtgatgcggccagaactcactagagttacctctgttgttaccagttttatcagaagcgcttatagacaatctgctagcattggtatgtctgtttttcagcgtttaacagaagggcttgcaagcaaactctccaaggacgaatggaaagagatcttattatgctttaaagaatcagcagcacatacgttggttgttttcgacaaaatagttaagatgatgcaaaatattgaaattccagaaagaaacgagtcttactctgaagcagagaaatattcagatcctgacatagaggatgaagaggaagctaatatggaaacatcgtcttatgccattgtcaagatgaagaaccatatgtctctgcaactcttaattgttcagggaattgttaagttgtatgagacacacaggagatccttctgtgctgagcatatgggcataattttggagatgctatcagccattacgtcccatgcaagtgaagtgagttctgaatctgctttgcacatcaaattccacaaagcatgctcccttctggagatatctgagcccgcagtcatccatttcgagaatgagtcttaccagagctacctcaaacttctgcaagctttgcttcacgacaacccatctttgtcacgagaaatgaacattgagtcacaaattatgcttgtttctgtgaaaatactacggaagtatctgaattgtgcaggtcaggaaccatccaaggatgcttcttgtaaagatccagttgtacactgggcgctgcctttatccgctgctaagaaagaggaactgtctgctagaaccccattggtccttcatgtaatgcggttacttggtggtctagagagggagtgctttaggaggaatttgcccctccttttccctttattagctaatctcgttcgctgcgagcatagctctagagaggttcaagttgcactgtatgatgtctttcagtcatcaataggccctattatttcagtatagcttatattgatggttcaccaattgtacaattttgtcactccatcgtggtagggtaacttgattgatggttacatagaaatatggaataagaaaaagattacagcttgacagtgccgtaaatgattcaaacctgttcctccagcattctggtgttgaagtgttgcagcatcatgtaacatcgactcagatacctggagggaggagaccttttgaagggcatttgcccttctttcataacattaatttcaattcatgggggttatcgtcgacgcccgctggcattgaaggcaaatggatatattgcaacaaagtatgtctgacttggaggtcctgcatcaacagctatggagtacttctacaagggtgttcaccagtgaccaaaattttgggatgtagcctttcttttcccttttgacaacagccttgtatagggttttcttttgaaccaagactaaaataaagagtctcatctatcaagttcttcctc

SEQ ID NO: 11886 - protein, 391 aa, Triticum aestivum
  misc_feature (1)..(391): Ceres Seq. ID no. 15219922
PNRKLFSQSFWTNIFGSVIYPLFNSEICTPNGQSDSTEDGSWNFETKTVAVKCLVDLYVTFFDVMRPELTRVTSVVTSFIRSAYRQSASIGMSVFQRLTEGLASKLSKDEWKEILLCFKESAAHTLVVFDKIVKMMQNIEIPERNESYSEAEKYSDPDIEDEEEANMETSSYAIVKMKNHMSLQLLIVQGIVKLYETHRRSFCAEHMGIILEMLSAITSHASEVSSESALHIKFHKACSLLEISEPAVIHFENESYQSYLKLLQALLHDNPSLSREMNIESQIMLVSVKILRKYLNCAGQEPSKDASCKDPVVHWALPLSAAKKEELSARTPLVLHVMRLLGGLERECFRRNLPLLFPLLANLVRCEHSSREVQVALYDVFQSSIGPIISV

SEQ ID NO: 11887 - protein, 327 aa, Triticum aestivum
  misc_feature (1)..(327): Ceres Seq. ID no. 15219923
MRPELTRVTSVVTSFIRSAYRQSASIGMSVFQRLTEGLASKLSKDEWKEILLCFKESAAHTLVVFDKIVKMMQNIEIPERNESYSEAEKYSDPDIEDEEEANMETSSYAIVKMKNHMSLQLLIVQGIVKLYETHRRSFCAEHMGIILEMLSAITSHASEVSSESALHIKFHKACSLLEISEPAVIHFENESYQSYLKLLQALLHDNPSLSREMNIESQIMLVSVKILRKYLNCAGQEPSKDASCKDPVVHWALPLSAAKKEELSARTPLVLHVMRLLGGLERECFRRNLPLLFPLLANLVRCEHSSREVQVALYDVFQSSIGPIISV

SEQ ID NO: 11888 - protein, 300 aa, Triticum aestivum
  misc_feature (1)..(300): Ceres Seq. ID no. 15219924
MSVFQRLTEGLASKLSKDEWKEILLCFKESAAHTLVVFDKIVKMMQNIEIPERNESYSEAEKYSDPDIEDEEEANMETSSYAIVKMKNHMSLQLLIVQGIVKLYETHRRSFCAEHMGIILEMLSAITSHASEVSSESALHIKFHKACSLLEISEPAVIHFENESYQSYLKLLQALLHDNPSLSREMNIESQIMLVSVKILRKYLNCAGQEPSKDASCKDPVVHWALPLSAAKKEELSARTPLVLHVMRLLGGLERECFRRNLPLLFPLLANLVRCEHSSREVQVALYDVFQSSIGPIISV

SEQ ID NO: 11889 - DNA, 770 bp, Triticum aestivum
  misc_feature (1)..(770): Ceres Seq. ID no. 13658784
catttcggtttcctgccacctttacatttgtggtcagagcattctcagtactggatggtattgggaaaggtttagatcctagatttgatattacagagattgctaagccttatgccatggagttgctcagatttaatgaagctggtgttgaagtacttgttaaggatgcaaggaagcggtgggacaggcagtctcgtgcattctacaatgtgttccgtcaacctgacagagtcgaaaaacttgcacagatcattgagcgtttggagcaaggtgatctcaagcttcgtgtcagagcattagaatcggaaagatcgtttcaaagagttgctgctgtacagaaaacaattggatatggagtggctgcgggcagtttggtaaacctcgctaccattctgcacctcaattctatccggatgccagcaaccatcggatactgtctttgtgcgttctttggactacaaatcctgcttggcgttctcaaggtgaagaagctggaccaacaagagagattgataaccggcactgcctgagttcaccatcgaccagtgagagctgacccaaaagatttcagtgtaatacgttgcggttatcatccgctttttcttttccttttgcctgtgtgcagttttacctcagaggtggtgtagcatagccatcggcgtacgagtatgaaatctttgtacatgcggtgtaatagatgaagagatgtacatactgtacaattgcagggtaaatataagcagtatagcacagctcgtgcaacctgtttc

SEQ ID NO: 11890 - protein, 175 aa, Triticum aestivum
  misc_feature (1)..(175): Ceres Seq. ID no. 13658785
FRFPATFTFVVRAFSVLDGIGKGLDPRFDITEIAKPYAMELLRFNEAGVEVLVKDARKRWDRQSRAFYNVFRQPDRVEKLAQIIERLEQGDLKLRVRALESERSFQRVAAVQKTIGYGVAAGSLVNLATILHLNSIRMPATIGYCLCAFFGLQILLGVLKVKKLDQQERLITGTA

SEQ ID NO: 11891 - protein, 137 aa, Triticum aestivum
  misc_feature (1)..(137): Ceres Seq. ID no. 13658786
MELLRFNEAGVEVLVKDARKRWDRQSRAFYNVFRQPDRVEKLAQIIERLEQGDLKLRVRALESERSFQRVAAVQKTIGYGVAAGSLVNLATILHLNSIRMPATIGYCLCAFFGLQILLGVLKVKKLDQQERLITGTA

SEQ ID NO: 11892 - DNA, 1435 bp, Triticum aestivum
  misc_feature (1)..(1435): Ceres Seq. ID no. 13658847
gtgcccgccccgacctcaaactcccgtcgccacccgctctcctcccctctcccctcccctcccctcccctcgcgccggccacgatcgaggcatggcgacgatgacgaccacgaccaccacgacgaagacggcgctgcgccaccgcgggtgctgcgggcacgcgccggcgccggcggaggacggcggcgacctggtggcgctgtcgagcgcggcggcggaggggctcgggaaagaggccgccaggtgggccggcgggctgccgcggctgaagcggttcgaggagctgccggactacctccgcgacaacgagttcatccgcggcggctaccgctgcgagtggtccgtccgcgacgcgctccgcagcgtcttcgcctggcacaacgagacgctcaacgtctggacccatctggggggcttcttcctgttcctggggctcgccgtcgccggccagacggagtggcggccggccggagcagccgcggcgccggggttcatgacgatggtgatgacgtccgccaacgcgtcgtcgttggcgaccaacaacagttcgagcacggcgatccagagcgcgctggcgtcgggcatcggcggcgcggggcacgcggtggcgcggtggccgcggacggtgttcgtgttgggggccatgacgtgcctgtcggtgagcgctgcggcgcacctgctggcaagccactcgcgccgcttcaaccggctcttctggcagctcgactacgccggcatcgccgtcatgatcgtcgcctccttcttcccgccggtctactacaccttcctcggcagccccgtcgcacagctcgcctacctctccgccatcacgctgctcggcgtgctcgtcgtggcggcgctcctggtgccggcccgctcgtcgccgcggctgcggcacctccgcgccggcctgttcgtgtccatggggctctcgggcgtcgtgccggcgctgcacgcgctctggctcaactggggccacccggagtgctacctggcgctgtcgctggagctggccatggggctcgtgtacgccacgggcgccggcttctacgtcgcgcgcgtgccggagcggtggcgcccgggcatgttcgactgcgtcggccacagccaccagatcttccacgtgctggtgctcgtcggcgccgtcacgcactacgccgccaccgccatcctcatcggctggcgcgacgccctggccgcggccgcgtcggcgctcttgtgacgccgcgcgtaggatgcataggcgtagggtgtgccattgattcgttgattcgtgtaactagcttagatgattctttgaacgtgtatcagatcaagtttgtgctcctggctttcttactgtcggtctgcactctgtgtttctgtaatgttgaatggcgtacagcggctgaggtgcaaaaggaaaagggacgagcactgcaacttttttacttgc

SEQ ID NO: 11893 - protein, 478 aa, Triticum aestivum
  misc_feature (1)..(478): Ceres Seq. ID no. 13658848
VPAPTSNSRRHPLSSPLPSPPLPSRRPRSRHGDDDDHDHHDEDGAAPPRVLRARAGAGGGRRRPGGAVERGGGGARERGRQVGRRAAAAEAVRGAAGLPPRQRVHPRRLPLRVVRPRRAPQRLRLAQRDAQRLDPSGGLLPVPGARRRRPDGVAAGRSSRGAGVHDDGDDVRQRVVVGDQQQFEHGDPERAGVGHRRRGARGGAVAADGVRVGGHDVPVGERCGAPAGKPLAPLQPALLAARLRRHRRHDRRLLLPAGLLHLPRQPRRTARLPLRHHAARRARRGGAPGAGPLVAAAAAPPRRPVRVHGALGRRAGAARALAQLGPPGVLPGAVAGAGHGARVRHGRRLLRRARAGAVAPGHVRLRRPQPPDLPRAGARRRRHALRRHRHPHRLARRPGRGRVGALVTPRVGCIGVGCAIDSLIRVTSLDDSLNVYQIKFVLLAFLLSVCTLCFCNVEWRTAAEVQKEKGRALQLFYL

SEQ ID NO: 11894 - protein, 406 aa, Triticum aestivum
  misc_feature (1)..(406): Ceres Seq. ID no. 13658849
CPPRPQTPVATRSPPLSPPLPSPRAGHDRGMATMTTTTTTTKTALRHRGCCGHAPAPAEDGGDLVALSSAAAEGLGKEAARWAGGLPRLKRFEELPDYLRDNEFIRGGYRCEWSVRDALRSVFAWHNETLNVWTHLGGFFLFLGLAVAGQTEWRPAGAAAAPGFMTMVMTSANASSLATNNSSSTAIQSALASGIGGAGHAVARWPRTVFVLGAMTCLSVSAAAHLLASHSRRFNRLFWQLDYAGIAVMIVASFFPPVYYTFLGSPVAQLAYLSAITLLGVLVVAALLVPARSSPRLRHLRAGLFVSMGLSGVVPALHALWLNWGHPECYLALSLELAMGLVYATGAGFYVARVPERWRPGMFDCVGHSHQIFHVLVLVGAVTHYAATAILIGWRDALAAAASALL

SEQ ID NO: 11895 - protein, 376 aa, Triticum aestivum
  misc_feature (1)..(376): Ceres Seq. ID no. 13658850
MATMTTTTTTTKTALRHRGCCGHAPAPAEDGGDLVALSSAAAEGLGKEAARWAGGLPRLKRFEELPDYLRDNEFIRGGYRCEWSVRDALRSVFAWHNETLNVWTHLGGFFLFLGLAVAGQTEWRPAGAAAAPGFMTMVMTSANASSLATNNSSSTAIQSALASGIGGAGHAVARWPRTVFVLGAMTCLSVSAAAHLLASHSRRFNRLFWQLDYAGIAVMIVASFFPPVYYTFLGSPVAQLAYLSAITLLGVLVVAALLVPARSSPRLRHLRAGLFVSMGLSGVVPALHALWLNWGHPECYLALSLELAMGLVYATGAGFYVARVPERWRPGMFDCVGHSHQIFHVLVLVGAVTHYAATAILIGWRDALAAAASALL

SEQ ID NO: 11896 - DNA, 700 bp, Triticum aestivum
  misc_feature (1)..(700): Ceres Seq. ID no. 13658877
atttgtggatgaggttgacagcttacttggtgcaaggggtggtgcaatggagcatgaagcaacgagaaggatgcgcaatgaatttatggcagcttgggatggtctaaggtccaaagacagtcaaaggatccttattcttggtgcaacaaaccgtccatttgatctagatgacgctgtaatacgtcgtttgcctaggaggatatacgtggaccttccggatgcgcagaataggatgaaaattctcaagatattacttgccaaagaaaacatagaatgtgaatttggatttgacgaactagccaatgcaacagaaggttactctgggagtgacttgaagaacctatgcgtagctgcagcatacaggccagttcatgaactgctagaagaagaaaagaagggggctgcgggcagtacgaaaacttctttaaggtccttgaagctggatgactttgtccaagcaaaagccaaggtgagcccatccgttgcttttgatgccacgagcatgaacgagctaagaaaatggaacgaacagtacggcgaaggtggcagcaggagtaaatcgccatttgggttcggcagctaacacgattccggtagcaattttgccacactgtatcacttgtagtaccaatgtgctccgatttagccatagggtgtcagatcggcgatagcgctattcctttgaaactttgatgtgcgc

SEQ ID NO: 11897 - protein, 193 aa, Triticum aestivum
  misc_feature (1)..(193): Ceres Seq. ID no. 13658878
FVDEVDSLLGARGGAMEHEATRRMRNEFMAAWDGLRSKDSQRILILGATNRPFDLDDAVIRRLPRRIYVDLPDAQNRMKILKILLAKENIECEFGFDELANATEGYSGSDLKNLCVAAAYRPVHELLEEEKKGAAGSTKTSLRSLKLDDFVQAKAKVSPSVAFDATSMNELRKWNEQYGEGGSRSKSPFGFGS

SEQ ID NO: 11898 - protein, 178 aa, Triticum aestivum
  misc_feature (1)..(178): Ceres Seq. ID no. 13658879
MEHEATRRMRNEFMAAWDGLRSKDSQRILILGATNRPFDLDDAVIRRLPRRIYVDLPDAQNRMKILKILLAKENIECEFGFDELANATEGYSGSDLKNLCVAAAYRPVHELLEEEKKGAAGSTKTSLRSLKLDDFVQAKAKVSPSVAFDATSMNELRKWNEQYGEGGSRSKSPFGFGS

SEQ ID NO: 11899 - protein, 170 aa, Triticum aestivum
  misc_feature (1)..(170): Ceres Seq. ID no. 13658880
MRNEFMAAWDGLRSKDSQRILILGATNRPFDLDDAVIRRLPRRIYVDLPDAQNRMKILKILLAKENIECEFGFDELANATEGYSGSDLKNLCVAAAYRPVHELLEEEKKGAAGSTKTSLRSLKLDDFVQAKAKVSPSVAFDATSMNELRKWNEQYGEGGSRSKSPFGFGS

SEQ ID NO: 11900 - DNA, 587 bp, Triticum aestivum
  misc_feature (1)..(587): Ceres Seq. ID no. 13658899
agaaaaggaaagggagatgctctgaaagtgtacgactggtagtccgctagtccaggcatccccatctgtccctgattttgtcactccgtcggatccgggcgtcgatggaggggagcgcggggcctcgccggagttccacccaggaggtaggcagcccaggcggcgaagcggacctcatcagcgcgctccccgacgaggtgctcctcctcttcctcgcccgcctcccctgcgccggcgccgccgcgcgcaccagcgtcctctcccgccggtggcgcggcctctgggcgctcctccgccagatcgtcttccgcgacgtgcccttccgctcgctcgaggcggcgctcggccgcgtcccgcctcccccgcacgcggtttccctcctctaaatctccgtccccaaggagcagcggacagacagcgccggcgtcaactcgctgctccgcgccgccgcgcggctggagccggagaagctcgacttccgcctcccctcccacttaaccgacccgccttccgaaagcagtctcgtcgccgtcgacctgccttgctcgcaccgcgccacctccatctcgctgggcctctccaccccc

SEQ ID NO: 11901 - protein, 93 aa, Triticum aestivum
  misc_feature (1)..(93): Ceres Seq. ID no. 13658900
MEGSAGPRRSSTQEVGSPGGEADLISALPDEVLLLFLARLPCAGAAARTSVLSRRWRGLWALLRQIVFRDVPFRSLEAALGRVPPPPHAVSLL

SEQ ID NO: 11902 - DNA, 1683 bp, Triticum aestivum
  misc_feature (1)..(1683): Ceres Seq. ID no. 13658904
aacgaagtcagcaacaatcatccagtgctattgttgtagctgctcagccccctgtaaacggaccagcaccagctgctaatcatctcactcttgtgaagatgccaagtcaaaatattgccgaagagagcaatgtcattcatgaagaaaccgcggtagaagctccaaaagaaaatggtgctcccgtcgaagttcagagaaatgtcgagatcatcactgagcccgctcctgttagtaaagttgagcctcctgcatctcgtcctgcttctcaagcagacctccttgcagaccttttgggccctcttgcaatagagggtcctcctgctgctgtagagcaaactcctgctcaaggattggaggctaatcaaagtccagtaggtgacttggcactagctacccttgaggaccagtccaactctgttcagccaattgtcaatgtggaggagaagtttaatatattgtgcacgaaagatagtggagttctgtatgaggatcctaacatccagattggtttaaaagcagagtggcgggcccatcatggtcgtcttattcttttcctggggaataaaaatacttcgccccttttgtcattgagggctttgattttgcctcctagccattttaaagtggaactctcgtcagtacctgatactattcctcctagagcacaggtgcaaatcccagtcgaggttacaaatctccgcgcgagtagagatgttgctgttcttgatttctcatataaacatggagctgcactggtgaacgctaaacttcgacttcctattgtgttgcataaattcttgcaacctataactctttcccctgaagattttttcgcccattggaaaacatggaatgttcagtcactcaaggttcaagaagtggttagaggtgtaaaaccattacctattcctgagatggctagtcttctcttgagccttcacctggcagttactcctggacttgataccaacccgaacaacatggtggcgtgtgctacattcttttcggagacaaccaatgccgcgctttgtctggtgagagttgaaacagatccccaagacagaagtcagctccggctaacagtcgcatcaggagatcaaaatctgacattcgagttgaaggagtacatcaaggaacatctgatcgacatcccgagggctcgagtggccccccctgccgctccgcaacaaccacagctgcctccagcagcgccggcgacatataacgacccgggtgccatgctagctgggttgctatgaaaccagacgatgctggaacaagcagttgtcagacgtacattgcattgcagtagtttttcattcatctgaggatctaacaccgcctgcccagaagcttccatgttgccaccaagacgacgaagcggtgtcgaaggtatgtatgataacgactgggcaggaaggaaggaaggaaggaagggacttgctgcaccggagaggagaaaaggaagcactgtattgtattcttttgggcccttagtagcatcgatcgatcttggatcataatttgtgtttgccatagcgtgtaatcgtggttctcttgttccttgagatgtatcctactactagtactatagtaagtgtaccttggaaggaaggaaggaaggaagcggattggtggtggtggtgaaaaaaaaaaaaaaaaaagcttatcgataccgtcgac

SEQ ID NO: 11903 - protein, 418 aa, Triticum aestivum
  misc_feature (1)..(418): Ceres Seq. ID no. 13658905
RSQQQSSSAIVVAAQPPVNGPAPAANHLTLVKMPSQNIAEESNVIHEETAVEAPKENGAPVEVQRNVEIITEPAPVSKVEPPASRPASQADLLADLLGPLAIEGPPAAVEQTPAQGLEANQSPVGDLALATLEDQSNSVQPIVNVEEKFNILCTKDSGVLYEDPNIQIGLKAEWRAHHGRLILFLGNKNTSPLLSLRALILPPSHFKVELSSVPDTIPPRAQVQIPVEVTNLRASRDVAVLDFSYKHGAALVNAKLRLPIVLHKFLQPITLSPEDFFAHWKTWNVQSLKVQEVVRGVKPLPIPEMASLLLSLHLAVTPGLDTNPNNMVACATFFSETTNAALCLVRVETDPQDRSQLRLTVASGDQNLTFELKEYIKEHLIDIPRARVAPPAAPQQPQLPPAAPATYNDPGAMLAGLL

SEQ ID NO: 11904 - protein, 386 aa, Triticum aestivum
  misc_feature (1)..(386): Ceres Seq. ID no. 13658906
MPSQNIAEESNVIHEETAVEAPKENGAPVEVQRNVEIITEPAPVSKVEPPASRPASQADLLADLLGPLAIEGPPAAVEQTPAQGLEANQSPVGDLALATLEDQSNSVQPIVNVEEKFNILCTKDSGVLYEDPNIQIGLKAEWRAHHGRLILFLGNKNTSPLLSLRALILPPSHFKVELSSVPDTIPPRAQVQIPVEVTNLRASRDVAVLDFSYKHGAALVNAKLRLPIVLHKFLQPITLSPEDFFAHWKTWNVQSLKVQEVVRGVKPLPIPEMASLLLSLHLAVTPGLDTNPNNMVACATFFSETTNAALCLVRVETDPQDRSQLRLTVASGDQNLTFELKEYIKEHLIDIPRARVAPPAAPQQPQLPPAAPATYNDPGAMLAGLL

SEQ ID NO: 11905 - DNA, 1387 bp, Triticum aestivum
  misc_feature (1)..(1387): Ceres Seq. ID no. 13658922
ctaatcgaaaactttcttcccgtacgtccgcaggatcggtcaagatggctaacaccgacgctcttagctttttcaaggatttcatggccggtggcatctctgccgctgtgtccaaaaccgccgtcgctcccatcgagcgtgtgaagctgctcctgcaggttcaggcagcatccacccagattgccgccgacaagcagtacaaaggcattgttgactgctttgtccgtatccccaaggagcagggagctctcagcttctggcgtggtaaccttgccaacgtcatcagatacttccccacccaggctcttaacttcgccttcaaagatatctacaagcagattttccttggaggtgtcgacaagaacacccagttctggcgttactttgctggtaacctggcctctggtggtgctgctggtgcctcttccctctgcattgtctaccctcttgacttcgcccgtactcgtcttgctgctgatattggcaagggaccagctgaccgtcagttcagtggtcttggtgactgcctgaagaagaccttcaagtctgatggcctcgttggcatgtaccgtggattcggtgtgtcagtccagggtatcattatctaccgtgctgcctacttcggcttcttcgacactgccaagggcatgctccccaaccctaagaccactcccttcctggtctcatgggctattgctcagactgtcaccactgttgctggtattgcctcttatcccttcgacaccgtccgtcggcgcatgatgatgcaggctggccgtaagaaggctgatatcatgtacactggcaccctcgactgctgggccaagatcgccaagaatgagggtactggtgccttcttcaagggtgccttctccaacgttctcagaggcactggtggtgctcttgtgctggtgttctacgatgagatcaagaagctcctctaaattaattaggaatagattttaggtagaagtgcaggcatccagagttgcgagatctgactcaacattccacattcctgagatcaattcggtagaggatctgcagcttctataaactggtgtagtgcatttcatgtgcaaatgcagaccatgtcagtgttctgatcaagttgaccccatgtgtacaaagtcagatttgcatcttggcttacacttcaatagcagaatttcaattttaaaatctcgaaccatgacttttaggtttgttttactcagtattcattgctcgatcgggaagagctagagaggccgaaagtgaagtaaaatggaagaattaccaaagacattccatccttcatggctgtaccagtgtttcatcaagatggaatggtgattgcaagagattttactgtaactgtccaacaataaataaaagttgatattac

SEQ ID NO: 11906 - protein, 313 aa, Triticum aestivum
  misc_feature (1)..(313): Ceres Seq. ID no. 15219938
NRKLSSRTSAGSVKMANTDALSFFKDFMAGGISAAVSKTAVAPIERVKLLLQVQAASTQIAADKQYKGIVDCFVRIPKEQGALSFWRGNLANVIRYFPTQALNFAFKDIYKQIFLGGVDKNTQFWRYFAGNLASGGAAGASSLCIVYPLDFARTRLAADIGKGPADRQFSGLGDCLKKTFKSDGLVGMYRGFGVSVQGIIIYRAAYFGFFDTAKGMLPNPKTTPFLVSWAIAQTVTTVAGIASYPFDTVRRRMMMQAGRKKADIMYTGTLDCWAKIAKNEGTGAFFKGAFSNVLRGTGGALVLVFYDEIKKLL

SEQ ID NO: 11907 - protein, 299 aa, Triticum aestivum
  misc_feature (1)..(299): Ceres Seq. ID no. 15219939
MANTDALSFFKDFMAGGISAAVSKTAVAPIERVKLLLQVQAASTQIAADKQYKGIVDCFVRIPKEQGALSFWRGNLANVIRYFPTQALNFAFKDIYKQIFLGGVDKNTQFWRYFAGNLASGGAAGASSLCIVYPLDFARTRLAADIGKGPADRQFSGLGDCLKKTFKSDGLVGMYRGFGVSVQGIIIYRAAYFGFFDTAKGMLPNPKTTPFLVSWAIAQTVTTVAGIASYPFDTVRRRMMMQAGRKKADIMYTGTLDCWAKIAKNEGTGAFFKGAFSNVLRGTGGALVLVFYDEIKKLL

SEQ ID NO: 11908 - protein, 286 aa, Triticum aestivum
  misc_feature (1)..(286): Ceres Seq. ID no. 15219940
MAGGISAAVSKTAVAPIERVKLLLQVQAASTQIAADKQYKGIVDCFVRIPKEQGALSFWRGNLANVIRYFPTQALNFAFKDIYKQIFLGGVDKNTQFWRYFAGNLASGGAAGASSLCIVYPLDFARTRLAADIGKGPADRQFSGLGDCLKKTFKSDGLVGMYRGFGVSVQGIIIYRAAYFGFFDTAKGMLPNPKTTPFLVSWAIAQTVTTVAGIASYPFDTVRRRMMMQAGRKKADIMYTGTLDCWAKIAKNEGTGAFFKGAFSNVLRGTGGALVLVFYDEIKKLL

SEQ ID NO: 11909 - DNA, 1885 bp, Triticum aestivum
  misc_feature (1)..(1885): Ceres Seq. ID no. 13658929
acggagatacctttatcagactaccacctacaagcctgcaagtgggcttaaacatcgggacataatctcacgagctcagcttgtggcagacggatccgatggtgatcggcgaaatggatgctgctcaggtcgcagcattcttcaggggcaagaatatcctcatcaccggcgcaactgggttccttggaaaagtgctcttggagaagatactgaggatccagcctgaggtcacgaagctcttcctcttggttcgagccaccgacgacgaatccgcaaggcggcgggtccagactgaggtaatgtatttctaacagttcgagaagcaacaccgaacatgggaagttttaagacatctccagttataaacacacaaaaaaactgcaaacgatgtttcgtggtctgcaggtaacagggagggagattttccaagttctcagagaaaagcatggcaagggttttgaagatttcatcgaagagaaggtgtaccctttggcaggagacgtcatgtatgaggattttggactagacaccgccaagctgaaagaagtgtccaaggatgtagacatcatcgtcaacggagctgcgactacgaatttctatgaaagatacgatgtatctttcgacactaacgtcttgggagcgaagcagatctgtgcatttgcaaacaagtgcaccaaactgaaaatgctgctccacgtttcaactgcctacgtatgtggtgaacaagagggactaatactagagaaaccattcatgatgggggacacactacgggagggcacacacttagacattgaatccgagctaaatctgatcaaacatacccagatggaactgaaagctaactgtgctactgacaaggctcagaggaaaaccatgaaggaacttggcctcaagagagcgaggcgtttcgggtggccgaatacctacgtgttcaccaaggcaatgggcgagatgctgctggggcacctgcgaggcgaccttccagtcgtcatcatccggccgagcatcataaccagcatcctcaaggagccattgcctggatggatggaaggagtcaggactatcgactcggttttcttgggttacgccaagcaagccttgaaattctttctagtagaccccaataccataatggacgtgattccgggggacatggtggtaaacactatgatggtggccatgctagcgcactcaggggaacaagcacagaccatctaccatgtgacatcatccatgagcaacccggcctcctacatgactctccgggagtcggcccaccgctacttcgtggacaacccgccgcgaggggaaaacggcgagcccatccggctgaacaagatgcgcttctttagcacggttgcaaggctccgcatgtacatggtcatcaagtacaagctccctcttgagatccttcatctggtaaacattgggctatgtggtgttttctcagggcgctacaacgagctcagtggaaaatacagattggccatgcatctgatcgagctctatgcgccttacaccttattcaaagggcgctttgatgacatgaaccttgagaaactgaggaaggccatggagcaaaatagtgatggaggagaatactactttgatttcgatcccaagaaaatcgactgggacgactatttctacatggttcactttcctggtgtgctcaagtatctggcgtgagaattgaatttcatccaaccagctaaataacaactatctttgaatgtattgttgtactatttgttacagaactctcaggagtgtgttgccttcgctaagatagttttgtatgttccatattttttaagatgcgccattaataaagcatgggatcacaatccaaaaaaaaaaaaaaaaaagcttatcgataccg

SEQ ID NO: 11910 - protein, 434 aa, Triticum aestivum
  misc_feature (1)..(434): Ceres Seq. ID no. 13658930
MFRGLQVTGREIFQVLREKHGKGFEDFIEEKVYPLAGDVMYEDFGLDTAKLKEVSKDVDIIVNGAATTNFYERYDVSFDTNVLGAKQICAFANKCTKLKMLLHVSTAYVCGEQEGLILEKPFMMGDTLREGTHLDIESELNLIKHTQMELKANCATDKAQRKTMKELGLKRARRFGWPNTYVFTKAMGEMLLGHLRGDLPVVIIRPSIITSILKEPLPGWMEGVRTIDSVFLGYAKQALKFFLVDPNTIMDVIPGDMVVNTMMVAMLAHSGEQAQTIYHVTSSMSNPASYMTLRESAHRYFVDNPPRGENGEPIRLNKMRFFSTVARLRMYMVIKYKLPLEILHLVNIGLCGVFSGRYNELSGKYRLAMHLIELYAPYTLFKGRFDDMNLEKLRKAMEQNSDGGEYYFDFDPKKIDWDDYFYMVHFPGVLKYLA

SEQ ID NO: 11911 - protein, 395 aa, Triticum aestivum
  misc_feature (1)..(395): Ceres Seq. ID no. 13658931
MYEDFGLDTAKLKEVSKDVDIIVNGAATTNFYERYDVSFDTNVLGAKQICAFANKCTKLKMLLHVSTAYVCGEQEGLILEKPFMMGDTLREGTHLDIESELNLIKHTQMELKANCATDKAQRKTMKELGLKRARRFGWPNTYVFTKAMGEMLLGHLRGDLPVVIIRPSIITSILKEPLPGWMEGVRTIDSVFLGYAKQALKFFLVDPNTIMDVIPGDMVVNTMMVAMLAHSGEQAQTIYHVTSSMSNPASYMTLRESAHRYFVDNPPRGENGEPIRLNKMRFFSTVARLRMYMVIKYKLPLEILHLVNIGLCGVFSGRYNELSGKYRLAMHLIELYAPYTLFKGRFDDMNLEKLRKAMEQNSDGGEYYFDFDPKKIDWDDYFYMVHFPGVLKYLA

SEQ ID NO: 11912 - protein, 335 aa, Triticum aestivum
  misc_feature (1)..(335): Ceres Seq. ID no. 13658932
MLLHVSTAYVCGEQEGLILEKPFMMGDTLREGTHLDIESELNLIKHTQMELKANCATDKAQRKTMKELGLKRARRFGWPNTYVFTKAMGEMLLGHLRGDLPVVIIRPSIITSILKEPLPGWMEGVRTIDSVFLGYAKQALKFFLVDPNTIMDVIPGDMVVNTMMVAMLAHSGEQAQTIYHVTSSMSNPASYMTLRESAHRYFVDNPPRGENGEPIRLNKMRFFSTVARLRMYMVIKYKLPLEILHLVNIGLCGVFSGRYNELSGKYRLAMHLIELYAPYTLFKGRFDDMNLEKLRKAMEQNSDGGEYYFDFDPKKIDWDDYFYMVHFPGVLKYLA

SEQ ID NO: 11913 - DNA, 1423 bp, Triticum aestivum
  misc_feature (1)..(1423): Ceres Seq. ID no. 13658993
agtacgagtcctactaaaactcttgtcatgtcctgggcaataaataggccgatcaaccaccgcccaccgcaccagaagcaaacaccgccggcctgccatggcgcgactgccggacaagattccggcgagccaattcaacgccgccctatccttcatacaacatatcaaagccggcctcgcgtccagccagaccatccacgcagagctcctccacctcctcgcgtgcttgggcaggggcgagaccgccgacacccacgccgtcctggccagggcggacgccatcctccggggccatcccgacctcctccagcgcttcgacgcctttctcggccgtcccagccaccaccaagctgccaaacccgtccgtgaagaccctgtcgccgccgcgccgccgccgaagcggcccaagagggagcaccgccgcacggtcgccgagtgcgccgggcccatgcggttcttggagcgggtgaagatggcggacgccggactctacgacatgctcctggtgcttctgttcaacgtggagatggaggggacgctgaacgcgcatcaaatctacgcgaaggccctcgaggttttcggctccgccgacagccctctcctccgcggcttcacggagttcctgccgctgccgacggccgggcgtgactttctgacgcggcgccgcgcaaaggaggagccggagcacggaccgaagcgcaaggccgtccccgccggcaagccgagcccgagcgcggcaaagaaaccccgcgccgaccacgaccggaagacgaagagcggcagtgtctccgcgtttagggacgcgtgggagttcgagaccacctactcgaagctggcggtcacgctaagacgcaccgagaaatccctggaagagctcgagccaaggaaggagtcgccggaagaagtcgagccggaggcggcgccgggacaccatgggcggccgcgcacgctggagcaactctaccctggccgcgagtgccaggaggtcctccaggagatgtatggcggcatgtgggggcagatgcgggtggcgctcgaggacggcgcgcgcaccgaggtggcgctgcggacgatattgcgcaggctgacgaagctggagcaggtggccgtgaagatggcgatggggcggcgcgatcccgcccgcgtcgaggcccgagtgaagctgcttgtcttagagcggcgggatggcgcccacgccgatggcgggatgaacaagcttaatgtagagttgtagcctgaccgtgtggtggttcttcgaaaggagcggcggcacgtacattgtcgcggtgacccggccgtgcgtgccaccggccggcatgtcgtgaagttgaagaccaagattatcgttgctttgagacgttaatttactttagctttttttcagtttggtcagtccatttcttggccgtcgatttttgctccg

SEQ ID NO: 11914 - protein, 378 aa, Triticum aestivum
  misc_feature (1)..(378): Ceres Seq. ID no. 13658994
MARLPDKIPASQFNAALSFIQHIKAGLASSQTIHAELLHLLACLGRGETADTHAVLARADAILRGHPDLLQRFDAFLGRPSHHQAAKPVREDPVAAAPPPKRPKREHRRTVAECAGPMRFLERVKMADAGLYDMLLVLLFNVEMEGTLNAHQIYAKALEVFGSADSPLLRGFTEFLPLPTAGRDFLTRRRAKEEPEHGPKRKAVPAGKPSPSAAKKPRADHDRKTKSGSVSAFRDAWEFETTYSKLAVTLRRTEKSLEELEPRKESPEEVEPEAAPGHHGRPRTLEQLYPGRECQEVLQEMYGGMWGQMRVALEDGARTEVALRTILRRLTKLEQVAVKMAMGRRDPARVEARVKLLVLERRDGAHADGGMNKLNVEL

SEQ ID NO: 11915 - protein, 261 aa, Triticum aestivum
  misc_feature (1)..(261): Ceres Seq. ID no. 13658995
MRFLERVKMADAGLYDMLLVLLFNVEMEGTLNAHQIYAKALEVFGSADSPLLRGFTEFLPLPTAGRDFLTRRRAKEEPEHGPKRKAVPAGKPSPSAAKKPRADHDRKTKSGSVSAFRDAWEFETTYSKLAVTLRRTEKSLEELEPRKESPEEVEPEAAPGHHGRPRTLEQLYPGRECQEVLQEMYGGMWGQMRVALEDGARTEVALRTILRRLTKLEQVAVKMAMGRRDPARVEARVKLLVLERRDGAHADGGMNKLNVEL

SEQ ID NO: 11916 - protein, 253 aa, Triticum aestivum
  misc_feature (1)..(253): Ceres Seq. ID no. 13658996
MADAGLYDMLLVLLFNVEMEGTLNAHQIYAKALEVFGSADSPLLRGFTEFLPLPTAGRDFLTRRRAKEEPEHGPKRKAVPAGKPSPSAAKKPRADHDRKTKSGSVSAFRDAWEFETTYSKLAVTLRRTEKSLEELEPRKESPEEVEPEAAPGHHGRPRTLEQLYPGRECQEVLQEMYGGMWGQMRVALEDGARTEVALRTILRRLTKLEQVAVKMAMGRRDPARVEARVKLLVLERRDGAHADGGMNKLNVEL

SEQ ID NO: 11917 - DNA, 1818 bp, Triticum aestivum
  misc_feature (1)..(1818): Ceres Seq. ID no. 13659025
accgatagaattttagaatgggttgggtgaggactgacgctggtgtttcgagggttggcctccgagatgcttcgtctcctccacctcctttcctttgggtcccctcatcaattccagtccactagcacagctcgtcttgtcccatcggccgcttgcaggtttcacctgctttgccaagaagactctgcgcctgctcatcgccttcttcttccccgtcgtcttccagccaagacaagattcgagccgtccgtggtgaccgatcgtcagtccagagacgccgccgggaacggaacaccgtcgcgacgccgccagattaaatcgccgcctccagactagcattcaacatgccgaacagcagcggcgtgaccgtgttcgacgacctgcccgagtggcttgtcgttgacgagatccttgtccggctgccggccaaggatgtacttcggtagcgtgccgtccgccagtcgtggcgcagcggcacttccaccaacgcgttcatcctcaaccaccaccaccgccagccctcgctccccatcatcaaaaacatagagggcatctaccgccatgccggatcccctagtgatcaaaagatacagcgtgtcctccggaacgcagatccctttaaaaacgagatgactctatgtcatgccgcttgtgatggcttcctcatcctggagaagcaatccaatttctacatctgcaaccctaccacccgcaagtgtgcttccctgccacatcctccacgacggccaggcttcagcgccttcggcgtagtcggcttctactggctccacacatctggagaacaccgggttctctgggcgtcatacttgaaccaaatgccgtacttggtactcattggggctgccgtcccaactgagttgcctgattacttcgtactcacagttggatcggaccagccaagatgcatccaatggctgacaatttgaaaatatgggtttcctaccctgtccttcaatactccaccagtccacaatcgtgctcgcctgcactgggcaacatgggcaacaggcctcaacataacggtatttgacaccgtagccgagacattctggcagatgagccgcccagcacagttgggtgataaggtgacattgttggatatgtgcggctcccttgccttgtgctgcaccaccaatgactgtgtcaatttagatgtttgggtgttgcaggactatgatgctgaaacctggggctttcagtaccggtttaacttgtcagcaatggaggcattgccaccatttaagtttgacctcaatgctctccctaggatggctgtgatcaatgagcgtgagctgttgatcgagcagtgtgttggccgtctgttgcattgtgacattgatggtgtgtttttaggatatgtgcgagccaaggagcctgggaaccactttatgctaactatgcagcgcctccaagagagcatgatttcagtcccattgtttgaggcgcaggaagaagatgctgtgaacaaggagtctccattcgtcatggtgctataagatgccaggctccatcttaatgatttcgactagctgtttgttgtgcccttgggagtatctatcctgtatgaaccttgctttctgttctgtcttcttactttttagtactagtagaaccgaacactttgtatgtctgaagtagcgcctcatcacttggtgcttgttatgctatcttgagcatcatgttgatgttgtaaaaaattgtgtgtctatgctattgctatgtagaactgctataatgttcatgttcacccctgttgactttcagtttgcgttgttattaaggcatggttgcagtttg

SEQ ID NO: 11918 - protein, 146 aa, Triticum aestivum
  misc_feature (1)..(146): Ceres Seq. ID no. 15219941
MSRPAQLGDKVTLLDMCGSLALCCTTNDCVNLDVWVLQDYDAETWGFQYRFNLSAMEALPPFKFDLNALPRMAVINERELLIEQCVGRLLHCDIDGVFLGYVRAKEPGNHFMLTMQRLQESMISVPLFEAQEEDAVNKESPFVMVL

SEQ ID NO: 11919 - protein, 131 aa, Triticum aestivum
  misc_feature (1)..(131): Ceres Seq. ID no. 15219942
MCGSLALCCTTNDCVNLDVWVLQDYDAETWGFQYRFNLSAMEALPPFKFDLNALPRMAVINERELLIEQCVGRLLHCDIDGVFLGYVRAKEPGNHFMLTMQRLQESMISVPLFEAQEEDAVNKESPFVMVL

SEQ ID NO: 11920 - protein, 105 aa, Triticum aestivum
  misc_feature (1)..(105): Ceres Seq. ID no. 15219943
MTLCHAACDGFLILEKQSNFYICNPTTRKCASLPHPPRRPGFSAFGVVGFYWLHTSGEHRVLWASYLNQMPYLVLIGAAVPTELPDYFVLTVGSDQPRCIQWLTI

SEQ ID NO: 11921 - DNA, 572 bp, Triticum aestivum
  misc_feature (1)..(572): Ceres Seq. ID no. 13659058
ctctcaccaatctcaccccacacccctcggtcgagctactctcccccacgatctcctcgccgccgctgcccacgccggcacgctcgtcgccgctgcaaccgcccacgccggcacgctcgtcgtcgtcgccgtcgtatcgggatctacctcctcatcggcttcctctcccccatggtcgaccccgagctcgacccctccgccgcccacgacgggcacgccctccccaaccgcggatcttgcgagttcaagcacttcatcaggaggctcccggagttcaagttctggggtcatcgacatggactactgcggcctagtgggcatcatgctattcaaccactcggaggcggacttcgtcgtgaagcccggcgaccgcgccgaacatatgatcgtccaggtcattgcgacgccggaggtcgccgaggtgaaggacctcgacgccatcgtctggcgggagggagtgctctgagccttggtagatacatctataagtggtctagttgtttgcatctgatgttaaattggatctcgagatctcgagttaagatgttcaatgctgtatccatgaatgctgc

SEQ ID NO: 11922 - protein, 190 aa, Triticum aestivum
  misc_feature (1)..(190): Ceres Seq. ID no. 13659059
LSPISPHTPRSSYSPPRSPRRRCPRRHARRRCNRPRRHARRRRRRIGIYLLIGFLSPMVDPELDPSAAHDGHALPNRGSCEFKHFIRRLPEFKFWGHRHGLLRPSGHHAIQPLGGGLRREARRPRRTYDRPGHCDAGGRRGEGPRRHRLAGGSALSLGRYIYKWSSCLHLMLNWISRSRVKMFNAVSMNA

SEQ ID NO: 11923 - protein, 154 aa, Triticum aestivum
  misc_feature (1)..(154): Ceres Seq. ID no. 13659060
SHQSHPTPLGRATLPHDLLAAAAHAGTLVAAATAHAGTLVVVAVVSGSTSSSASSPPWSTPSSTPPPPTTGTPSPTADLASSSTSSGGSRSSSSGVIDMDYCGLVGIMLFNHSEADFVVKPGDRAEHMIVQVIATPEVAEVKDLDAIVWREGVL

SEQ ID NO: 11924 - protein, 133 aa, Triticum aestivum
  misc_feature (1)..(133): Ceres Seq. ID no. 13659061
MVDPELDPSAAHDGHALPNRGSCEFKHFIRRLPEFKFWGHRHGLLRPSGHHAIQPLGGGLRREARRPRRTYDRPGHCDAGGRRGEGPRRHRLAGGSALSLGRYIYKWSSCLHLMLNWISRSRVKMFNAVSMNA

SEQ ID NO: 11925 - protein, 56 aa, Triticum aestivum
  misc_feature (1)..(56): Ceres Seq. ID no. 13659062
MDYCGLVGIMLFNHSEADFVVKPGDRAEHMIVQVIATPEVAEVKDLDAIVWREGVL

SEQ ID NO: 11926 - DNA, 1176 bp, Triticum aestivum
  misc_feature (1)..(1176): Ceres Seq. ID no. 13659066
aaagaaaacgcaatccaatcgagaccattcttggcgaggagaagggggagaagaaagcagatcggcgccggcgccggccgtggccgcactgatcgactcggactgtgggtgtggtcttccgcccgagcacccataaacatgggtccagaggcgcctgagcttcaaccaaaccccgtcaatcccgctggacgccttttgccagagcacagctcgatggcgatcgccgatgtcaacatgggtctacaggcgcctgaacttttgtcatatcacatcaatcgcgcacgacccttctatgatgaaaagtggaaaagtatgaatgtggggaagaagaagacgaagaagaagattttccgggttccgcagcatgagctggatgacatactttcctatcaggtgcccgcttggccgaaagtggataaacgctgtccttcagccgccatagagatggaaaagatgaaggaatacttcttggccgggcgggagaagatgaggcgagagtatgaggcccatggctatgctacttttgaagcagaggtcaccgatgatgaggaggaggaagacgcagcaatgactcctcctcacgaggagaaggatgttgtgcgagcgacatcttttcatgacaagaatgacgatgcagcagcgactcatcctcacgaggagaaggatgatgtgccagcgacatcttatcacgacaaaaatgacgaagcagcagcgacgactcctcacgaggagaaggatgatgtgccagccacatcttattatgacaagaatgacgatgcagcagcgacgactcctcacgaggagaaggatgatgtgccagccacatcttattatgacaagaatgacgatgcagcagcgactcctcctcacgaggagaaggatgatgtgccagccacatcttattatgacaagaatgacgatgcagcagcgatgtcttctccgtggattattccacgaggaagaggccgaagaagatttcgcccaggagttgtcaagcaagcaagcggtgttaagaaaataacttagatgtattagttgttttcagtgttagttttggctgttggattagttggttccagtttctgggactgtattgtgtcatctttatttataacttcttgtgtaaaacctacagctgataatttgtcagccgacttgatataatatgataaattt

SEQ ID NO: 11927 - protein, 341 aa, Triticum aestivum
  misc_feature (1)..(341): Ceres Seq. ID no. 13659067
KENAIQSRPFLARRRGRRKQIGAGAGRGRTDRLGLWVWSSARAPINMGPEAPELQPNPVNPAGRLLPEHSSMAIADVNMGLQAPELLSYHINRARPFYDEKWKSMNVGKKKTKKKIFRVPQHELDDILSYQVPAWPKVDKRCPSAAIEMEKMKEYFLAGREKMRREYEAHGYATFEAEVTDDEEEEDAAMTPPHEEKDVVRATSFHDKNDDAAATHPHEEKDDVPATSYHDKNDEAAATTPHEEKDDVPATSYYDKNDDAAATTPHEEKDDVPATSYYDKNDDAAATPPHEEKDDVPATSYYDKNDDAAAMSSPWIIPRGRGRRRFRPGVVKQASGVKKIT

SEQ ID NO: 11928 - protein, 295 aa, Triticum aestivum
  misc_feature (1)..(295): Ceres Seq. ID no. 13659068
MGPEAPELQPNPVNPAGRLLPEHSSMAIADVNMGLQAPELLSYHINRARPFYDEKWKSMNVGKKKTKKKIFRVPQHELDDILSYQVPAWPKVDKRCPSAAIEMEKMKEYFLAGREKMRREYEAHGYATFEAEVTDDEEEEDAAMTPPHEEKDVVRATSFHDKNDDAAATHPHEEKDDVPATSYHDKNDEAAATTPHEEKDDVPATSYYDKNDDAAATTPHEEKDDVPATSYYDKNDDAAATPPHEEKDDVPATSYYDKNDDAAAMSSPWIIPRGRGRRRFRPGVVKQASGVKKIT

SEQ ID NO: 11929 - protein, 270 aa, Triticum aestivum
  misc_feature (1)..(270): Ceres Seq. ID no. 13659069
MAIADVNMGLQAPELLSYHINRARPFYDEKWKSMNVGKKKTKKKIFRVPQHELDDILSYQVPAWPKVDKRCPSAAIEMEKMKEYFLAGREKMRREYEAHGYATFEAEVTDDEEEEDAAMTPPHEEKDVVRATSFHDKNDDAAATHPHEEKDDVPATSYHDKNDEAAATTPHEEKDDVPATSYYDKNDDAAATTPHEEKDDVPATSYYDKNDDAAATPPHEEKDDVPATSYYDKNDDAAAMSSPWIIPRGRGRRRFRPGVVKQASGVKKIT

SEQ ID NO: 11930 - DNA, 1187 bp, Triticum aestivum
  misc_feature (1)..(1187): Ceres Seq. ID no. 13659131
acttagaacatcctaatcgaaaactcatattcttcattcacagcagcattcttactatgcaccattgtctgcaagtggcgtatctattcctgttgagaccacatccatccccccagtaccaggttcttattatagctatccttccgtcactatggctgccactgaagtagcggttgaatcttctggatactatgcttcatcaacctctgccatttctagtggtgaattagataacaaaacaagcttggcctcccttgttgcaaatagtaatgtgaatactgtggagtctgataaagtgatatccaaggagcccacagttgcgtctttgagccaatcagtaggagcagtatcttcaggaccaacagtacatggaagttctactcaagcttctactagctccactaatcagactaaagttcctcgtactaagaagcgacctgttgctgttgcatcatcactgagatctaataagaaggtctcaagtctggtggataagtggaaagctgcaaaggaggagcttcgtgatgaagaggaagaggagcctgaagatgctttggagtacctagaaaggaaacgccggaaggaaatagatgggtggcgtaagcaacaaatagctagtggagaagccaaggaaaatgctaattttgttccccttggtggtgactggcgtgaccgtgtaaaacgcaaaagagctgaagcaaagaaggaagcaaagactgaacctattcgtgcagctgccgaacaacacaaaggggagcctgatctctcagagctctccaagggttttccttctgggtggcaggcatacatagacgagtctacgaagcaagtgtactatgggaacaacctcacttccgagacgacttgggatcggcctagcaaataaagattggattagttgaagatggtctagttttctctgtagatatccctgtacctcgatatatacgttgcctgtcttgaatggaacggatatgacagtcacgccctgagaagcaaccggtttctgatgttaccttggttttgaggctgtattgtttcttctattttccactgggagatcgtagtggggggaaggagagttcgttttggtatagaggcacccttgtaagagtggcaacttgagatcgaattactgaagcaaaatctactagttagttgctgaccaaggaaaaatgtgccttgtc

SEQ ID NO: 11931 - protein, 244 aa, Triticum aestivum
  misc_feature (1)..(244): Ceres Seq. ID no. 13659132
MAATEVAVESSGYYASSTSAISSGELDNKTSLASLVANSNVNTVESDKVISKEPTVASLSQSVGAVSSGPTVHGSSTQASTSSTNQTKVPRTKKRPVAVASSLRSNKKVSSLVDKWKAAKEELRDEEEEEPEDALEYLERKRRKEIDGWRKQQIASGEAKENANFVPLGGDWRDRVKRKRAEAKKEAKTEPIRAAAEQHKGEPDLSELSKGFPSGWQAYIDESTKQVYYGNNLTSETTWDRPSK

SEQ ID NO: 11932 - DNA, 659 bp, Triticum aestivum
  misc_feature (1)..(659): Ceres Seq. ID no. 13659133
caaatgctcaagattttcaaggaacatgtcagcaagacctcaattttggatgactttgcattttacgagaaccgacagaagttgatgcaagaaaagagagcaaagcaacaaccgcttcaggggcagggtgttgatgagaaggagaagagcgcagttaacgggaattccgctgcacagaagcagacaccgagcaaggagagcaccacccctgccgccggtgaagagccgaacgcttccaaacccaccacagctgaaagcggcggcgcgagtgccaactagcgtgatatatttcttacgctcgttgctgtaacatgcggtagtccattgcgcaaaactcggtcaggcttcggaatatgcgcggatcatacatgggaaactaaatttaggtcgtgtgacttggttctcatcgtttaggtctcttatatacttggtgacatcaggttcttatatggcccctttcctattcctatttttgtttcggagtcttgttggtttagtaatttcagctatttgttattgtttagactaaaggagccgattttcgatacttctagacaacatttaaggtactaagtttttatgagtgttgtagtgctggagaaagtaataagaacaaagaactcctggtttttctagtcaaaaaaaaaaaaagaaaaaaa

SEQ ID NO: 11933 - protein, 92 aa, Triticum aestivum
  misc_feature (1)..(92): Ceres Seq. ID no. 13659134
QMLKIFKEHVSKTSILDDFAFYENRQKLMQEKRAKQQPLQGQGVDEKEKSAVNGNSAAQKQTPSKESTTPAAGEEPNASKPTTAESGGASAN

SEQ ID NO: 11934 - protein, 91 aa, Triticum aestivum
  misc_feature (1)..(91): Ceres Seq. ID no. 13659135
MLKIFKEHVSKTSILDDFAFYENRQKLMQEKRAKQQPLQGQGVDEKEKSAVNGNSAAQKQTPSKESTTPAAGEEPNASKPTTAESGGASAN

SEQ ID NO: 11935 - protein, 64 aa, Triticum aestivum
  misc_feature (1)..(64): Ceres Seq. ID no. 13659136
MQEKRAKQQPLQGQGVDEKEKSAVNGNSAAQKQTPSKESTTPAAGEEPNASKPTTAESGGASAN

SEQ ID NO: 11936 - DNA, 932 bp, Triticum aestivum
  misc_feature (1)..(932): Ceres Seq. ID no. 13659177
gacttcctctcctctctgtgccccccaatcctcctcgccaactcattcccagagcaccaagaagatctggagaagagaggaggccattgctagctccccaccatccccttctccctctatctgcctagcgttcttgcttggtcgccatggccaccatcctggagaacatccagaaggcgcggttcctgccgacgaggccgctgagggacgacctgcccaccttccagggcggcaaggaggaggagagccacctcatgggcctgcggaagcgcctctccagcttctccggcaagatccagcccatctcctccgcgtccgccgagtgggcgttcaggcggacccggtcggcgccgtcgctcgccgccgagttcgcgggcggcccgctcaagcgctggtgggactggggcctcggctggctgctctccaagaagctcggcttcgccggcgacctggagatgaacgaggaggaggcggccgcgctcggccgccaaagcaggggcacctgggcccacgtcctctacaaggtgcgctccggggtccgccgcctcgtcgcgtccgaccactcgctgcccaccacgcaccaccgcaaggcctcgctgcccccgtcctcctccgcgcaccagcactgcaagcccgcgccgcagttcgcctacacccagagcttccagtacggccaagcaatggcgcactaagcagcttgctttgcatcttgttctggtggtgtccgcgagatccaaatagacacgacgacgggaaggaagctcgtgaagaaggagaagattcaggtctcaggtgagatcgatggggaagatggctcgctacacaattatatctgggaatttagagttgttagtttaccgtgctgctttcttttttgtgggtagatctaatgtctctacgtataatagataccgagtgtatgctggtggtcc

SEQ ID NO: 11937 - protein, 264 aa, Triticum aestivum
  misc_feature (1)..(264): Ceres Seq. ID no. 13659178
TSSPLCAPQSSSPTHSQSTKKIWRREEAIASSPPSPSPSICLAFLLGRHGHHPGEHPEGAVPADEAAEGRPAHLPGRQGGGEPPHGPAEAPLQLLRQDPAHLLRVRRVGVQADPVGAVARRRVRGRPAQALVGLGPRLAALQEARLRRRPGDERGGGGRARPPKQGHLGPRPLQGALRGPPPRRVRPLAAHHAPPQGLAAPVLLRAPALQARAAVRLHPELPVRPSNGALSSLLCILFWWCPRDPNRHDDGKEAREEGEDSGLR

SEQ ID NO: 11938 - protein, 181 aa, Triticum aestivum
  misc_feature (1)..(181): Ceres Seq. ID no. 13659179
MATILENIQKARFLPTRPLRDDLPTFQGGKEEESHLMGLRKRLSSFSGKIQPISSASAEWAFRRTRSAPSLAAEFAGGPLKRWWDWGLGWLLSKKLGFAGDLEMNEEEAAALGRQSRGTWAHVLYKVRSGVRRLVASDHSLPTTHHRKASLPPSSSAHQHCKPAPQFAYTQSFQYGQAMAH

SEQ ID NO: 11939 - protein, 145 aa, Triticum aestivum
  misc_feature (1)..(145): Ceres Seq. ID no. 13659180
MGLRKRLSSFSGKIQPISSASAEWAFRRTRSAPSLAAEFAGGPLKRWWDWGLGWLLSKKLGFAGDLEMNEEEAAALGRQSRGTWAHVLYKVRSGVRRLVASDHSLPTTHHRKASLPPSSSAHQHCKPAPQFAYTQSFQYGQAMAH

SEQ ID NO: 11940 - DNA, 764 bp, Triticum aestivum
  misc_feature (1)..(764): Ceres Seq. ID no. 13659204
aacttctccttccgttgcctccgcttcgccttttcccgttccgtccaaataaaacgctcgagctaccaaaccctaggtagggctcctttcgatccgattcgagtcgatctcagttgggtgcgagattggactggagggggatgacgatacctagtgccgagggattcctcccggcggcgagctgcctgccgtgcacggcggaggaggaaagggcgaccgtcgacgcactcacgcgggaggccgacgcgaatgtcaaagacggcgatctccgctatctcatctcacaaagctggtggaccaactggcaatcttatgtgggcttactcagttatggggagaatgacactgacattcctcttcaacctgcaagtagacctggagagattgataacagaaagcttgttttggaggaaactagcagtggcagtgaagatacagagctccaaagaaccttaagagaaggggaggactacactttggtgccacaagatgtctggagaaaactatatgactggtatgcagttgcaacggcacgcaatatatgtttttcattgtttctttagccctgtttactgcactttgtagcaggaacttggctagacctataatatcacctccgccatcctgcttgttggcattagttgttgccttttatttttctctcgcctgccactagtagttttggaccacattatgtaaatacttctgtatatgtatatcccaccatttttggtgtgtgtttgctccttggtggttggtttgtg

SEQ ID NO: 11941 - protein, 140 aa, Triticum aestivum
  misc_feature (1)..(140): Ceres Seq. ID no. 15219954
MTIPSAEGFLPAASCLPCTAEEERATVDALTREADANVKDGDLRYLISQSWWTNWQSYVGLLSYGENDTDIPLQPASRPGEIDNRKLVLEETSSGSEDTELQRTLREGEDYTLVPQDVWRKLYDWYAVATARNICFSLFL

SEQ ID NO: 11942 - DNA, 737 bp, Triticum aestivum
  misc_feature (1)..(737): Ceres Seq. ID no. 13659330
cctgccttgttgatttgcccggatatggttttgcttatgcaaaggatgaagttaaagagtcttggcaggagcttgtgaaagagtatgtttcaaacagggttggtctggatagagtgtgccttcttgtccacactaaacgtggaatgaaaccattggactacgagcttatagatctaatggaaagatacaagacaccgtaccagattgtattaaccaagactgatttggttttccctatagacgtcgctcgccgtgccatggaaatccaagagagcctcaagaagaacaagtcggtcgtaaagcccgtgatgatggtgagctccaagacgggggcaggcatacgcaacctgagaggcgtgcttgggaagctagctcgcttcatcaagccgtagggaggcgatcgcttagcctggagtgcgtgattccgggaaagataaatgcccaagtggttcggcttttaggccttgaggtccttccttgctaggatgggatatgacgccatgttgtatctaagatttggatcaccgaaccatttccctgtctgagagaagattctatcatttagaggctactagaaggatactgtgtggttcactgggctgtttttctttttctttttttgcaaagtgtatttgcactgtattagcaaaattcatgtcttaaataaacttctacgctggaaaaaaaaaaaaaaaaaagcttatcgataccgtcgacctcgagggggggcccggtac

SEQ ID NO: 11943 - protein, 129 aa, Triticum aestivum
  misc_feature (1)..(129): Ceres Seq. ID no. 13659331
CLVDLPGYGFAYAKDEVKESWQELVKEYVSNRVGLDRVCLLVHTKRGMKPLDYELIDLMERYKTPYQIVLTKTDLVFPIDVARRAMEIQESLKKNKSVVKPVMMVSSKTGAGIRNLRGVLGKLARFIKP

SEQ ID NO: 11944 - protein, 82 aa, Triticum aestivum
  misc_feature (1)..(82): Ceres Seq. ID no. 13659332
MKPLDYELIDLMERYKTPYQIVLTKTDLVFPIDVARRAMEIQESLKKNKSVVKPVMMVSSKTGAGIRNLRGVLGKLARFIKP

SEQ ID NO: 11945 - protein, 71 aa, Triticum aestivum
  misc_feature (1)..(71): Ceres Seq. ID no. 13659333
MERYKTPYQIVLTKTDLVFPIDVARRAMEIQESLKKNKSVVKPVMMVSSKTGAGIRNLRGVLGKLARFIKP

SEQ ID NO: 11946 - DNA, 1123 bp, Triticum aestivum
  misc_feature (1)..(1123): Ceres Seq. ID no. 13659393
acctcactcactcacccgaccgcgcgccggcccgctcctgcactacacccagaggcttcctcccaccggacgcaggatcgcgaccgcctagctacctagagcagagcttggggaattcttacggctcagagcctgcctgggctctccggtggttgttccttccagcatcgatctgcttcttgggcgatcttggtagctgatggaggcggcattggttctggtggtggcggtgctccttgggtcctcagcccttgttgcctcagatttctgcgtgtgccggtcggagcagccgacggcggtgctgcagaaggcgatcgactacgcgtgcgggcagggcgcggactgcacggccatcgcgcagagcggggcgtgctacagccccgacgaggtcgccgcgcactgctcctgggccgccaacagctacttccagaagttcaggtccaccggcgccacctgcgacttctccggcgccgccaccctctccaccaccgaccccagtttctctggttgcacgttcccatccagtgccagtgccgccggcaccaccacgggaaccgggacagccacgacgggcaccggcaccaccacgggcaccgggacgaccacggggggcaccttcagccccgggatgggcaccggcttcaacagcaccgggttcagcccgacaaccgggagcatggacggcaccgccgcggcggccggcttgcttccgtcgatcagactggcggcctccatcgccgtcctcctcctctcctacttggcgctgccatgaactctgcctgcctgtccgtctcttctcatggcagaacacattagcagttagcttcagtggccttctggcctggcctgccagaagcaagctgagagtgtggatttgtctaatggaatccatcgatctggaagagttgatcgccgttattgttccctagtgtcatgggctggttagctgggggtgtcattttggttctagcttaattttaatttatatatggcctcccacaggctggaggagtggtgtatgatttggtaggatggctgtctctttccctctgcaaggacccttgtcttccatgtctgtttttatactgttggcctctcttaatttttaagcattttttgcttg

SEQ ID NO: 11947 - protein, 190 aa, Triticum aestivum
  misc_feature (1)..(190): Ceres Seq. ID no. 15219965
MEAALVLVVAVLLGSSALVASDFCVCRSEQPTAVLQKAIDYACGQGADCTAIAQSGACYSPDEVAAHCSWAANSYFQKFRSTGATCDFSGAATLSTTDPSFSGCTFPSSASAAGTTTGTGTATTGTGTTTGTGTTTGGTFSPGMGTGFNSTGFSPTTGSMDGTAAAAGLLPSIRLAASIAVLLLSYLALP

SEQ ID NO: 11948 - DNA, 2303 bp, Triticum aestivum
  misc_feature (1)..(2303): Ceres Seq. ID no. 13659394
atcacccattctcctcctccctcttctccgtccgtcaatccccctctatctcctccccgcaccagctcttgtactactcggagcacctccacccctgaccccgactccgaccacccatccatccgcttcttgcttcttccgctgtccgggccaagaatctgagatcctgtccggcgccgccgcttgtttcttgatggccgcatagatggcaggatcaacttcattttgagcttgtcccacaaggttgcaatcaccagtatgtcagctaaggcttcagaacgtacatatagatgctcagatgattcacaaatggcgtactacaacaactcggtgcctttagcagaaaatggacggttctatatgatgcaaaatcatctggatgttcactacacatcttcaggtgatgggtcacagaaaattagttccaatcctcaagtatttgaagcacagtactgcacactcgaatcatcatcggcaaatggtgtttatcctacacagagctccacatcttctcatagcatctcccctataagtgggagccccctgtctcagaatgatagccactcataccacacatatgattcacccccaactgcttcatgtgttaccgagataccggatttccagagtaaactgaaggagctagaaaatgcaattcttggacctgaattggacatagcctctgacagccccgagagcttattgcaagccaaccatcctttgaaacaagataactggagacagcttctgggaattaacacaggagacttgaagcaggtgatcatagcatgcggtaaggctgttgctgcgaatgatatgtatgcaacagaactattgatatctgagctaggtcagctggtgtctgtctctggagatccaatgcaacgcctaggggcatatatgttggaaggccttgtggccaggctctctttctctggaagtaagctgtataaatccttgaagtgcaaagaacctacaagctctgagctcatgtcttacatgcatctcctctgtgagatctgcccgttctacaagtttggttacatgtcggccaatggtgccatagcagaggctatcwrwggcgagaacttcgttcacatcattgatttccaaatcgcacaggggagccagtggataactatcattcaggctcttgcagcgaggcccgggggtccaccattcctaagaatcactggtatagatgactcaaactctgcttatgcccgaggtggtggactggatatggttgggacaagattgcatagcatctctgcttcgtgtggccttccctttgagttcaatgctgtccatgctgctagccatgaggtttatattcagcatcttgacacaagacctggggaggctattgtagtgaattttgcctatcagctgcaccatactcctgatgaaagcgtgagcgtggaaaatcaccgggacaggatcataagaatgatcaagagcctgtccccctagggtggtgactcttgttgagcaggagtcgaacacaaacacaagtgcattcttgccaaggtacttggagaccctcgactactatacggcaatgtttgagtcaatagatgttgctctaccaagggatgataagaggcggattagcacggagcaacactgtgtggcaagggatatcgtcaatttaatcgcgtgcgagggtgctgaaagggttgagaggcacgaggtgtttgggaaatggaaggcgaggtttgcaatggctggattcaggccgtacccgctgagttcggtggtgaacaacaccatcaaaacgctgctggatagctaccacagttgctacaggcttgaggagagggacggagtcctttaccttggttggaagggcagagtgttggtcgtgtcttctgcgtggtgctgacatgtcttgaggagaagctcatgtcatgtatgtacactgtttttattgttgaaacttaattcttgagtgattcgtgttacgtcgatccacgatatttctatagcctgacttgtcctttacccaatttcagatggaacctgagcttatcagtttcagatggaacctgagcttatataagggctttgctgcttgtctgcaccaggagttgctgtgatgataccgcgacagccgtgacttagaagaaggcatagtgattaaataaataaatatgttcatagctaggaatttggtgtgttgtggtttgctcccgttgttctaggattgacatgcttgtaatatactgtactactaattagaggatgtttagagacgattaaagggtatgcaggcacaagaggcggctgttgcatgtgtcctc

SEQ ID NO: 11949 - protein, 404 aa, Triticum aestivum
  misc_feature (1)..(404): Ceres Seq. ID no. 15219966
  misc_feature (274)..(274): Xaa is any aa, unknown or other
MSAKASERTYRCSDDSQMAYYNNSVPLAENGRFYMMQNHLDVHYTSSGDGSQKISSNPQVFEAQYCTLESSSANGVYPTQSSTSSHSISPISGSPLSQNDSHSYHTYDSPPTASCVTEIPDFQSKLKELENAILGPELDIASDSPESLLQANHPLKQDNWRQLLGINTGDLKQVIIACGKAVAANDMYATELLISELGQLVSVSGDPMQRLGAYMLEGLVARLSFSGSKLYKSLKCKEPTSSELMSYMHLLCEICPFYKFGYMSANGAIAEAIXGENFVHIIDFQIAQGSQWITIIQALAARPGGPPFLRITGIDDSNSAYARGGGLDMVGTRLHSISASCGLPFEFNAVHAASHEVYIQHLDTRPGEAIVVNFAYQLHHTPDESVSVENHRDRIIRMIKSLSP

SEQ ID NO: 11950 - protein, 387 aa, Triticum aestivum
  misc_feature (1)..(387): Ceres Seq. ID no. 15219967
  misc_feature (257)..(257): Xaa is any aa, unknown or other
MAYYNNSVPLAENGRFYMMQNHLDVHYTSSGDGSQKISSNPQVFEAQYCTLESSSANGVYPTQSSTSSHSISPISGSPLSQNDSHSYHTYDSPPTASCVTEIPDFQSKLKELENAILGPELDIASDSPESLLQANHPLKQDNWRQLLGINTGDLKQVIIACGKAVAANDMYATELLISELGQLVSVSGDPMQRLGAYMLEGLVARLSFSGSKLYKSLKCKEPTSSELMSYMHLLCEICPFYKFGYMSANGAIAEAIXGENFVHIIDFQIAQGSQWITIIQALAARPGGPPFLRITGIDDSNSAYARGGGLDMVGTRLHSISASCGLPFEFNAVHAASHEVYIQHLDTRPGEAIVVNFAYQLHHTPDESVSVENHRDRIIRMIKSLSP

SEQ ID NO: 11951 - protein, 370 aa, Triticum aestivum
  misc_feature (1)..(370): Ceres Seq. ID no. 15219968
  misc_feature (240)..(240): Xaa is any aa, unknown or other
MMQNHLDVHYTSSGDGSQKISSNPQVFEAQYCTLESSSANGVYPTQSSTSSHSISPISGSPLSQNDSHSYHTYDSPPTASCVTEIPDFQSKLKELENAILGPELDIASDSPESLLQANHPLKQDNWRQLLGINTGDLKQVIIACGKAVAANDMYATELLISELGQLVSVSGDPMQRLGAYMLEGLVARLSFSGSKLYKSLKCKEPTSSELMSYMHLLCEICPFYKFGYMSANGAIAEAIXGENFVHIIDFQIAQGSQWITIIQALAARPGGPPFLRITGIDDSNSAYARGGGLDMVGTRLHSISASCGLPFEFNAVHAASHEVYIQHLDTRPGEAIVVNFAYQLHHTPDESVSVENHRDRIIRMIKSLSP

SEQ ID NO: 11952 - DNA, 1096 bp, Triticum aestivum
  misc_feature (1)..(1096): Ceres Seq. ID no. 13659405
cattacttagaacatcctaatcgaaaatctggcagcacaactgaaacactttcagtaaaacgtgcatttagtgcaattcgtcgatctgatgtagttgcccttgttattgaagcgatggcctgtgtctcggagcaggtatttatctcaacaatccattcacatgcgcgcacaaacatttcatgtagatacatagtttactgtaacaccgtgtttttttttgcggtaccaaggattataaaattgcagaaaggattgagaaagagggaaaggcatgtgtcattgttgtgaacaagtgggatacaatcccaaacaagaacaatgagagtactacacattatgaacaggatgtaagagagaagcttcgtgtacttgactgggcacctattgtttactgttctgcgataaatgggaacagcgttgagaagattatttctgctgcttctttggttgaagaggaaaggtctagaagacttggcacctctattcttaaccaagtggttagagaagctgtagcattcaaagcaccaccacgaacaagaggcggcaaaagaggccgtgtttattacacaacacaggctgctgttcgtccaccaacatttgttctcttcgtcaatgacgcaaaacttttccctgagccgtatcggcggtacatgcacaagcagctccggtctgatgctggattcccaggcacgcccattcgcctactgtggcgtagcaggaagcggactgataggcaacagaggagatcaaatacggaagctcgcagtgcgcttgtagcgttgagttagcatgtgaagcaatgttgctacgttaaaaaagaaaaggaaaacgtgggtatcctttttcctccttgttcacatgcttttcctggctgcgaatgtgtgactatcaatgggccaataaggttcatattcaaatgaaaaaggttttgtttctcttcttactcctcgactactgccaaagctgaagtatggtcactgtactctaatactctaataattttttggtctctcaaatgctagaacatatgaaatttgtcttctaaaaaaaaaaaaaaaaaagcttatcgataccgtcgacctsgagggggggcccg

SEQ ID NO: 11953 - protein, 95 aa, Triticum aestivum
  misc_feature (1)..(95): Ceres Seq. ID no. 15219969
HYLEHPNRKSGSTTETLSVKRAFSAIRRSDVVALVIEAMACVSEQVFISTIHSHARTNISCRYIVYCNTVFFFAVPRIIKLQKGLRKRERHVSLL

SEQ ID NO: 11954 - protein, 57 aa, Triticum aestivum
  misc_feature (1)..(57): Ceres Seq. ID no. 15219970
MACVSEQVFISTIHSHARTNISCRYIVYCNTVFFFAVPRIIKLQKGLRKRERHVSLL

SEQ ID NO: 11955 - protein, 54 aa, Triticum aestivum
  misc_feature (1)..(54): Ceres Seq. ID no. 15219971
MTQNFSLSRIGGTCTSSSGLMLDSQARPFAYCGVAGSGLIGNRGDQIRKLAVRL

SEQ ID NO: 11956 - DNA, 827 bp, Triticum aestivum
  misc_feature (1)..(827): Ceres Seq. ID no. 13659433
attcacatcgattgatcatcgcagctagctaggttgcggcaacatggagagcggcagcacggcggcgtcgagcgacgaggccgtgagatcgcccggcgggacgacggcggtggcggccgcccggccgtactacgagtgcgtgttctgcaagcgcgggttcaccacggcgcaggcgctgggcgggcacatgaacatccaccgccgggaccgcgccaagcccgcccgcctcacgacgtcagcttcccggagcacagagtgcaacttggcgtaccccccagcgccgccggccacgtccctgatgagcagcggcgacttcgccatgttgtactacggccggcacaccggagccggagtggacgccgaggccgtgagccctggtagcccgatcccgagggagctgagcctgttcggcgcggacgacgacagtcacgacgaccgtgacgactgcttgcaactgggcctccggtgccatggaagcagcagcggcgacgggttcgagcggcggccggacggcgagctgccggagaggaagctggacttggagctcaggctcgggcccgggcctcgtccgaggcactgatcactcgcacggtaccctggtgcaactcagacacaggaacgcactcatctatatacatgcatgggcttcctagctagtattacttcagwtcttktgttgcttgatatcattattgctattctcatcttctgctgcttgtttatatgactaaatatatttatatttcgccataacaacaagagcagatgctttgatgtattgaatgtacatggagagctatatatgcttggctcttgttttgattcgc

SEQ ID NO: 11957 - protein, 178 aa, Triticum aestivum
  misc_feature (1)..(178): Ceres Seq. ID no. 15219972
MESGSTAASSDEAVRSPGGTTAVAAARPYYECVFCKRGFTTAQALGGHMNIHRRDRAKPARLTTSASRSTECNLAYPPAPPATSLMSSGDFAMLYYGRHTGAGVDAEAVSPGSPIPRELSLFGADDDSHDDRDDCLQLGLRCHGSSSGDGFERRPDGELPERKLDLELRLGPGPRPRH

SEQ ID NO: 11958 - protein, 130 aa, Triticum aestivum
  misc_feature (1)..(130): Ceres Seq. ID no. 15219973
MNIHRRDRAKPARLTTSASRSTECNLAYPPAPPATSLMSSGDFAMLYYGRHTGAGVDAEAVSPGSPIPRELSLFGADDDSHDDRDDCLQLGLRCHGSSSGDGFERRPDGELPERKLDLELRLGPGPRPRH

SEQ ID NO: 11959 - protein, 93 aa, Triticum aestivum
  misc_feature (1)..(93): Ceres Seq. ID no. 15219974
MSSGDFAMLYYGRHTGAGVDAEAVSPGSPIPRELSLFGADDDSHDDRDDCLQLGLRCHGSSSGDGFERRPDGELPERKLDLELRLGPGPRPRH

SEQ ID NO: 11960 - DNA, 648 bp, Triticum aestivum
  misc_feature (1)..(648): Ceres Seq. ID no. 13659499
agaacatcctaatcgaaaatatgcttcggatctactatattcaggcgtcagcctaaatccgcaccggaagaggggtttgaagacatactctctcagtcttgatcactcgatgtggttccacaagcctgtgaaagctgatgactggttgttatatgtgatcgacagcccatccgcacatggtggtaggggattcgtcaccggacgtatgttcaaccggcaaggagagctcatcgtgtcgctgacccaagaggcgttgattaggagggccaagacacccgggcaaaccccaaggccgaagctttgagatgtgcagaagagccatgcctgtactttaatattttctttccccttgctgtcccgtatttttatcttatatagtacacggggacaatggtgagatttatgcataggagtacagcttacagcttgaatttggcacacatgcttattgtgaacgattgtatcctcgcatgctgattcacattcaggttttcctttgcatatgtggatggcaattgccatcaaacacgccgcacatgaatgtagacagatgtacctcaaattcgaagttttgtaatcctgaggtcatgtagtaccatttcaaatatcaaaaaaaaaaaaaaaaaagcttatcgataccgtcgacct

SEQ ID NO: 11961 - protein, 100 aa, Triticum aestivum
  misc_feature (1)..(100): Ceres Seq. ID no. 15220673
EHPNRKYASDLLYSGVSLNPHRKRGLKTYSLSLDHSMWFHKPVKADDWLLYVIDSPSAHGGRGFVTGRMFNRQGELIVSLTQEALIRRAKTPGQTPRPKL

SEQ ID NO: 11962 - protein, 64 aa, Triticum aestivum
  misc_feature (1)..(64): Ceres Seq. ID no. 15220674
MWFHKPVKADDWLLYVIDSPSAHGGRGFVTGRMFNRQGELIVSLTQEALIRRAKTPGQTPRPKL

SEQ ID NO: 11963 - DNA, 1766 bp, Triticum aestivum
  misc_feature (1)..(1766): Ceres Seq. ID no. 13659615
aaaaaatagaaactccccgacgacttgctcctcctccccctcacttccctcccccatcttggaccgttgcacaccgatctcgcgccggcccccaaatcgccggcgaagcccgcctccgcctccgtcccccgccgcgccgatctgctcgcaagattcgtaggccggaggaggaggacgaggaagggaggaagttgagttcttgttggtttcttccgcgggagccgaccgcacatgccaacaaccccccggagcagaagccaagctaggaccaccaggtcttggatcttgtcaggcatggacttcggtgacacgagacgcaagcctaatttcgccggaaagatcgcggtggctgctgccctcactgttatgtgcatacttgtgttgaagcagtctcctggttttggcggcactagcgtgttctctcgccatgaaactggggtgactcatgtgctggtgactggaggtgctggatacattggctcacatgctactcttcgtctccttacggacaactaccgagttaccattgtggataacctttcgagagggaacatgggagctgtcagagctctccagaggttgtttccagagcctgggaggcttcagtttatatacactgatttaggcgatccgaaagctgtgaacaaaatgttttcggagaacgcgtttgatgctgttatgcacttcgctgctgttgcttatgttggtgagagcacgcaggagccactaaggtactaccacaacataacatcaaatacgttgacagtgcttgaggcaatggcagcacataatgtaaaaactctgatttactcgagtacttgtgcaacatatggtgaacctgacacaatgcctattgtagaaacaactcctcagatacctatcaatccatacgggaaggcaaaaaagatgtccgaggacatcattctagatttctcaaagaaatcgaacatggctgtgatgatcttaagatacttcaatgtgattggatcggaccctgaggggcgccttggggaagctccaaggcctgaactgcgtgagcatggaaggatttctggtgcgtgttttgatgcagcatcaggaatcattccagggctaaaggttcgaggaacggactaccctaccgctgatggaacttgcgtaagggactacatcgatgtcacagatcttgttgatgcccatgtcaaagctcttggtaaagctgagcctagcaaagttggaatctacaatgtcggcacagggaaaggtaggtcagtgaaggagtttgtagaagcgtgcaagaaggcgactggagcaaccatcaaggttgactacctcgatcggagagctggggattacgccgaagtatacagcaacccggccaagatccgcgatgagctgaactggacagcccaacacacggacctccgtgagagccttgcgacggcctggaaatggcagaaggcgcacccgggcggatacgggtcggcctgatcccgtgctcggtaggttcaacgcaagttcgccaacacagacccacaggtccatgtgcagtgatatggccttgagaacactggtccttcaccgtagacacgtagcaggcagccacagaagtgtagtgatgttatttcgcagcacctggaagaagatacagagagaatggcctgcctggcttagaagaaatcatatatagttttcttttttcttttcttttcgtcagtgacatttaatttattttgctgttcgttggctgaggcataatatatgacacaaatacggagttgtgctgt

SEQ ID NO: 11964 - protein, 412 aa, Triticum aestivum
  misc_feature (1)..(412): Ceres Seq. ID no. 13659616
MPTTPRSRSQARTTRSWILSGMDFGDTRRKPNFAGKIAVAAALTVMCILVLKQSPGFGGTSVFSRHETGVTHVLVTGGAGYIGSHATLRLLTDNYRVTIVDNLSRGNMGAVRALQRLFPEPGRLQFIYTDLGDPKAVNKMFSENAFDAVMHFAAVAYVGESTQEPLRYYHNITSNTLTVLEAMAAHNVKTLIYSSTCATYGEPDTMPIVETTPQIPINPYGKAKKMSEDIILDFSKKSNMAVMILRYFNVIGSDPEGRLGEAPRPELREHGRISGACFDAASGIIPGLKVRGTDYPTADGTCVRDYIDVTDLVDAHVKALGKAEPSKVGIYNVGTGKGRSVKEFVEACKKATGATIKVDYLDRRAGDYAEVYSNPAKIRDELNWTAQHTDLRESLATAWKWQKAHPGGYGSA

SEQ ID NO: 11965 - protein, 391 aa, Triticum aestivum
  misc_feature (1)..(391): Ceres Seq. ID no. 13659617
MDFGDTRRKPNFAGKIAVAAALTVMCILVLKQSPGFGGTSVFSRHETGVTHVLVTGGAGYIGSHATLRLLTDNYRVTIVDNLSRGNMGAVRALQRLFPEPGRLQFIYTDLGDPKAVNKMFSENAFDAVMHFAAVAYVGESTQEPLRYYHNITSNTLTVLEAMAAHNVKTLIYSSTCATYGEPDTMPIVETTPQIPINPYGKAKKMSEDIILDFSKKSNMAVMILRYFNVIGSDPEGRLGEAPRPELREHGRISGACFDAASGIIPGLKVRGTDYPTADGTCVRDYIDVTDLVDAHVKALGKAEPSKVGIYNVGTGKGRSVKEFVEACKKATGATIKVDYLDRRAGDYAEVYSNPAKIRDELNWTAQHTDLRESLATAWKWQKAHPGGYGSA

SEQ ID NO: 11966 - protein, 367 aa, Triticum aestivum
  misc_feature (1)..(367): Ceres Seq. ID no. 13659618
MCILVLKQSPGFGGTSVFSRHETGVTHVLVTGGAGYIGSHATLRLLTDNYRVTIVDNLSRGNMGAVRALQRLFPEPGRLQFIYTDLGDPKAVNKMFSENAFDAVMHFAAVAYVGESTQEPLRYYHNITSNTLTVLEAMAAHNVKTLIYSSTCATYGEPDTMPIVETTPQIPINPYGKAKKMSEDIILDFSKKSNMAVMILRYFNVIGSDPEGRLGEAPRPELREHGRISGACFDAASGIIPGLKVRGTDYPTADGTCVRDYIDVTDLVDAHVKALGKAEPSKVGIYNVGTGKGRSVKEFVEACKKATGATIKVDYLDRRAGDYAEVYSNPAKIRDELNWTAQHTDLRESLATAWKWQKAHPGGYGSA

SEQ ID NO: 11967 - DNA, 1264 bp, Triticum aestivum
  misc_feature (1)..(1264): Ceres Seq. ID no. 13659643
actwkawyrtsyttaatcgaaaagaaacccttttagctcctggcctcttcccggcccatggccatcgattcgctgatacgacgctcgcggacagcagccaccgctcgaatctccgcgccggctccggccacggaagtgttctcccccaccatcaccatggctcaggctccaggccgcgccgcctcctccatgcggctcttcgacgcgcactgccacctgcaggacccccgcatcgcggcggccgcccccgccctcatacgcgccgccacagcctccggcgtcggccggttcgcggtcaacggcacctccgagaaagactggcacctggtgaagcagatggcccaggagcacccggctgtcatcccctgcttcggcctccacccatggtgggtgccggagaggtcgcctgattggatggattcgctccggcagttcttctcggagaccccagaggcggctgttggagagactggtctcgacaagggatcgcatggaaaaactattgacttcagagaacaggttgaagtattccaacgacaacttgaacttgctaaggaattggagaaacctgtttctgttcattgtgtacgtgccttcggcgatcttctggaaatactaaagcgtactgggcctttcccagcaggtgtgctgttgcattcttatctggggtctgcagaaatggtgcccggccttgcaaatttaggttgttacttttcgttgtctggtttccttacaggcatgaaatctactaaggcaaagaaaatgctcaaagcaatacccttggacaggattctgttagagacagatgcaccagatgcagtaccaaagttggacaatgtttctctagttacagtccctgtggacatttcaaatgcagatattgaaaaattccacggcgattctacctcttcaaaagaatccttgaatcatccagctaacatccacattgttttgaagtatgtggcatcactgcttgaaatgccggaagcagaactcgccgaggcgagctacaggaacgccaccaaactgttctcctaccctggatccaaagttcatcccgaagctgaaactgtgtgaatggggtggtgcggatggccatccaatacgaaccatgctcatcggaatcctggtgcgttctgcctctggatgtttgcctgtataccgcatgtatattgttgtactagtatatataatcggcctaagacaaagtaacaatcagagaagaaataataaagcggttcatggctggccgtgccatgttgcc

SEQ ID NO: 11968 - protein, 339 aa, Triticum aestivum
  misc_feature (1)..(339): Ceres Seq. ID no. 15219975
MAIDSLIRRSRTAATARISAPAPATEVFSPTITMAQAPGRAASSMRLFDAHCHLQDPRIAAAAPALIRAATASGVGRFAVNGTSEKDWHLVKQMAQEHPAVIPCFGLHPWWVPERSPDWMDSLRQFFSETPEAAVGETGLDKGSHGKTIDFREQVEVFQRQLELAKELEKPVSVHCVRAFGDLLEILKRTGPFPAGVLLHSYLGSAEMVPGLANLGCYFSLSGFLTGMKSTKAKKMLKAIPLDRILLETDAPDAVPKLDNVSLVTVPVDISNADIEKFHGDSTSSKESLNHPANIHIVLKYVASLLEMPEAELAEASYRNATKLFSYPGSKVHPEAETV

SEQ ID NO: 11969 - protein, 306 aa, Triticum aestivum
  misc_feature (1)..(306): Ceres Seq. ID no. 15219976
MAQAPGRAASSMRLFDAHCHLQDPRIAAAAPALIRAATASGVGRFAVNGTSEKDWHLVKQMAQEHPAVIPCFGLHPWWVPERSPDWMDSLRQFFSETPEAAVGETGLDKGSHGKTIDFREQVEVFQRQLELAKELEKPVSVHCVRAFGDLLEILKRTGPFPAGVLLHSYLGSAEMVPGLANLGCYFSLSGFLTGMKSTKAKKMLKAIPLDRILLETDAPDAVPKLDNVSLVTVPVDISNADIEKFHGDSTSSKESLNHPANIHIVLKYVASLLEMPEAELAEASYRNATKLFSYPGSKVHPEAETV

SEQ ID NO: 11970 - protein, 295 aa, Triticum aestivum
  misc_feature (1)..(295): Ceres Seq. ID no. 15219977
MRLFDAHCHLQDPRIAAAAPALIRAATASGVGRFAVNGTSEKDWHLVKQMAQEHPAVIPCFGLHPWWVPERSPDWMDSLRQFFSETPEAAVGETGLDKGSHGKTIDFREQVEVFQRQLELAKELEKPVSVHCVRAFGDLLEILKRTGPFPAGVLLHSYLGSAEMVPGLANLGCYFSLSGFLTGMKSTKAKKMLKAIPLDRILLETDAPDAVPKLDNVSLVTVPVDISNADIEKFHGDSTSSKESLNHPANIHIVLKYVASLLEMPEAELAEASYRNATKLFSYPGSKVHPEAETV

SEQ ID NO: 11971 - DNA, 1108 bp, Triticum aestivum
  misc_feature (1)..(1108): Ceres Seq. ID no. 13659645
ctctctctccaatccgtctccctaactgcagatgatcgccggcaccccgttcccgtacctgagctgcttcgtggccaggttccggcacgacgagcgcaaggccatcgtcctgcgcgccgtcaagtgcatcttcgcctccatcaaagcgatgagctcggtggagtaccagccgtcgaccatggcgctggcgtccatcctggtcgcgcgcggcggcagggaggggacggggacggccccgaacctagaggaggagctcaaggcgatcctgggctcatcatggcagcaattacacaccgggcatgtgtattcctgctacagcgtgatgattcaggaggaggacaggtccacgcagtcgggcagggaggtggcttcctccggcgtctctgccgccgcccccgccgggagcccgggcacctccgtcgccatggccatggtccgtggaggggtggttgaacaggaccccgtggagagggctggttgaacagtagccggtggaggagcggtggaggctagatgaacatgagtccgtggatgagaagggtccattcgcctcagggccagtaggcagccagtaggaggagctgtgtgaatgttggctggagttcagctcgcactctagctgctgctaatttctgtcaccccccctagccttagcccttttttttttcattagcttgagcagtgattttggtggtggtggtggctaaatagggggcaggacttgattcttgtgattgtgcaattattgcagctgattggtaagttaggatcggaaagattttggttttcaggagatctttcccatccaggctttaaaaggctgtgtaaagaggagaggtagagagagaaagtcccagcaggagtactgcactactgctgcaaagagctctcagctcagctcaaagtgaggtgaaaagaaaagagagcacaacaaagcctaggcatgatatgagtggggagccatttttttctccttcctttgtgtacgtgtgtgtgtttggatagtgtgcgagctagctggacctctatcctctcgtcctcttctggtcactccatcagtgacaagtaatacagtacgtaatagttaagcagatattcattcattcat

SEQ ID NO: 11972 - protein, 150 aa, Triticum aestivum
  misc_feature (1)..(150): Ceres Seq. ID no. 13659646
LSLQSVSLTADDRRHPVPVPELLRGQVPARRAQGHRPARRQVHLRLHQSDELGGVPAVDHGAGVHPGRARRQGGDGDGPEPRGGAQGDPGLIMAAITHRACVFLLQRDDSGGGQVHAVGQGGGFLRRLCRRPRREPGHLRRHGHGPWRGG

SEQ ID NO: 11973 - protein, 149 aa, Triticum aestivum
  misc_feature (1)..(149): Ceres Seq. ID no. 13659647
MIAGTPFPYLSCFVARFRHDERKAIVLRAVKCIFASIKAMSSVEYQPSTMALASILVARGGREGTGTAPNLEEELKAILGSSWQQLHTGHVYSCYSVMIQEEDRSTQSGREVASSGVSAAAPAGSPGTSVAMAMVRGGVVEQDPVERAG

SEQ ID NO: 11974 - protein, 110 aa, Triticum aestivum
  misc_feature (1)..(110): Ceres Seq. ID no. 13659648
MSSVEYQPSTMALASILVARGGREGTGTAPNLEEELKAILGSSWQQLHTGHVYSCYSVMIQEEDRSTQSGREVASSGVSAAAPAGSPGTSVAMAMVRGGVVEQDPVERAG

SEQ ID NO: 11975 - DNA, 1369 bp, Triticum aestivum
  misc_feature (1)..(1369): Ceres Seq. ID no. 13659840
agcttaggccccactcaagtcaacttacccttcttcctcctcgatccacatatgtacgcctgcagctagctagcaagtactcagatctctgggagtacttgctaggtccgcttcaagtagtagcaaggagccaaggagaccgagatctcgtttctctcttcccagcaaggatcccgcaagctattgttcctctcaagatcatcagagatggccaccgcaagtagtaacctgcaactaccggcagaactaccctacgattttgtgaagaaaattacaaatgacttctctaaggagcgagaaattagtgacaatccatttggaaaactttacaagggaattaatccagatgatggcacagtgattgctgtgaagaaacttcaggaaaacgcaccaatgccagctggcaagatatttataaatgaggttcagaatattatggtgctcaaacacgcaaacattgtaaaaatggttggatactgcagtgaaacaacaaagaaattggtgcagttcgatcatcgatatattcaggcagatgttactgaaagtgtactctgctatgaatatttacctaaaggggaccttgcaaagaatctatttggtaaactcattatcgattgggatacacgtttcaaaataatcaaggggatctgcaaggggttactttatctacacaaattagatattcccataatccatatggatctgaagcccgagaatatattgttggatgaagatatggtgcctaagattgcggactttgcactctctagagtctttggcgaagcacaaacccgattgtgcacacagactgtcgtgggatcatatggatatatggctccagaatatctatacaggggtgaaatctcagcgcaatcagacatatatagtttaggcctactcataattgagatcaccacaggagagaagaattgtcctgaaaccaaccaaccgtccgcaagaaattttattgataatgtacaaaaaaattggacagaggattacataacattcaagtactcaagtttaaccccagattgcctcaatcaagttaagcgatgcatcaaaattgggctggaatgtgttactatcgatcggaaaggcagacccactatagaaaaaattattgacaccctcaacggaataaactgaattgcgaacaaggtcttcgatcaggtctacagtgagcatgaaagatgggtctgttgggatccggtgaagaaaccatgcatgtccccattattgctaagtgtactttattttattttggaaataagtccctttgattgatgtcgtgtcattgtggaaataccaaatgtaatttctcgagaattgctgtagattttttgtgttgatcaagcatcaagatgtg

SEQ ID NO: 11976 - protein, 313 aa, Triticum aestivum
  misc_feature (1)..(313): Ceres Seq. ID no. 15220678
MATASSNLQLPAELPYDFVKKITNDFSKEREISDNPFGKLYKGINPDDGTVIAVKKLQENAPMPAGKIFINEVQNIMVLKHANIVKMVGYCSETTKKLVQFDHRYIQADVTESVLCYEYLPKGDLAKNLFGKLIIDWDTRFKIIKGICKGLLYLHKLDIPIIHMDLKPENILLDEDMVPKIADFALSRVFGEAQTRLCTQTVVGSYGYMAPEYLYRGEISAQSDIYSLGLLIIEITTGEKNCPETNQPSARNFIDNVQKNWTEDYITFKYSSLTPDCLNQVKRCIKIGLECVTIDRKGRPTIEKIIDTLNGIN

SEQ ID NO: 11977 - protein, 251 aa, Triticum aestivum
  misc_feature (1)..(251): Ceres Seq. ID no. 15220679
MPAGKIFINEVQNIMVLKHANIVKMVGYCSETTKKLVQFDHRYIQADVTESVLCYEYLPKGDLAKNLFGKLIIDWDTRFKIIKGICKGLLYLHKLDIPIIHMDLKPENILLDEDMVPKIADFALSRVFGEAQTRLCTQTVVGSYGYMAPEYLYRGEISAQSDIYSLGLLIIEITTGEKNCPETNQPSARNFIDNVQKNWTEDYITFKYSSLTPDCLNQVKRCIKIGLECVTIDRKGRPTIEKIIDTLNGIN

SEQ ID NO: 11978 - protein, 237 aa, Triticum aestivum
  misc_feature (1)..(237): Ceres Seq. ID no. 15220680
MVLKHANIVKMVGYCSETTKKLVQFDHRYIQADVTESVLCYEYLPKGDLAKNLFGKLIIDWDTRFKIIKGICKGLLYLHKLDIPIIHMDLKPENILLDEDMVPKIADFALSRVFGEAQTRLCTQTVVGSYGYMAPEYLYRGEISAQSDIYSLGLLIIEITTGEKNCPETNQPSARNFIDNVQKNWTEDYITFKYSSLTPDCLNQVKRCIKIGLECVTIDRKGRPTIEKIIDTLNGIN

SEQ ID NO: 11979 - DNA, 1495 bp, Triticum aestivum
  misc_feature (1)..(1495): Ceres Seq. ID no. 13659881
ataaatgtaaatatttctattgatggaccatcctgatttattgggctggctacgccactggcaggggggacgacctctcgctcggcttcaatgccggcgccgccgcggccgcggccgcggccgcctccggcgccgcgctgggggccgggctctggggcccggcgtccgcgtcctcctcgtcccccgcctcgcgccaggcggccctgaactacggcatggcggccggcgacgtggggatggtggtggtcgcccctgcggcctcgttccaccacacgcaccaccatcaccaccaccacgacgcggccgccgcggccgctgcctccgacgccatcttcccgctgctctccgcgggctcctgcgtgctcgaccccgaggcggccaaggccgcggccgccagcggcggcatccagttctggcagtccgcgcagcaccatcagcagcagcactcgccgtcrgccgcgggcggcggcggcggcaaccctaaccctagcctcggccccttctacctcaagaagcccttcccgatgctcgacaccggcggcgacgggtcctccggctccggcaccaccacctgccaggactgcggcaaccaggccaagaaggactgcacccacagccgctgccgcacctgctgcaagagccgcggcttcgactgctccacgcacgtcaagagcacctgggtccccgccgcccgccgccgcgagcgccagcacctcggcggctccgcctcgtcccccgccaccgcctccaccgccgcgggatcgaagaagcctcgcctcctctcctcccagcaggccaccacgtcgtacacctccacctccaacgccaccacgccgcgcagctacgacaccacctccagccatcaagacgcatcgttcagggggaacctgccgcggcaggtgcgcgcgccggcggtgttcaggtgcgtgcgcgtgacgtccgtcgacgacggcgaggacgagtacgcgtaccaggccacggtgaccatcaacggccacgtcttcaagggcttcctctacgaccagggcgtggacgacggccgcgccagcaatgacatcgactcgagcaccggcggcgccgtgcccaacatgtccgagctccacctcgggggcggcggcaatgccgcgaggggaggcgggggttcctcctcgatggcgccctccgacatgtacggcggcggtggcgccggaggagcaggcggagggggaggaggccagcacatactcggcggcgggtccagctatggtaacaccatgaactgagccgagctgctagaagagtaaggtcacatagtagatcattactacagtaccattctttcctttcttctcttcattgctagtaagtacaaacctgtcaaccctctcatggccggggtgcaatgcaatgcatggtgttcgccattaatttgttcatgctgtatgacatcaagtgttaatcgttggaacgggaggggrgttaaaaaaaaaaaaaaaaaagcttatcgataccgtcg

SEQ ID NO: 11980 - protein, 348 aa, Triticum aestivum
  misc_feature (1)..(348): Ceres Seq. ID no. 15220681
  misc_feature (80)..(80): Xaa is any aa, unknown or other
MAAGDVGMVVVAPAASFHHTHHHHHHHDAAAAAAASDAIFPLLSAGSCVLDPEAAKAAAASGGIQFWQSAQHHQQQHSPXAAGGGGGNPNPSLGPFYLKKPFPMLDTGGDGSSGSGTTTCQDCGNQAKKDCTHSRCRTCCKSRGFDCSTHVKSTWVPAARRRERQHLGGSASSPATASTAAGSKKPRLLSSQQATTSYTSTSNATTPRSYDTTSSHQDASFRGNLPRQVRAPAVFRCVRVTSVDDGEDEYAYQATVTINGHVFKGFLYDQGVDDGRASNDIDSSTGGAVPNMSELHLGGGGNAARGGGGSSSMAPSDMYGGGGAGGAGGGGGGQHILGGGSSYGNTMN

SEQ ID NO: 11981 - protein, 341 aa, Triticum aestivum
  misc_feature (1)..(341): Ceres Seq. ID no. 15220682
  misc_feature (73)..(73): Xaa is any aa, unknown or other
MVVVAPAASFHHTHHHHHHHDAAAAAAASDAIFPLLSAGSCVLDPEAAKAAAASGGIQFWQSAQHHQQQHSPXAAGGGGGNPNPSLGPFYLKKPFPMLDTGGDGSSGSGTTTCQDCGNQAKKDCTHSRCRTCCKSRGFDCSTHVKSTWVPAARRRERQHLGGSASSPATASTAAGSKKPRLLSSQQATTSYTSTSNATTPRSYDTTSSHQDASFRGNLPRQVRAPAVFRCVRVTSVDDGEDEYAYQATVTINGHVFKGFLYDQGVDDGRASNDIDSSTGGAVPNMSELHLGGGGNAARGGGGSSSMAPSDMYGGGGAGGAGGGGGGQHILGGGSSYGNTMN

SEQ ID NO: 11982 - protein, 245 aa, Triticum aestivum
  misc_feature (1)..(245): Ceres Seq. ID no. 15220683
MLDTGGDGSSGSGTTTCQDCGNQAKKDCTHSRCRTCCKSRGFDCSTHVKSTWVPAARRRERQHLGGSASSPATASTAAGSKKPRLLSSQQATTSYTSTSNATTPRSYDTTSSHQDASFRGNLPRQVRAPAVFRCVRVTSVDDGEDEYAYQATVTINGHVFKGFLYDQGVDDGRASNDIDSSTGGAVPNMSELHLGGGGNAARGGGGSSSMAPSDMYGGGGAGGAGGGGGGQHILGGGSSYGNTMN

SEQ ID NO: 11983 - DNA, 1556 bp, Triticum aestivum
  misc_feature (1)..(1556): Ceres Seq. ID no. 13660024
attacctagaacatcctaatcgaaaagcaaagcagaggaaactaagcttggcagccaacggctattaatacctcaccaccttgttcgcaccatccaaagaaacagagttccagcagagaaaagtgagatctgccttcttcccccatcatggctgccatgtggtatccgatcatcggtctcctccttctcatgctcccactcgggccctcctccgccatcaagttcccactcataggcaacgtctaccctgatggccacttctatgctacgttgcagattggtaagcccttgaagccctacttcctggacatcgacactggcagcaacctcacttggctggagtgtgagcacccagatcacggctgcaagggctgcaaccagaggacaccacacccatattacaagccagcagctcataacttgatggtgagatgtgacagctggatatgtgctcaactgcgcaaagaccagcctggtagtcctcaatgccccaacagcgatccacatcgatgccactatgatatccaatatgtctccgggaggtcaaaaggcgaccttgccaacgacatgatctttatcaataggagagatgatatgaactacgttttcggatgtggatacgagcaggaggagccattagagcagccatcgccaccggcggtagatggcatccttggactcgggaggggaagcgtaggatttgtcgctcaactcaaggcacaaaagaagatagtcaggaatgtcattggacattgcctcagcatccatggaaatgggaacctgtacattggggacttcaggctgcccccaggcgacgtcacctgggcacccatgagtacatctttgccttactactcacccggcccagcaacactgctctatgacgaacagccgataagaggtagtccagcattcacgacagtatttgacagtggagccacctacacctacatgcctggccagatatacaatggccttgtttcaaaggttcaagacaccctccacaaatcatcacttaaagaggtgaaggatcgtgctctgcctcaatgctggaaaggaaaaatgccattcagatctgtcgacgatgtgaagaatgaattcaagtcactgtcgctaaaaattacccatgcccgcggcaccagcaacctggacatccctcctgaaaactacctcatcgtgacgaaagacgggaatgcgtgcttggccatcctcgatggctcgtcggatcgtgttctgaggcatctcatcttaattggagatgctatgatgcaggatctgtttgtgatatatgacaacgaggtcaaccgtatcggatgggtccgtgcacagtgcgacaggatgcaggaccttgagtctggcatcattgattcacgtctctgaataaagttcgaatcgacatagacaaaaaccttagcaacaacaaaagagtgctctcgtacggtattcaaaagattgtatggcgctcccgtttataatgaaacatgttgacatgttgaggaataaataaagtgtaaagagagaatcaagtggkaarggwtaaggggggatccagtggg

SEQ ID NO: 11984 - protein, 410 aa, Triticum aestivum
  misc_feature (1)..(410): Ceres Seq. ID no. 15219998
MAAMWYPIIGLLLLMLPLGPSSAIKFPLIGNVYPDGHFYATLQIGKPLKPYFLDIDTGSNLTWLECEHPDHGCKGCNQRTPHPYYKPAAHNLMVRCDSWICAQLRKDQPGSPQCPNSDPHRCHYDIQYVSGRSKGDLANDMIFINRRDDMNYVFGCGYEQEEPLEQPSPPAVDGILGLGRGSVGFVAQLKAQKKIVRNVIGHCLSIHGNGNLYIGDFRLPPGDVTWAPMSTSLPYYSPGPATLLYDEQPIRGSPAFTTVFDSGATYTYMPGQIYNGLVSKVQDTLHKSSLKEVKDRALPQCWKGKMPFRSVDDVKNEFKSLSLKITHARGTSNLDIPPENYLIVTKDGNACLAILDGSSDRVLRHLILIGDAMMQDLFVIYDNEVNRIGWVRAQCDRMQDLESGIIDSRL

SEQ ID NO: 11985 - protein, 407 aa, Triticum aestivum
  misc_feature (1)..(407): Ceres Seq. ID no. 15219999
MWYPIIGLLLLMLPLGPSSAIKFPLIGNVYPDGHFYATLQIGKPLKPYFLDIDTGSNLTWLECEHPDHGCKGCNQRTPHPYYKPAAHNLMVRCDSWICAQLRKDQPGSPQCPNSDPHRCHYDIQYVSGRSKGDLANDMIFINRRDDMNYVFGCGYEQEEPLEQPSPPAVDGILGLGRGSVGFVAQLKAQKKIVRNVIGHCLSIHGNGNLYIGDFRLPPGDVTWAPMSTSLPYYSPGPATLLYDEQPIRGSPAFTTVFDSGATYTYMPGQIYNGLVSKVQDTLHKSSLKEVKDRALPQCWKGKMPFRSVDDVKNEFKSLSLKITHARGTSNLDIPPENYLIVTKDGNACLAILDGSSDRVLRHLILIGDAMMQDLFVIYDNEVNRIGWVRAQCDRMQDLESGIIDSRL

SEQ ID NO: 11986 - protein, 396 aa, Triticum aestivum
  misc_feature (1)..(396): Ceres Seq. ID no. 15220000
MLPLGPSSAIKFPLIGNVYPDGHFYATLQIGKPLKPYFLDIDTGSNLTWLECEHPDHGCKGCNQRTPHPYYKPAAHNLMVRCDSWICAQLRKDQPGSPQCPNSDPHRCHYDIQYVSGRSKGDLANDMIFINRRDDMNYVFGCGYEQEEPLEQPSPPAVDGILGLGRGSVGFVAQLKAQKKIVRNVIGHCLSIHGNGNLYIGDFRLPPGDVTWAPMSTSLPYYSPGPATLLYDEQPIRGSPAFTTVFDSGATYTYMPGQIYNGLVSKVQDTLHKSSLKEVKDRALPQCWKGKMPFRSVDDVKNEFKSLSLKITHARGTSNLDIPPENYLIVTKDGNACLAILDGSSDRVLRHLILIGDAMMQDLFVIYDNEVNRIGWVRAQCDRMQDLESGIIDSRL

SEQ ID NO: 11987 - DNA, 885 bp, Triticum aestivum
  misc_feature (1)..(885): Ceres Seq. ID no. 13660037
agaacatcytaatcgaaaasgggagccgamccaaataggcaacctaaagtagaaaacagtccacgccgccgcggcaccgagcgaccccgcgggcgtccttggaagaagacgaagcggcggcgacgacgacctaggcagaccgctcgctcgtgttggagcctggatggcgtccggaggcatcgcccgcggccgcctcgccgaggagcgcaagtcgtggcgcaagaaccacccccatggcttcgtggccaagccggagaccctgccggatgggtccgtcaatctcatggtctggcggtgcgtcatccccggcaagccagggactgactgggaaggtggatatttcccgctaactctgcaatttgatgataattacccaacaaccgctcctagctgcaggttcccagcaggtttcttccatatcaatgtctatgattctggagtagtatgcctatcgatactgggtgatgcatggaaaccttcaattacagtgaagcaggttttggtaggcatccaggagttgctggatgacccaaatcctaactcagccgcacagcatcgatgctatgaactctataagaagaacatgccagagtacaggaacaaagtccgtgagcagaccaagcgctacccttcgcgcatgtagctactctagtagtgcataatattagtgtgcatttcgttggggactgaagtctagagttgcgccgcgatgggggtgtagttagcgcaatggtagtgtatttgttggaactgctgaactgcacttttgagtacatcttcgctacgaattgttccgggcctcggtagcttatctcaatgtagtttgggtgagctttgctgacccttttttttactttgtgatgaaaagagatatccttttcttcc

SEQ ID NO: 11988 - protein, 159 aa, Triticum aestivum
  misc_feature (1)..(159): Ceres Seq. ID no. 15220007
MASGGIARGRLAEERKSWRKNHPHGFVAKPETLPDGSVNLMVWRCVIPGKPGTDWEGGYFPLTLQFDDNYPTTAPSCRFPAGFFHINVYDSGVVCLSILGDAWKPSITVKQVLVGIQELLDDPNPNSAAQHRCYELYKKNMPEYRNKVREQTKRYPSRM

SEQ ID NO: 11989 - protein, 119 aa, Triticum aestivum
  misc_feature (1)..(119): Ceres Seq. ID no. 15220008
MVWRCVIPGKPGTDWEGGYFPLTLQFDDNYPTTAPSCRFPAGFFHINVYDSGVVCLSILGDAWKPSITVKQVLVGIQELLDDPNPNSAAQHRCYELYKKNMPEYRNKVREQTKRYPSRM

SEQ ID NO: 11990 - DNA, 1830 bp, Triticum aestivum
  misc_feature (1)..(1830): Ceres Seq. ID no. 13660129
actaaagggaacaaaagctgcagctccgccgcggyggcggccgctctataactastgkakcccccggkctgcakrtaattcgcrcgacgaccattacctagaacatcctaatckaaracgcctcacaatctctctccctctctctgtctccagcgcggggtgagctgagccatggctgagctgccgctcgcggggggcttgctggacctccgccccggcaagctctccccgaagcccccgcccccgccgctgcccatgcccggcgcggatgccccggcctcgccgcggccggagctgcgcgtcgacgagccgaatccacagattccacacacggcagctgacgccggtgagacgctggcctcgtcggaggcgccggtaccgaccgtcggctccggtgtcggtgtctgtgtcgaagcggagtccgagctggctggtggaagggcggttctcccggccgattgccagctcgatactgacggcaatggagttgagcttggtgccttggaggagagtgggactgtggtatcggacacgacggcgccggctggtttggaggaggtggatgcggatgcgggagcttcgccggaaggctctgccactcaggattctgacactggcgtggatgcagagtctagaggcgacgaccaaggggccacggaatccagagttaccatcccaccaacagcgggagaagttcacaacaaggtggattgggaaaagaacacttcagaagtgaagagttctgataagacggctccagtagcctcatcagcgcttttgttgacgtcaggtgctgcaatcttgcctcatccttcgaaggcagcgacaggcggagaagatgcttattttattgaagactatggttggtttggtgtggcagatggagttggtcagtggtcatttgaaggaatcaacgcagggctttatgcaagagagcttatggatggctgtaaaaaggtaattgcggaaagtgaaggaggctctgagcttgcgcctgagcaagttctctccaaggctgcagcagaagcaagctctcctggttcttcgactgtcttagttgctcactttgatggccagcttcttcatgtatcaaatattggagactcggggtttctggtgataaggaatggagaagtatgcgcaaaatcaaaaccaatggtttatggcttcaattttccacatcaaatcgagaaaggggttgatcccttaacccttgtagagaattataccattgacatagaggaaggcgatatcattatagcagcgaccgatggcctcttcgacaacgtctacgaacaagaaatggcagccatgatctcgaaatctttgcaggcagatctaaagccagcggagatggccgagcaccttgctgccagggcacatgaggtggggaggtctggagcagggagaagcccattttcagactctgccgtcgcggcgggttacctaggtttcagcggggggaaactggacgacacagccatcgttgtgtcgattgtccggagatccgaagcttgagctatagaaggcccccgaggtgacaagctattttggttgcaggcagctgcacgcactgtctatgaaagcgttgcatcagtagttcagaaactgcgacacgtgcaaagttcgcctgtgtaaagtagtctagttcaagaaccacaattcgcctatctaagtgatataaatttaagtttggtgttggtgctgtgtgtaaattttgggctgtagaaatatgatgcatgaaaatgtaattttgtgctcttgaatcgtgaggaagtggtaggaaggaaccaagccatctagtcaaagttgaaatataatcatgcattt

SEQ ID NO: 11991 - protein, 448 aa, Triticum aestivum
  misc_feature (1)..(448): Ceres Seq. ID no. 15220012
MAELPLAGGLLDLRPGKLSPKPPPPPLPMPGADAPASPRPELRVDEPNPQIPHTAADAGETLASSEAPVPTVGSGVGVCVEAESELAGGRAVLPADCQLDTDGNGVELGALEESGTVVSDTTAPAGLEEVDADAGASPEGSATQDSDTGVDAESRGDDQGATESRVTIPPTAGEVHNKVDWEKNTSEVKSSDKTAPVASSALLLTSGAAILPHPSKAATGGEDAYFIEDYGWFGVADGVGQWSFEGINAGLYARELMDGCKKVIAESEGGSELAPEQVLSKAAAEASSPGSSTVLVAHFDGQLLHVSNIGDSGFLVIRNGEVCAKSKPMVYGFNFPHQIEKGVDPLTLVENYTIDIEEGDIIIAATDGLFDNVYEQEMAAMISKSLQADLKPAEMAEHLAARAHEVGRSGAGRSPFSDSAVAAGYLGFSGGKLDDTAIVVSIVRRSEA

SEQ ID NO: 11992 - protein, 420 aa, Triticum aestivum
  misc_feature (1)..(420): Ceres Seq. ID no. 15220013
MPGADAPASPRPELRVDEPNPQIPHTAADAGETLASSEAPVPTVGSGVGVCVEAESELAGGRAVLPADCQLDTDGNGVELGALEESGTVVSDTTAPAGLEEVDADAGASPEGSATQDSDTGVDAESRGDDQGATESRVTIPPTAGEVHNKVDWEKNTSEVKSSDKTAPVASSALLLTSGAAILPHPSKAATGGEDAYFIEDYGWFGVADGVGQWSFEGINAGLYARELMDGCKKVIAESEGGSELAPEQVLSKAAAEASSPGSSTVLVAHFDGQLLHVSNIGDSGFLVIRNGEVCAKSKPMVYGFNFPHQIEKGVDPLTLVENYTIDIEEGDIIIAATDGLFDNVYEQEMAAMISKSLQADLKPAEMAEHLAARAHEVGRSGAGRSPFSDSAVAAGYLGFSGGKLDDTAIVVSIVRRSEA

SEQ ID NO: 11993 - DNA, 577 bp, Triticum aestivum
  misc_feature (1)..(577): Ceres Seq. ID no. 13660150
cattacctagacatcctaatcgaaaataagctaccgcgcgcgtctatcaacaagatcgagtgcaagcgacagcagatcgagtggtcagagcaaacggtgagcgcgcgctacgtgattggtgaaggaaatggcgaccatcaaagccaaggtccaggacgccgcctcctccgccaaggccggcatcgataaggcgaaggccaccgccggcgagaaggtaaagaaggccacgacgacggacccggagaagaagcgcgaggcggaggagaaaaaggaggaccgcatgcacaaggttaactccgacgagcgcgatgagaagggggaccacgccgccgagaggtccgggaggcgcaccatcgtcaccggcacctagttagcttctagctaggcccgactacagcatgtagtagtagcgtaacctcggttttaagcgaatcgaggaatcaaaataagcggcagtccgtcatagaatgtggttcgattcgatccttcatcttctaggcttataaatgtgatgcttcgaaaaatgcgacccgtctacatagtcctctacgatcatatatactcgaacaatctttcc

SEQ ID NO: 11994 - protein, 80 aa, Triticum aestivum
  misc_feature (1)..(80): Ceres Seq. ID no. 13660151
MATIKAKVQDAASSAKAGIDKAKATAGEKVKKATTTDPEKKREAEEKKEDRMHKVNSDERDEKGDHAAERSGRRTIVTGT

SEQ ID NO: 11995 - protein, 62 aa, Triticum aestivum
  misc_feature (1)..(62): Ceres Seq. ID no. 13660152
HYLDILIENKLPRASINKIECKRQQIEWSEQTVSARYVIGEGNGDHQSQGPGRRLLRQGRHR

SEQ ID NO: 11996 - DNA, 1128 bp, Triticum aestivum
  misc_feature (1)..(1128): Ceres Seq. ID no. 13660155
atccactactcacctagtcacctgcgttgtgtgtgtgcagctggtgctctgtcttccactcttccgttcatcgtctaggcgctgtccaacctgtcaagatggaatcctacgccaacggagccaaatttgattgcttgctgtttgacatggatgacaccctctacccactgatcttaggaatcaacttagcctgccgcaacaacatccaagactacatgctgaacaagcttcagatcgaggagagcctggtccccaagatgtgcctggatctgtacaaagaatatggaactacgatggccggtctgaagcttatgggttacgaattcgactacgacgaattccacgccagcgtgcacggtaaattgccatacgagaagctgaagccggaccctgtcctgaggaacctgctgctttcgatgccacagaggaaaatcatattcaccaattctgacgaggcccacgcggcgaccgtcctggagaagatggggctggagggatgcttcgaggggatcatatgcttcgagaccctgaaccccaagaatccaggtgacacagacgctagctctggcaagagggtcctctgcaagccgtccctggagtccatggaagccgtggtggagatcgccaagctcgaccccaagaagacagtgttcttcgacgacagcccgcgcaacatcgcctcagggaaagcggcaggcttccataccgtcatcgtagggagctcggcgctcgtgcccggggcggacgtggcgctagagagcatccacaacatcagggaggcgctgccggagctgtgggaggcgggcggcgaccacgtcgaggccgccgtcgacatccggtccgccgccgtggccgagaccacggtgctcgcgtgagccgccggcgctgcctgccagatgattaatatgcttcgtccgccttgactatattaacacaaaaaaggcggaggcgaacgactgaatccaggaaaaacccgtatatgctatggtttactcgaccatgatccatggtgatcagtgatcactgatgaatgcgtaggtattaaatgtacaggtgtactacttgtgtactgatgtgatcgaaacaccgtaataataagcaccgtaaatcttaaagattcgctcattg

SEQ ID NO: 11997 - protein, 258 aa, Triticum aestivum
  misc_feature (1)..(258): Ceres Seq. ID no. 15220014
MESYANGAKFDCLLFDMDDTLYPLILGINLACRNNIQDYMLNKLQIEESLVPKMCLDLYKEYGTTMAGLKLMGYEFDYDEFHASVHGKLPYEKLKPDPVLRNLLLSMPQRKIIFTNSDEAHAATVLEKMGLEGCFEGIICFETLNPKNPGDTDASSGKRVLCKPSLESMEAVVEIAKLDPKKTVFFDDSPRNIASGKAAGFHTVIVGSSALVPGADVALESIHNIREALPELWEAGGDHVEAAVDIRSAAVAETTVLA

SEQ ID NO: 11998 - protein, 242 aa, Triticum aestivum
  misc_feature (1)..(242): Ceres Seq. ID no. 15220015
MDDTLYPLILGINLACRNNIQDYMLNKLQIEESLVPKMCLDLYKEYGTTMAGLKLMGYEFDYDEFHASVHGKLPYEKLKPDPVLRNLLLSMPQRKIIFTNSDEAHAATVLEKMGLEGCFEGIICFETLNPKNPGDTDASSGKRVLCKPSLESMEAVVEIAKLDPKKTVFFDDSPRNIASGKAAGFHTVIVGSSALVPGADVALESIHNIREALPELWEAGGDHVEAAVDIRSAAVAETTVLA

SEQ ID NO: 11999 - protein, 219 aa, Triticum aestivum
  misc_feature (1)..(219): Ceres Seq. ID no. 15220016
MLNKLQIEESLVPKMCLDLYKEYGTTMAGLKLMGYEFDYDEFHASVHGKLPYEKLKPDPVLRNLLLSMPQRKIIFTNSDEAHAATVLEKMGLEGCFEGIICFETLNPKNPGDTDASSGKRVLCKPSLESMEAVVEIAKLDPKKTVFFDDSPRNIASGKAAGFHTVIVGSSALVPGADVALESIHNIREALPELWEAGGDHVEAAVDIRSAAVAETTVLA

SEQ ID NO: 12000 - DNA, 1472 bp, Triticum aestivum
  misc_feature (1)..(1472): Ceres Seq. ID no. 13660172
cattcctatgatagtatcttttttctgaaataattgccagggtagtattggtttgatgcaaagtacaatcccttgatttgttgaagaatgttttttatattccctaacattcatttgcttggcaagatagagtcttgtccgaatgaagaagttcttctatgaagacaaagatttgatttgagaaaattagtttcgtgaagagaagataaagagagttgtattgggtagtccatgagaagattaaatgaagcgaagttcatttgaagtacttttgagacttttcaaacattgaggaacttgaagcgaatgattttacgaagatgctctttatgaggatcaccgtacttagtcattatacaagaaatttgtacaagaaacttggatactagggcctggacatgtagctgtgttttgcaacacttgcttccatgttgatggaaaatgtgtgtaagttgttgactgtgcgtcgtcaagattcatagagggcacactgcatttgaactgtgatggtaacatgagaggcccacacactctatngaatacttcttgccctcttttttgtctgttatcccattaatttcatttatcctactttgtctaatgaagtcgttatacgcagggagccccgagggtttgcatttgtggagtttgttgacccttatgatgcctctgatgcacaatatcacttgaaccacacagtattttttggccgagagataactgttgttgttgctgccgagtcacggaaaaggccagatgatatgcgtaatagggctagaatcagggggtattctggtgaacctgaaaggcgtcattcccgttatgggaggtctcgttcccgttcatgttcctactctcctcgctatcggggccgtcctcggtcaaggtcaaggtcaaggtcatactctcctgctccaagacggcgagatgactactctgcttccccgccaagatcacatcacacacagtctcctaggcgtctgccaaaagaacatgaagaagacgagcggagatcctattctcctgctggtagaggtggcggcgagcgtgatgccaatactaatggaaagaggtcaccaccatctgacattgatggatcacctccacgcatccggaggtcacccaggcaatcctcaggatcacccgtggggtcgcgctcaaggtcccctgaagcttctcctgcccgcagcgactgatgaaattggtgcctcccatattgccgcgtctcccacagcggcgcggccatgtactctatctctagcttcattgtctgagtaaaacccatctgggatgtgttggctagtgttgcggtgcctctttagttagcagatatgactggttggctgttcttttgctgcttggtgttgttgaaccttgtaccatggtagtgttttaatgtgaactgagccacaactgagccacaattgtgtttggatttgtgattttaaatgcattttgaatgcctttaactt

SEQ ID NO: 12001 - protein, 173 aa, Triticum aestivum
  misc_feature (1)..(173): Ceres Seq. ID no. 13660173
MICVIGLESGGILVNLKGVIPVMGGLVPVHVPTLLAIGAVLGQGQGQGHTLLLQDGEMTTLLPRQDHITHSLLGVCQKNMKKTSGDPILLLVEVAASVMPILMERGHHHLTLMDHLHASGGHPGNPQDHPWGRAQGPLKLLLPAATDEIGASHIAASPTAARPCTLSLASLSE

SEQ ID NO: 12002 - protein, 151 aa, Triticum aestivum
  misc_feature (1)..(151): Ceres Seq. ID no. 13660174
MGGLVPVHVPTLLAIGAVLGQGQGQGHTLLLQDGEMTTLLPRQDHITHSLLGVCQKNMKKTSGDPILLLVEVAASVMPILMERGHHHLTLMDHLHASGGHPGNPQDHPWGRAQGPLKLLLPAATDEIGASHIAASPTAARPCTLSLASLSE

SEQ ID NO: 12003 - protein, 144 aa, Triticum aestivum
  misc_feature (1)..(144): Ceres Seq. ID no. 13660175
MRNRARIRGYSGEPERRHSRYGRSRSRSCSYSPRYRGRPRSRSRSRSYSPAPRRRDDYSASPPRSHHTQSPRRLPKEHEEDERRSYSPAGRGGGERDANTNGKRSPPSDIDGSPPRIRRSPRQSSGSPVGSRSRSPEASPARSD

SEQ ID NO: 12004 - DNA, 1456 bp, Triticum aestivum
  misc_feature (1)..(1456): Ceres Seq. ID no. 13660207
aaaacttgtttggggggaggttccccttaggggcccccccccctattaacggttttttccccctttgccttgggggccccctttttttattaggggcttttttttccaaatgggaaaacccttaaaccttttttgggttttttttttgaattataaagggtttttccgattttggcctttttgtttaaaaaaaaaagtggtttttcaaaaaatttaccgggaattttacaaaatttttaccctttcaaatttccttttccctttagggttggcaaatttttggaaaggggattggtgggggccttttttcttttttccccactggggaaaaggggaattttttcaaaggggtttaatttgggtacccccgggttttttccattccggggtttttaaaaggcgggccgtgggggggggttatttggcttccttttggggggatttgggttcggggccccccttgggggtggggggtttgaaaaaacttttttttttttttttttttttttttttttttttttttttttttttttttttttttttttttttttttttttttttttttttttttttttttgctcacagccataccacatttttagtgtattttctggattcagaagaatctgatgacaatatgattcagaaacaagggttggaagatttccaaactgaaaaagttaaactaaatgtcacctgctcacagcaacaccacaatttcagtgcattacatcttttttttgccaatttgagattacttttaccacgcttgccgcattgcagtgtattacatcatttaaccaaggactcggcaacagtgtcacaacacacaaaacaaatcacacccatagcagcattatagtgcaaacttgacaaatgtggattttgtagagtaaacaaactgaacttttagacacaggctattctaaaatccatctcgaaagtctggttggggcatgtgttcctcctatgacctcgtaagctgcatctggagcatcgaggcgacttcctcggcgcctttggaagatcttcttgttgcggacattggtactcttccgaccttgacctttgtagatagaacagaacctagacctcttagctggttgctcatatggtgctttgtcgccaattgtgctagggcgtccagctggtcttagttgcataattttctggttgctcgcggttaagcttcccacatagattcttcagagaccttttggtgaacgtcacctctttcactgatccaaaaaaactgcccacaacactgtaaaccttgcttatgcttacattgctttccctcagctgtttcagaggtcctctgtgtgtctatctatctgccgatgagacttccagtgtaatttctccatacagttgacagaaagtttatggttgtgctctgccctgtgttcgcaaacgtaccatcctttgtcatctgacctgaggatcctcatcattt

SEQ ID NO: 12005 - protein, 250 aa, Triticum aestivum
  misc_feature (1)..(250): Ceres Seq. ID no. 13660208
MGKPLNLFWVFFLNYKGFFRFWPFCLKKKVVFQKIYREFYKIFTLSNFLFPLGLANFWKGDWWGPFFFFPHWGKGEFFQRGLIWVPPGFFHSGVFKRRAVGGGYLASFWGDLGSGPPLGVGGLKKLFFFFFFFFFFFFFFFFFFFFFFFFFFFFFFAHSHTTFLVYFLDSEESDDNMIQKQGLEDFQTEKVKLNVTCSQQHHNFSALHLFFANLRLLLPRLPHCSVLHHLTKDSATVSQHTKQITPIAAL

SEQ ID NO: 12006 - DNA, 723 bp, Triticum aestivum
  misc_feature (1)..(723): Ceres Seq. ID no. 13660245
caggaattcgcacgagaccattacctagaacmtcctawtcccccctccmagttagtcttctktagttarwcttctttttagtgtttacatgctatgagcaaaacacgtttcttttagattctgctcccagtcgtactacgctactactcatctacgctcgtgataaacaatcaagcatgttctaagttctaattgcatcatgtattggctctgcattgggatgatcggcacaggacttgggagaaaccttattcaactaacccatgttatcttttatgaaggcgatggaactgagattcagtcagctcttgctgaatggactgggcagaggactgttcccaatgtcttcatcaatggaaaacacatcggtggctgtgacggtgagctgatttgctccctacaaccatgttaaactgttgattgtagttatggttctatgaacaagcagcaaattccattgtgcgaggctttgctttcttgcaattggattactttctgatagttacttccatgtcaatgtcttctgtggcagatactattgcactgaacaagggagggaagctggttgctctgctgacagaggctggagcgatctccggttcttcttcgaagaccaccgtcactgcttagctttgtttgcgagttgttgtgatcgacatgttagtgtgttacatgagttgcattgttcccgtgtcatgaaataacgaagttggatgtgtttgg

SEQ ID NO: 12007 - protein, 70 aa, Triticum aestivum
  misc_feature (1)..(70): Ceres Seq. ID no. 15220684
MYWLCIGMIGTGLGRNLIQLTHVIFYEGDGTEIQSALAEWTGQRTVPNVFINGKHIGGCDGELICSLQPC

SEQ ID NO: 12008 - protein, 63 aa, Triticum aestivum
  misc_feature (1)..(63): Ceres Seq. ID no. 15220685
MIGTGLGRNLIQLTHVIFYEGDGTEIQSALAEWTGQRTVPNVFINGKHIGGCDGELICSLQPC

SEQ ID NO: 12009 - protein, 41 aa, Triticum aestivum
  misc_feature (1)..(41): Ceres Seq. ID no. 15220686
MLSFMKAMELRFSQLLLNGLGRGLFPMSSSMENTSVAVTVS

SEQ ID NO: 12010 - DNA, 1649 bp, Triticum aestivum
  misc_feature (1)..(1649): Ceres Seq. ID no. 13660260
cattacctagaacatcctaatcgaaaagttgctgtagtccaaccaaaagtagctgacgggctcccttgtttgtatgtcccccactcccggcgaccgcgagcctctcgtccactcccgacaccgagccgaaagccgcgtggattcgccgcccgatccagcgatggattcagcctccagagttgccccgccgccggtcagcgctggtgtccgcgtccgcgcgccgctggtagagtccgtctcctgttactgcagattagatacaggccttaaaactgtcgtggatgctagaaaatttgcttctggagcaaagatgtgcatgcaacctgatgtcaaacaaaccaagcgcaagtcaaggggctcgcggaaggagaggtgccgagctcaagcaccacttttgcctggccttcctgatgatcttgcaattgcctgtcttatacgggttccacgagtggaacaccccaatctccggacagtttgtaaaagatggaaccgccttttgtcaggaaattactattattccttgcgcaagaaactcagcatggcagaagaatgggtttatgtctttaaaagggatcgtgaggggaaaatatcctggcatgccttcgatccactgaaccagctctggaagtcccttccacctgttccaccagagtattcagaagcgttgggttttggctgtgctgttctgagtggttgctatctgtacttatttggcggtaaggatcctttgaggggctctatgagacgtgttgtattttacaatgcccggaccaacaaatggcatcgagctccagatatgttacgaaagcgacacttttttggttcctgtgttataaacaattgtctatatgttgctggtggagagtgtgaaggcatacaaaggactcttcagtctgctgaagtttatgaccctaataggaacagatgggtctgcatccctgagatgaacaacgggatggtgcctttcatcggagttgtatatgatgacaagtggttcctaaaagggcttgactcccatcgccaagtgacatgtgaagtgtacctaccgtcatccaatttgtggtcaaccattgatgatgaaatggttacaggttggcgaaacccaagcatttccttcaatggacgtctctattcatctgattgccgggatggctgcaagcttagagtctatgatgcaaacacaggaacatgggcacgattcatagacagcaggcaccatctaggcagctcacgagccttcgaagccgcaggcttggtgtctttaaatggtaagctttgcattattcgcaacaacatgagcatcactcttgttgatatcttggatccaacaatgagtatcgagaccgacagtgcatgcatgtggaaaactgttgcgcgtaagggtcagcacaagtcatttgtggcaaacttgtggtcgaccattgcaggacgtaacctgaagagtcacataatccattgtcaggtgctgcaaatttgagttcagctgttgcgaatcgggacatgatgaaatcagcgaaacaacacctccattacaagatcaaatgctcaccgcctgaacaaatctttgtacatttgattactagaagctgcaattcaagattctggcaatatcatgagctctctatatatattaatgaattttgaagtgc

SEQ ID NO: 12011 - protein, 467 aa, Triticum aestivum
  misc_feature (1)..(467): Ceres Seq. ID no. 15220687
MSPTPGDREPLVHSRHRAESRVDSPPDPAMDSASRVAPPPVSAGVRVRAPLVESVSCYCRLDTGLKTVVDARKFASGAKMCMQPDVKQTKRKSRGSRKERCRAQAPLLPGLPDDLAIACLIRVPRVEHPNLRTVCKRWNRLLSGNYYYSLRKKLSMAEEWVYVFKRDREGKISWHAFDPLNQLWKSLPPVPPEYSEALGFGCAVLSGCYLYLFGGKDPLRGSMRRVVFYNARTNKWHRAPDMLRKRHFFGSCVINNCLYVAGGECEGIQRTLQSAEVYDPNRNRWVCIPEMNNGMVPFIGVVYDDKWFLKGLDSHRQVTCEVYLPSSNLWSTIDDEMVTGWRNPSISFNGRLYSSDCRDGCKLRVYDANTGTWARFIDSRHHLGSSRAFEAAGLVSLNGKLCIIRNNMSITLVDILDPTMSIETDSACMWKTVARKGQHKSFVANLWSTIAGRNLKSHIIHCQVLQI

SEQ ID NO: 12012 - protein, 438 aa, Triticum aestivum
  misc_feature (1)..(438): Ceres Seq. ID no. 15220688
MDSASRVAPPPVSAGVRVRAPLVESVSCYCRLDTGLKTVVDARKFASGAKMCMQPDVKQTKRKSRGSRKERCRAQAPLLPGLPDDLAIACLIRVPRVEHPNLRTVCKRWNRLLSGNYYYSLRKKLSMAEEWVYVFKRDREGKISWHAFDPLNQLWKSLPPVPPEYSEALGFGCAVLSGCYLYLFGGKDPLRGSMRRVVFYNARTNKWHRAPDMLRKRHFFGSCVINNCLYVAGGECEGIQRTLQSAEVYDPNRNRWVCIPEMNNGMVPFIGVVYDDKWFLKGLDSHRQVTCEVYLPSSNLWSTIDDEMVTGWRNPSISFNGRLYSSDCRDGCKLRVYDANTGTWARFIDSRHHLGSSRAFEAAGLVSLNGKLCIIRNNMSITLVDILDPTMSIETDSACMWKTVARKGQHKSFVANLWSTIAGRNLKSHIIHCQVLQI

SEQ ID NO: 12013 - protein, 388 aa, Triticum aestivum
  misc_feature (1)..(388): Ceres Seq. ID no. 15220689
MCMQPDVKQTKRKSRGSRKERCRAQAPLLPGLPDDLAIACLIRVPRVEHPNLRTVCKRWNRLLSGNYYYSLRKKLSMAEEWVYVFKRDREGKISWHAFDPLNQLWKSLPPVPPEYSEALGFGCAVLSGCYLYLFGGKDPLRGSMRRVVFYNARTNKWHRAPDMLRKRHFFGSCVINNCLYVAGGECEGIQRTLQSAEVYDPNRNRWVCIPEMNNGMVPFIGVVYDDKWFLKGLDSHRQVTCEVYLPSSNLWSTIDDEMVTGWRNPSISFNGRLYSSDCRDGCKLRVYDANTGTWARFIDSRHHLGSSRAFEAAGLVSLNGKLCIIRNNMSITLVDILDPTMSIETDSACMWKTVARKGQHKSFVANLWSTIAGRNLKSHIIHCQVLQI

SEQ ID NO: 12014 - DNA, 1670 bp, Triticum aestivum
  misc_feature (1)..(1670): Ceres Seq. ID no. 13660269
aatcgcccgccctcgctccccatcaaccccttcctagctagctagcgaagcaccagtttgggcagccgccgggcaggatggaagggctggacgtgtaccagcactaccgcttgaaccctacagatgtggacgccgtgacttactacctgccacgcctcatcgccggccagacgctgcacggcgccgataaattcatccaccacgtcgacatctacagctgcgagcccaaggatctggccgcccggattgcgcccgtgccgcaggccgccagcagcggcgaccgcttcttcttcaccacgcgcaagagcaagaacggaagcaaaacccagagcgtgcgcaccgccggcggcggcacctggaccgtcaacgctaccacggccgtcaaacacgccggagtcgaggtcggcgagaggaagaacctgtcgttcaggaagaagggcaagtccaccggttgggtcatggaggagtacaaatgcttgctgccagaggccgtcgtcgccgacggggtgaaggtgttctgcaagatccacttggctcagcatcctcctgacgcggcccgccaggaatcagccgcgtacaagcatcaagcagaaccgcaaccagaggccgtgactgcgagcatgcacgcacagaagaggccagcaatagctcccgccgccgatcctcatccgccgcgccccaacaagaggatgcgaggatcagtccctgtccccgcacctgccccaccgtcgttcttgacgtatgatgaggcagcgagtgcaatgtatggcccgctggctcgtaccatcttccctgttcaagatgctctggatataccagcgtcaatcgaaggtccttcagcatcatgcgagtccactacaacatccaaccactccggcgttgcttcttcctcagataatatgcagcgacaagctcaagctactgagatttcctcccagtcagatgtgctggagtctgtcaagaattacagccaacaacagatgattgttcctgaggctggctcaagcattgcaaggagcacatatgaagaggatgtctttcagccattggagcctctttccgatttgccgggtggggaggcagatggttttgacattgaagaactaatgagaatgatggaagacgacccaattgaggttgagacggtcactggagccaacactggcgtggagatgggccaacaggaacctctgtacctggataccttggaccaaggcatgctggaggacatgctgcagtccgattgcccttacccaatgtcgggatcagaggatcgggccatgcacaaccctgccttccatgatgctgacaaagagaagaggtacaatgccgcgtcggatcttgacgctccatcgcttcagggacaggaccactcgttcaaacagcccttcgatccatttgaagcagcatggaaggccgaagaggcgcacgagaaggagaagagggacaatcttcacgctggaccgcttggaggacacaacaacttcttctggcctgcaagtgtctattaagtccgatgttgaaattgttttcaaagtgtatacgaggatactcactggctgatatattagttcgtccttatacgatcgccacacgtgtacctctgagcaatttgctccacttgttcatgtaagctaaaactgttgttgttcttcttgcccctctgatgg

SEQ ID NO: 12015 - protein, 477 aa, Triticum aestivum
  misc_feature (1)..(477): Ceres Seq. ID no. 13660270
MEGLDVYQHYRLNPTDVDAVTYYLPRLIAGQTLHGADKFIHHVDIYSCEPKDLAARIAPVPQAASSGDRFFFTTRKSKNGSKTQSVRTAGGGTWTVNATTAVKHAGVEVGERKNLSFRKKGKSTGWVMEEYKCLLPEAVVADGVKVFCKIHLAQHPPDAARQESAAYKHQAEPQPEAVTASMHAQKRPAIAPAADPHPPRPNKRMRGSVPVPAPAPPSFLTYDEAASAMYGPLARTIFPVQDALDIPASIEGPSASCESTTTSNHSGVASSSDNMQRQAQATEISSQSDVLESVKNYSQQQMIVPEAGSSIARSTYEEDVFQPLEPLSDLPGGEADGFDIEELMRMMEDDPIEVETVTGANTGVEMGQQEPLYLDTLDQGMLEDMLQSDCPYPMSGSEDRAMHNPAFHDADKEKRYNAASDLDAPSLQGQDHSFKQPFDPFEAAWKAEEAHEKEKRDNLHAGPLGGHNNFFWPASVY

SEQ ID NO: 12016 - protein, 350 aa, Triticum aestivum
  misc_feature (1)..(350): Ceres Seq. ID no. 13660271
MEEYKCLLPEAVVADGVKVFCKIHLAQHPPDAARQESAAYKHQAEPQPEAVTASMHAQKRPAIAPAADPHPPRPNKRMRGSVPVPAPAPPSFLTYDEAASAMYGPLARTIFPVQDALDIPASIEGPSASCESTTTSNHSGVASSSDNMQRQAQATEISSQSDVLESVKNYSQQQMIVPEAGSSIARSTYEEDVFQPLEPLSDLPGGEADGFDIEELMRMMEDDPIEVETVTGANTGVEMGQQEPLYLDTLDQGMLEDMLQSDCPYPMSGSEDRAMHNPAFHDADKEKRYNAASDLDAPSLQGQDHSFKQPFDPFEAAWKAEEAHEKEKRDNLHAGPLGGHNNFFWPASVY

SEQ ID NO: 12017 - protein, 296 aa, Triticum aestivum
  misc_feature (1)..(296): Ceres Seq. ID no. 13660272
MHAQKRPAIAPAADPHPPRPNKRMRGSVPVPAPAPPSFLTYDEAASAMYGPLARTIFPVQDALDIPASIEGPSASCESTTTSNHSGVASSSDNMQRQAQATEISSQSDVLESVKNYSQQQMIVPEAGSSIARSTYEEDVFQPLEPLSDLPGGEADGFDIEELMRMMEDDPIEVETVTGANTGVEMGQQEPLYLDTLDQGMLEDMLQSDCPYPMSGSEDRAMHNPAFHDADKEKRYNAASDLDAPSLQGQDHSFKQPFDPFEAAWKAEEAHEKEKRDNLHAGPLGGHNNFFWPASVY

SEQ ID NO: 12018 - DNA, 462 bp, Triticum aestivum
  misc_feature (1)..(462): Ceres Seq. ID no. 13660322
attatttcaaaaaactcctccgtattttcgtctactactccgaattaataataatcccgcaaaatctctccgtccccagctactcccccggatccgatcgccaccgccggaatatccgatctctctgccgccgccgccgcccgagacctgctcgtcggaattccccgcggcggcgcatgtcgctggcgtgcgggctgccgctgctggagtgtgtctactgcctggggtgcgcgcggtgggcgtggaagcggtgcgtccactccggccaccacgacagcgccacctggggccacgccgccgccgccgacttcgcgcccgtgccccgcatgtgccgcctcgtcatggccaactacgccccgcccgacctcctcgccgccccgccgctcctcctcgacccctcaaacgtcgtgcgccgccgcacctacgccgacacggggggccgcgtcacgccctacctcgtct

SEQ ID NO: 12019 - protein, 153 aa, Triticum aestivum
  misc_feature (1)..(153): Ceres Seq. ID no. 13660323
LFQKTPPYFRLLLRINNNPAKSLRPQLLPRIRSPPPEYPISLPPPPPETCSSEFPAAAHVAGVRAAAAGVCLLPGVRAVGVEAVRPLRPPRQRHLGPRRRRRLRARAPHVPPRHGQLRPARPPRRPAAPPRPLKRRAPPHLRRHGGPRHALPR

SEQ ID NO: 12020 - protein, 153 aa, Triticum aestivum
  misc_feature (1)..(153): Ceres Seq. ID no. 13660324
YFKKLLRIFVYYSELIIIPQNLSVPSYSPGSDRHRRNIRSLCRRRRPRPARRNSPRRRMSLACGLPLLECVYCLGCARWAWKRCVHSGHHDSATWGHAAAADFAPVPRMCRLVMANYAPPDLLAAPPLLLDPSNVVRRRTYADTGGRVTPYLV

SEQ ID NO: 12021 - protein, 95 aa, Triticum aestivum
  misc_feature (1)..(95): Ceres Seq. ID no. 13660325
MSLACGLPLLECVYCLGCARWAWKRCVHSGHHDSATWGHAAAADFAPVPRMCRLVMANYAPPDLLAAPPLLLDPSNVVRRRTYADTGGRVTPYLV

SEQ ID NO: 12022 - DNA, 1652 bp, Triticum aestivum
  misc_feature (1)..(1652): Ceres Seq. ID no. 13660333
gaacatcctaatcgaaaaaaatgcccccgaacagctgccgcgcaccgccatgccctctgcatcgacggccaccaaccagctccccttcctcctctcacctccccagcagatcacgcggcgagggaacgaagcccaccaccgacaaactcctccttctcttccagcttcccctcctccggcgccggtcctgcggcggccatggggatggtgcgggcggcgtggtttctgctcctgttggcgttgctcgcggcggcggacgcaaggaggcagaagggcggcgagacggcctgcgacaaggggtgggagtgcagcggcagcaggttctgctgcaacgagaccatcaccgactacttcaaggcctaccagttcgaggagctcttcgccaagcgcaacaactccctcgcccacgccgccggcttctgggactacaaggccttcatcaccgccgcggccctctacgagcctcgtgggttcggcaccaccggcggcagggagatgagcatgaaggaggtcgccgccttcctcggccacgtcggcgccaagacctcgtgtggatatagtctagctgacggtggttcattggcttggggtctttgctacaaccatgaaatgagcccaagccagagctactgtgacgacagcaacgaattataccgttgtgctgaaggagttgagtactatggtcgaggcgcccttcctgtttactggaactacaactatggtatcgtgggtaagggtatcaagcaggatctgttgaaccacccagagttattggaacaaaatgccactctagcatttgaagcagcgatctggaggtggatgactccaatgaagaggaagcagccatcagcccatgatgcctttgttggcaactggaaaccaaccaagaaagacactttgtccaagaggtatcctggcttcggtgcgacaatgaacattttgtatggtgatgccatctgtggtaaagggtccattgataatatgaatggcattatatcccactatcaacattatcttgatttgatgggagttggtgctcagcactctggagataacttggattgtgccgaccaagtgccattcaatccatcatcaaagagtcccgactcataaccaagttgcatgtcagatccatgtatattccccctgtacatttgaggtgcagctatcttgcatccgcaacgatagaagtattgtgtgcaattctatatgatagtactccctccgtttttatttagtccgcatattagctttggtcaaagtcaagctttgtaaactttgactaagtttataaacaaaaatattaacatatacaataaaaaatcaataccactagattcattattgaatgtactttcacatcatatagatttgttatggtaaatgtttatatatttttctataaatttggtcaaactttgcaaagtttgacttcggtcaaacctaatatgcagactgaataaaaacggagggagtatttattagtagctctgaggacgactgttgcatttgtgtagtctgtaacctatttatgtaagcccgtaaccttctctcattttgtgtttttgccatgtatattacagcagagaactcgcatttgaacacatgatgacttccttgtaaattatattacttctgttactaaaggtggg

SEQ ID NO: 12023 - protein, 370 aa, Triticum aestivum
  misc_feature (1)..(370): Ceres Seq. ID no. 15220020
EHPNRKKCPRTAAAHRHALCIDGHQPAPLPPLTSPADHAARERSPPPTNSSFSSSFPSSGAGPAAAMGMVRAAWFLLLLALLAAADARRQKGGETACDKGWECSGSRFCCNETITDYFKAYQFEELFAKRNNSLAHAAGFWDYKAFITAAALYEPRGFGTTGGREMSMKEVAAFLGHVGAKTSCGYSLADGGSLAWGLCYNHEMSPSQSYCDDSNELYRCAEGVEYYGRGALPVYWNYNYGIVGKGIKQDLLNHPELLEQNATLAFEAAIWRWMTPMKRKQPSAHDAFVGNWKPTKKDTLSKRYPGFGATMNILYGDAICGKGSIDNMNGIISHYQHYLDLMGVGAQHSGDNLDCADQVPFNPSSKSPDS

SEQ ID NO: 12024 - protein, 304 aa, Triticum aestivum
  misc_feature (1)..(304): Ceres Seq. ID no. 15220021
MGMVRAAWFLLLLALLAAADARRQKGGETACDKGWECSGSRFCCNETITDYFKAYQFEELFAKRNNSLAHAAGFWDYKAFITAAALYEPRGFGTTGGREMSMKEVAAFLGHVGAKTSCGYSLADGGSLAWGLCYNHEMSPSQSYCDDSNELYRCAEGVEYYGRGALPVYWNYNYGIVGKGIKQDLLNHPELLEQNATLAFEAAIWRWMTPMKRKQPSAHDAFVGNWKPTKKDTLSKRYPGFGATMNILYGDAICGKGSIDNMNGIISHYQHYLDLMGVGAQHSGDNLDCADQVPFNPSSKSPDS

SEQ ID NO: 12025 - protein, 302 aa, Triticum aestivum
  misc_feature (1)..(302): Ceres Seq. ID no. 15220022
MVRAAWFLLLLALLAAADARRQKGGETACDKGWECSGSRFCCNETITDYFKAYQFEELFAKRNNSLAHAAGFWDYKAFITAAALYEPRGFGTTGGREMSMKEVAAFLGHVGAKTSCGYSLADGGSLAWGLCYNHEMSPSQSYCDDSNELYRCAEGVEYYGRGALPVYWNYNYGIVGKGIKQDLLNHPELLEQNATLAFEAAIWRWMTPMKRKQPSAHDAFVGNWKPTKKDTLSKRYPGFGATMNILYGDAICGKGSIDNMNGIISHYQHYLDLMGVGAQHSGDNLDCADQVPFNPSSKSPDS

SEQ ID NO: 12026 - DNA, 1104 bp, Triticum aestivum
  misc_feature (1)..(1104): Ceres Seq. ID no. 13660394
cattacctagaacatcctaatcgaaaaatgaatgaatgtcactgaggcataaaccccctgttcctcttgttcctccccttcggcctccggcgcagttggttgccacgacgaggggcggacccacccatcggacgaggtccgtcgccggacattccagccggtggtgagcggagggcggcaaggcgtgggagctcgcggcgacgtacaaggctgggtgagagtggcgcttgaggcggacggccaactccgacagcggacccctcagccgacgacgccaccgaagttggtcagcattagctccttcaggcttctggccggtgtgaaaagttgctaggtcaccatggatgtcgatcgacaagaaacgatggaagagaccattctcgtcggtgatgatcttatgcgtgggccaccttcccctgtcgtaccgaaagagattgcatcccatgtccttgaaggtgttgagctttgtgatggtatcctgaagaatcttttcctatgcttgcaaatcaatgatattgagccattttgtcaagacgaaattgtgctatacaaacaatgtgctgagaaaagggataaggaaataagggaacgacttcaggatagtgagtataaattaggtttctcgatgcccctcgaagatgcaaaggaaagagtcactcaactccaatcagaactcacactgctcgaaaggcgcatgattcttgctagtggtcttccgggtatggaaggatttcgccaacgatggagcttgcatggacagcttggcgatacaaggaaaaggttggaggcgctgaacagtgggatggcaaaaagagagagcccaagtcctccaggcgaaggcacaacacctgcagttaagaagaggtggttcttttagtacgttagcgcatatttttccgacttgcaaaacgttgtaactaatgctgtgttagtggcaatgtcatccactctttcttggtttggggttctacctccaaagtaactactactgtgtttgctaacagtggtttcgccacagctgcacttttgattaaaaatatggaaatacttggcctgtaaaccttgaacataccatttgaattacccacgaaaatggtgatatgc

SEQ ID NO: 12027 - protein, 178 aa, Triticum aestivum
  misc_feature (1)..(178): Ceres Seq. ID no. 15219233
MDVDRQETMEETILVGDDLMRGPPSPVVPKEIASHVLEGVELCDGILKNLFLCLQINDIEPFCQDEIVLYKQCAEKRDKEIRERLQDSEYKLGFSMPLEDAKERVTQLQSELTLLERRMILASGLPGMEGFRQRWSLHGQLGDTRKRLEALNSGMAKRESPSPPGEGTTPAVKKRWFF

SEQ ID NO: 12028 - protein, 170 aa, Triticum aestivum
  misc_feature (1)..(170): Ceres Seq. ID no. 15219234
MEETILVGDDLMRGPPSPVVPKEIASHVLEGVELCDGILKNLFLCLQINDIEPFCQDEIVLYKQCAEKRDKEIRERLQDSEYKLGFSMPLEDAKERVTQLQSELTLLERRMILASGLPGMEGFRQRWSLHGQLGDTRKRLEALNSGMAKRESPSPPGEGTTPAVKKRWFF

SEQ ID NO: 12029 - protein, 159 aa, Triticum aestivum
  misc_feature (1)..(159): Ceres Seq. ID no. 15219235
MRGPPSPVVPKEIASHVLEGVELCDGILKNLFLCLQINDIEPFCQDEIVLYKQCAEKRDKEIRERLQDSEYKLGFSMPLEDAKERVTQLQSELTLLERRMILASGLPGMEGFRQRWSLHGQLGDTRKRLEALNSGMAKRESPSPPGEGTTPAVKKRWFF

SEQ ID NO: 12030 - DNA, 1542 bp, Triticum aestivum
  misc_feature (1)..(1542): Ceres Seq. ID no. 13660479
agagagagagagagagagtcccttcccaccccaccccactctcctcgcgcgccccccgctccggagggcgatctcgggaggaacggcgggcgtcccgcggcgagttgtattatatggttgtcggccgcgattttgctgttaatcttgtcaagttggtgagtacctggaagctgcaatgactgaaaacacccagggcagtgtccggcgggcctttggagacctgacaaatgtccttggcaagcggccagcctcatgcgatctggagaagaatgcaggtggagtcaagattagtcgggtcgaaaaggtcgctgaccctaggaaagagtctgatgaaaaggcaaaggccaatgctggggcatcaggaaacctttttgaagttctggttgatggtattggcaaagaggacttcgcaaggacttcaattttccgtggagccaaggttcagcacatggctgctcaggcagctgggctactatccaaggatgatgatgacgcgaggaatcgttgcgtatctttggattcttctggcctcaacgacaaggcggagtcttccttggaatcagagggtggctgtgaaggggaagatgatgaagacactgatagtgagttgctgccatatgccagtgaggctagtaagattgtaattaatgataagactaatgagggtgaatgtctgactcaagaggagatggtggtatcaccaggaaatcagaattcgcagtcttcatttgacgctacagctcgtgatgacatgacatgtacaaatgtccagcatcctccaatggaggttggtggcttggaaaaatcatgtgctacaaagtcttgcacttgctctttctgtcttaaggctgcttttatgtggactaatctccattatcaggatgcaagaagccggcttggtgcattgaagaagagcataaagtttgctagatcgctagaggcaaagaggcaaggaaatgaattcaatgcagacagatactcaaaaagagctgcagagatgggattcaaactatctcaacaacagagatcactctttcttcatactgaaaatgcccttgttcgtgaatctgcccagctccattcagctgtcgtcaagttaaaggacttgagagacaactgcaagaaagatctgaagatctgatcatcaattcttcgccggggagacgagtcctgcatgcacggttgtgctctggtaaacttgttaccctgggatgtagtaggataagctggatctttttgaatcaagatgtgtacggtatttggttgtcaactagcaagttagggggttctcaagtaggaaattcggccgtagagattactcctaacttaaaacataggccagcatcttagcctctgaagatcgtctgaggaaatgcttttgtaaaaaccttagagggagttgtgaactgtaggtttgtgacaggagtcctttcagtcgctcagtcagcacgtggatgtgagatagcaccattttgtttcctgctctccaaagagccaaacgggaagtgcaaataatgtcatttgactagtttttccatgctt

SEQ ID NO: 12031 - protein, 321 aa, Triticum aestivum
  misc_feature (1)..(321): Ceres Seq. ID no. 13660480
MTENTQGSVRRAFGDLTNVLGKRPASCDLEKNAGGVKISRVEKVADPRKESDEKAKANAGASGNLFEVLVDGIGKEDFARTSIFRGAKVQHMAAQAAGLLSKDDDDARNRCVSLDSSGLNDKAESSLESEGGCEGEDDEDTDSELLPYASEASKIVINDKTNEGECLTQEEMVVSPGNQNSQSSFDATARDDMTCTNVQHPPMEVGGLEKSCATKSCTCSFCLKAAFMWTNLHYQDARSRLGALKKSIKFARSLEAKRQGNEFNADRYSKRAAEMGFKLSQQQRSLFLHTENALVRESAQLHSAVVKLKDLRDNCKKDLKI

SEQ ID NO: 12032 - protein, 230 aa, Triticum aestivum
  misc_feature (1)..(230): Ceres Seq. ID no. 13660481
MAAQAAGLLSKDDDDARNRCVSLDSSGLNDKAESSLESEGGCEGEDDEDTDSELLPYASEASKIVINDKTNEGECLTQEEMVVSPGNQNSQSSFDATARDDMTCTNVQHPPMEVGGLEKSCATKSCTCSFCLKAAFMWTNLHYQDARSRLGALKKSIKFARSLEAKRQGNEFNADRYSKRAAEMGFKLSQQQRSLFLHTENALVRESAQLHSAVVKLKDLRDNCKKDLKI

SEQ ID NO: 12033 - DNA, 463 bp, Triticum aestivum
  misc_feature (1)..(463): Ceres Seq. ID no. 13660548
atgtcgtcttcctcgccaccacaccacaccactgcagtgccgtcgcgtcatctcccacctctcccatcgggccagcggaagcagcagctgcgtgcggaaccaaccatgctccccttcctcctctccctccttctcctcaccggcgccgcggcgggggtacagggccacgacgacgcggcggcgcggcggacgatggaggagttcgccggcttccccgcctccgacgacggcgagggcggccgcgcctcccccttgcgcgtagactccgaaagtcthdagcgccagattgatgaactggcctcgttctccgactcgccggcgcrgtcggtgacgcgtgttctgtacagcgacaaggatgtgcaagctcgaaggtatattaaagggataatgaaacagcttggcctctctgttcgagaagatgccgttggcaacatatttggccgctgggtgggtyctgaggcag

SEQ ID NO: 12034 - protein, 154 aa, Triticum aestivum
  misc_feature (1)..(154): Ceres Seq. ID no. 13660549
  misc_feature (92)..(92): Xaa is any aa, unknown or other
  misc_feature (93)..(93): Xaa is any aa, unknown or other
  misc_feature (108)..(108): Xaa is any aa, unknown or other
  misc_feature (152)..(152): Xaa is any aa, unknown or other
MSSSSPPHHTTAVPSRHLPPLPSGQRKQQLRAEPTMLPFLLSLLLLTGAAAGVQGHDDAAARRTMEEFAGFPASDDGEGGRASPLRVDSESXXRQIDELASFSDSPAXSVTRVLYSDKDVQARRYIKGIMKQLGLSVREDAVGNIFGRWVGXEA

SEQ ID NO: 12035 - protein, 119 aa, Triticum aestivum
  misc_feature (1)..(119): Ceres Seq. ID no. 13660550
  misc_feature (57)..(57): Xaa is any aa, unknown or other
  misc_feature (58)..(58): Xaa is any aa, unknown or other
  misc_feature (73)..(73): Xaa is any aa, unknown or other
  misc_feature (117)..(117): Xaa is any aa, unknown or other
MLPFLLSLLLLTGAAAGVQGHDDAAARRTMEEFAGFPASDDGEGGRASPLRVDSESXXRQIDELASFSDSPAXSVTRVLYSDKDVQARRYIKGIMKQLGLSVREDAVGNIFGRWVGXEA

SEQ ID NO: 12036 - protein, 95 aa, Triticum aestivum
  misc_feature (1)..(95): Ceres Seq. ID no. 13660551
  misc_feature (92)..(92): Xaa is any aa, unknown or other
VVFLATTPHHCSAVASSPTSPIGPAEAAAACGTNHAPLPPLPPSPHRRRGGGTGPRRRGGAADDGGVRRLPRLRRRRGRPRLPLARRLRKSXAPD

SEQ ID NO: 12037 - DNA, 858 bp, Triticum aestivum
  misc_feature (1)..(858): Ceres Seq. ID no. 13660855
atcctgtccgggagcacggagccgcttcgttatccgctggccgctgctgctgcttctctgcgagtgagcgagtgaggaaagaggacggcgacgatggccggcatggcggcgctgcagggcgccatgggggcgctctccgtctcggccgcgagcaccagcgcattctggggcaacccgctcgccgccaccttctccgccgcgccgtctggggtcagattcatggccaagacaagcccaattgaaatgaggcttaagcgatgggaacggaagaagtgtaagccaaacagtcttcctatgctgcacaagatgcatgttagggtcggcgacacggtgcaggtcatcgcaggccgtgagaaaggtaaagttggggaagtcgtacggctttataagcacaacagcactgtgatagtgaaggatctgaacttgaagtcaaagcacaagaaaggcactgaggatgaaccgggtgaaattgtcatgattgaaggccccattcatagctcgaacatgatgctctactcaaaggagaagaacgtgacgagtagggttgggcacaaaatcctcgaggatggcaccaaggtccgctacctgaagaagaccggtgaagtaatcgacagcgttgacaactgggtgaaggtgttcaaggaaggagattctgagtcatcatcgtagtatggaaatgctgcgcatgctctcaaccttagctgcgcttattgctgcccaaacgcttactcggctggtgccactgcttgtactgtcagtttttttctagcttcagagcctcttttgtaaattactactactactacaaagttgtcaccatttttgcaacgcttggtccaacaagaaggccttcgtttt

SEQ ID NO: 12038 - protein, 191 aa, Triticum aestivum
  misc_feature (1)..(191): Ceres Seq. ID no. 13660856
MAGMAALQGAMGALSVSAASTSAFWGNPLAATFSAAPSGVRFMAKTSPIEMRLKRWERKKCKPNSLPMLHKMHVRVGDTVQVIAGREKGKVGEVVRLYKHNSTVIVKDLNLKSKHKKGTEDEPGEIVMIEGPIHSSNMMLYSKEKNVTSRVGHKILEDGTKVRYLKKTGEVIDSVDNWVKVFKEGDSESSS

SEQ ID NO: 12039 - protein, 188 aa, Triticum aestivum
  misc_feature (1)..(188): Ceres Seq. ID no. 13660857
MAALQGAMGALSVSAASTSAFWGNPLAATFSAAPSGVRFMAKTSPIEMRLKRWERKKCKPNSLPMLHKMHVRVGDTVQVIAGREKGKVGEVVRLYKHNSTVIVKDLNLKSKHKKGTEDEPGEIVMIEGPIHSSNMMLYSKEKNVTSRVGHKILEDGTKVRYLKKTGEVIDSVDNWVKVFKEGDSESSS

SEQ ID NO: 12040 - protein, 181 aa, Triticum aestivum
  misc_feature (1)..(181): Ceres Seq. ID no. 13660858
MGALSVSAASTSAFWGNPLAATFSAAPSGVRFMAKTSPIEMRLKRWERKKCKPNSLPMLHKMHVRVGDTVQVIAGREKGKVGEVVRLYKHNSTVIVKDLNLKSKHKKGTEDEPGEIVMIEGPIHSSNMMLYSKEKNVTSRVGHKILEDGTKVRYLKKTGEVIDSVDNWVKVFKEGDSESSS

SEQ ID NO: 12041 - DNA, 2194 bp, Triticum aestivum
  misc_feature (1)..(2194): Ceres Seq. ID no. 13660912
cccccctccactgatcatctcatctctttcttcttggtgcctccccccctggtttttgcttctgccactccatgtctcaatcttctcctttcttttccattgcccccgcacatgctggagcaggagggcaagctgcggctgccgctctcctgctccgttgccctgccgctcagctgccacctgccattcactgcttccgtctggctaaagtgtcgcctgccaagacactgagctcgcacctggtgcttccgcgcgccacactctcctcctttgcaaacgctgacgatggctccggtgcaaactcagatgcctcgggggagcagagcggaggatccgaactgtcagagatggcaaaggcattccatatttcaccacggatggccatgtcaatctctgtggtgattgcatttgcagctctcactgttcccctggccatgcgctcactgctcttccatgggacgaccaagatgaaggtgctggcatatctgaccctcttgtcaggattctacatggcatggaacattggagccaatgatgtggcaaatgccatggggacgtcggtcggatctggggctttgactctccggcaggcagtgttgactgcagctgtgctagagttctctggtgcattccttatgggcacccatgtcaccagcaccatgcagaagggcatcctcgtcacatccgtcttccaaggaaatgattctctgctctttgctggattgctgtcctccctcgctgctgctggtacatggttgcaggttgcttcctcttatggctggcctgtgtcaactacccattgtattgttggggctatggttggttttgggctggtatatggaggggtcaatgcagttttctggagctccttggctagagtatcttcatcatggcttatttctcctctgatgggtgctgcagtctcatttcttgtttacaagtgcatacgcaggttcgtgtacagcgcaccaaatccaggtcaagctgcagctgcttctgcacctattgcagtttttactggtgtcactgcaatctcgtttgccgctttccctctcagcaagacattttccattgccgttctgcaagcattagtatgtggggcaataggagctgtctttgttagcagggcaatcaaaaaacagcttggtgatctactgtcttcggaagcagaaaagatagcaacagctgacaatacagatgttcagcaaggtggatttgacgtcgctggccctagaggagctcaactgcagattgtctacggcgtatttggctacatgcaggtcctgtcagcatgcttcatgtcattcgctcatggaggcaatgatgtctccaatgccatagggcctctggccgcagctttgtctcttcttcaaggcgtagcaagcagcgctgagatagtcataccgactgaagtccttgcttggggtggttttggaattgtcgcagggcttacaatgtggggttatagagtcatagcaacaattggcaagaaaatcaccgaattaacacccacaagggggttcgcagcagagtttgcggccgcttctgtggtcttgtttgcatctaagcttgggttgccaatatctgctacacatacacttgttggtgcagtgatgggtgtaggatttgcaagaggtctcaacagagtcagagcagagactgttcgtgaaattgtggtctcctgggtggtcacaattccagttggtgctttgctatcagtcatctatacattaatcttgaccaagattctgaaatactttatgtgagtgctttgtgagatacagttgctgttttgagaggtccagccgttgtccctaaattttttatgctgtaaaagaatgtgtaacagtgaatagatgagccagctccgggagtttccagcagagaaattgaaaagatttgtcagagaaaataatcattttcctggcaacaaaacatgattaggataaagggtttacggtaaataatcatgtttgagactcccagcttcttcatcttttatctctaatgtaccacctatatgactatatctttatattttcttccagaaggtggaatatttcaatttcttgtagagatatgattaattgatcatacataatagacaatggttcgtctcactacccttgtaattatgccacattgacgattttgctgtttcagcgccactataaatgtgaatctttttctttgg

SEQ ID NO: 12042 - protein, 564 aa, Triticum aestivum
  misc_feature (1)..(564): Ceres Seq. ID no. 15220696
MSQSSPFFSIAPAHAGAGGQAAAAALLLRCPAAQLPPAIHCFRLAKVSPAKTLSSHLVLPRATLSSFANADDGSGANSDASGEQSGGSELSEMAKAFHISPRMAMSISVVIAFAALTVPLAMRSLLFHGTTKMKVLAYLTLLSGFYMAWNIGANDVANAMGTSVGSGALTLRQAVLTAAVLEFSGAFLMGTHVTSTMQKGILVTSVFQGNDSLLFAGLLSSLAAAGTWLQVASSYGWPVSTTHCIVGAMVGFGLVYGGVNAVFWSSLARVSSSWLISPLMGAAVSFLVYKCIRRFVYSAPNPGQAAAASAPIAVFTGVTAISFAAFPLSKTFSIAVLQALVCGAIGAVFVSRAIKKQLGDLLSSEAEKIATADNTDVQQGGFDVAGPRGAQLQIVYGVFGYMQVLSACFMSFAHGGNDVSNAIGPLAAALSLLQGVASSAEIVIPTEVLAWGGFGIVAGLTMWGYRVIATIGKKITELTPTRGFAAEFAAASVVLFASKLGLPISATHTLVGAVMGVGFARGLNRVRAETVREIVVSWVVTIPVGALLSVIYTLILTKILKYFM

SEQ ID NO: 12043 - protein, 472 aa, Triticum aestivum
  misc_feature (1)..(472): Ceres Seq. ID no. 15220697
MAKAFHISPRMAMSISVVIAFAALTVPLAMRSLLFHGTTKMKVLAYLTLLSGFYMAWNIGANDVANAMGTSVGSGALTLRQAVLTAAVLEFSGAFLMGTHVTSTMQKGILVTSVFQGNDSLLFAGLLSSLAAAGTWLQVASSYGWPVSTTHCIVGAMVGFGLVYGGVNAVFWSSLARVSSSWLISPLMGAAVSFLVYKCIRRFVYSAPNPGQAAAASAPIAVFTGVTAISFAAFPLSKTFSIAVLQALVCGAIGAVFVSRAIKKQLGDLLSSEAEKIATADNTDVQQGGFDVAGPRGAQLQIVYGVFGYMQVLSACFMSFAHGGNDVSNAIGPLAAALSLLQGVASSAEIVIPTEVLAWGGFGIVAGLTMWGYRVIATIGKKITELTPTRGFAAEFAAASVVLFASKLGLPISATHTLVGAVMGVGFARGLNRVRAETVREIVVSWVVTIPVGALLSVIYTLILTKILKYFM

SEQ ID NO: 12044 - protein, 462 aa, Triticum aestivum
  misc_feature (1)..(462): Ceres Seq. ID no. 15220698
MAMSISVVIAFAALTVPLAMRSLLFHGTTKMKVLAYLTLLSGFYMAWNIGANDVANAMGTSVGSGALTLRQAVLTAAVLEFSGAFLMGTHVTSTMQKGILVTSVFQGNDSLLFAGLLSSLAAAGTWLQVASSYGWPVSTTHCIVGAMVGFGLVYGGVNAVFWSSLARVSSSWLISPLMGAAVSFLVYKCIRRFVYSAPNPGQAAAASAPIAVFTGVTAISFAAFPLSKTFSIAVLQALVCGAIGAVFVSRAIKKQLGDLLSSEAEKIATADNTDVQQGGFDVAGPRGAQLQIVYGVFGYMQVLSACFMSFAHGGNDVSNAIGPLAAALSLLQGVASSAEIVIPTEVLAWGGFGIVAGLTMWGYRVIATIGKKITELTPTRGFAAEFAAASVVLFASKLGLPISATHTLVGAVMGVGFARGLNRVRAETVREIVVSWVVTIPVGALLSVIYTLILTKILKYFM

SEQ ID NO: 12045 - DNA, 1393 bp, Triticum aestivum
  misc_feature (1)..(1393): Ceres Seq. ID no. 13661015
aaaaataggctcgtggcaaatctggtctaccagtcgccccctcacccacccaacccgcccacggagaaaaatcccccaggaagaagaaattccacgctgctgccattccgacgatgcgccgcgccgccgtcgccgtcaccgccgcgctcctcctcctcctcgtcgccggcgcagctgcgggctcccccggcgcggagcccacctgcccgcggggcgccggcccgccgttcctcgacgcgctcggatcgcggtgcccccgcggcgcccggatcgtgccctccccgcccctcgaggtcagaggagatgctgttgataaagaattgaaccttcgctgtaccggtgcctcatgctccattctcttctatgccgcatggtgtcctttctcgagcaaatttcgaccaatatttgaagctctcagcaccatgttccctcagatacatcactttgctgtcgaagaatcttctgcgacgcctagtttgttttcaagatatggtgtccgtggcttcccagccattcttctggcaagtgagactacaatggttcgttacaggggcacaaaagatctgaagtctctggttcagttctatcaagagactacaggcctcgacccaattacatatattgatgttgatcagcaagagagcactggaagtttaggatcagccatgccaggaggccgctctctgcgcaaaatggcgaaagacgagccctttctgtttcttggagccctttttataatcatgaagatcgcggcacacttcgtccccactgtcatctcccaactgagagccttcttgattgtgcgtgttcagaacttgaacttaagaatctgtaggggatcaagccaacttatggaacgggcattgactgtgcttgatgttcagaggctctggagcaagcttagactgagcagtaagacaagggacctaagtaaaggggcgagtaatgctcgagcttgggcttcgtcgtttgcgtccgtctcactgggtgaaccatcctccttacggcatgcctagcctcttcctcatgatgctggtcgatagtctagctgctgatatatggcccaaaattgtttggtcttgcttccccatcctgctatgtacgtgcatccgcgcatgtggggacccaggaatgtaaattttcaggatctcatcttgttgtatataggaacgcgttttcgctttgctgacgcgatagctgatctctgacctttgtttcagttaactctttgatgtatggtgaagatctgagtatttcttcgatctctttcggttgctgttagaatttggctttgctatgtcgcccttgcctgcgccagcttaaatcctgggccgccgactcctgctctgaattgtaaaactgtcttgatttttattcacaccatgctgtttgg

SEQ ID NO: 12046 - protein, 300 aa, Triticum aestivum
  misc_feature (1)..(300): Ceres Seq. ID no. 13661016
MRRAAVAVTAALLLLLVAGAAAGSPGAEPTCPRGAGPPFLDALGSRCPRGARIVPSPPLEVRGDAVDKELNLRCTGASCSILFYAAWCPFSSKFRPIFEALSTMFPQIHHFAVEESSATPSLFSRYGVRGFPAILLASETTMVRYRGTKDLKSLVQFYQETTGLDPITYIDVDQQESTGSLGSAMPGGRSLRKMAKDEPFLFLGALFIIMKIAAHFVPTVISQLRAFLIVRVQNLNLRICRGSSQLMERALTVLDVQRLWSKLRLSSKTRDLSKGASNARAWASSFASVSLGEPSSLRHA

SEQ ID NO: 12047 - protein, 197 aa, Triticum aestivum
  misc_feature (1)..(197): Ceres Seq. ID no. 13661017
MFPQIHHFAVEESSATPSLFSRYGVRGFPAILLASETTMVRYRGTKDLKSLVQFYQETTGLDPITYIDVDQQESTGSLGSAMPGGRSLRKMAKDEPFLFLGALFIIMKIAAHFVPTVISQLRAFLIVRVQNLNLRICRGSSQLMERALTVLDVQRLWSKLRLSSKTRDLSKGASNARAWASSFASVSLGEPSSLRHA

SEQ ID NO: 12048 - protein, 159 aa, Triticum aestivum
  misc_feature (1)..(159): Ceres Seq. ID no. 13661018
MVRYRGTKDLKSLVQFYQETTGLDPITYIDVDQQESTGSLGSAMPGGRSLRKMAKDEPFLFLGALFIIMKIAAHFVPTVISQLRAFLIVRVQNLNLRICRGSSQLMERALTVLDVQRLWSKLRLSSKTRDLSKGASNARAWASSFASVSLGEPSSLRHA

SEQ ID NO: 12049 - DNA, 808 bp, Triticum aestivum
  misc_feature (1)..(808): Ceres Seq. ID no. 13661143
aacatcctaatcgaaaaacaccacacgcaacgcaagccttcgcacccgaacgcaagaaagagagagagagagagagagagagcacacgcggcgggggaaaagcaggagcgaagcgagggatcgggaggaacatcggcgaggccatggcgcggcggggcacggaggcgttcccggacctgggcgcgcactgcgacagggaggactgcaaccagctcgacttcctgcccttcgactgcaacggctgcggcaaggtgttctgcacggagcaccgcgcgtacgttgaccacggctgcccgctcgcggccgacaacggccgcaccgtcgtcgtctgcgaggcctgcggcgactccatcgagcgcgccgggtcggacgagacggatgcgcagatcctcgagaagcacgcgcggtcgcgccggggctgcgacccggccaggaagctcaagccgcgatgccccgcgcggcgctgcaaggagacactcaccttctccaacacgagccactgcaaggagtgcgggcagaagctgtgcctcaagcaccggttccccgaggaccacgggtgctcgcgcgtgtcgccggtgggggccgccgccgccgcgaggagggccggcgactgcggccgcgacgcgcagaagacaaaggacggcggtgggtgggcgctgccgccgttgatccggaatttcaattgattaccctgaagctgaaattgtggctgggatttacgcaattcatggaacgtttgttttctccggtgtcatattttcaattgtgcacattttgttgttgttaaatgaagaatcaaattcagtct

SEQ ID NO: 12050 - protein, 227 aa, Triticum aestivum
  misc_feature (1)..(227): Ceres Seq. ID no. 13661144
HPNRKTPHATQAFAPERKKERERERESTRGGGKAGAKRGIGRNIGEAMARRGTEAFPDLGAHCDREDCNQLDFLPFDCNGCGKVFCTEHRAYVDHGCPLAADNGRTVVVCEACGDSIERAGSDETDAQILEKHARSRRGCDPARKLKPRCPARRCKETLTFSNTSHCKECGQKLCLKHRFPEDHGCSRVSPVGAAAAARRAGDCGRDAQKTKDGGGWALPPLIRNFN

SEQ ID NO: 12051 - protein, 222 aa, Triticum aestivum
  misc_feature (1)..(222): Ceres Seq. ID no. 13661145
NILIEKHHTQRKPSHPNARKRERERERAHAAGEKQERSEGSGGTSARPWRGGARRRSRTWARTATGRTATSSTSCPSTATAAARCSARSTARTLTTAARSRPTTAAPSSSARPAATPSSAPGRTRRMRRSSRSTRGRAGAATRPGSSSRDAPRGAARRHSPSPTRATARSAGRSCASSTGSPRTTGARACRRWGPPPPRGGPATAAATRRRQRTAVGGRCRR

SEQ ID NO: 12052 - protein, 180 aa, Triticum aestivum
  misc_feature (1)..(180): Ceres Seq. ID no. 13661146
MARRGTEAFPDLGAHCDREDCNQLDFLPFDCNGCGKVFCTEHRAYVDHGCPLAADNGRTVVVCEACGDSIERAGSDETDAQILEKHARSRRGCDPARKLKPRCPARRCKETLTFSNTSHCKECGQKLCLKHRFPEDHGCSRVSPVGAAAAARRAGDCGRDAQKTKDGGGWALPPLIRNFN

SEQ ID NO: 12053 - DNA, 1088 bp, Triticum aestivum
  misc_feature (1)..(1088): Ceres Seq. ID no. 13661175
cgaaaagcacccaagttcagtctagatcgagtaggtagaagcccattgatcaacttcacttagcatttttgtccatccttgtccatggccactcaccccaatttccatgctagtgcatttgatgggtcggtgcaaaacaccgagtttaagttcagtagcttgtactggcaccacatttattctggaccaagcccaaaccaatcagttttgataggtgcagaggctaccactgggttgggccagtcagcagttaacgattggacgatttatggtggggttggctccgacgcggagctagtggcacgcgcacaaggattgcatctctacgctggtagttggcacaatacattcacccttcgtttcgagattgaaaggcttaagaaaagcacgcttcaggtaatgggagcatctgtagaggatgaaggtgagtggtctattgtcggcgggacaggtgatctcgcgatggcacgtggtgttgtagccaaaaggctgcatgagaaaacagatggtggagacatagtcgagcttaccatacatggattctgtcgcatgcaactgcccattctcaacaagaggggcccatggggtagcaagcagggttccgctgttggtttggaaaaaccctccaagattgcaagtatcaccatccattatcaagaaataattaattcgtttgaatatatttacgtcgaccaatatggcaacattggtaacacaaatatttggggcactaagagtcccaatcacgcagagatcgtgctcggccctgatgagatagtgacgggaatgtccggaactgtgatcaaacataataatctcgatgttatacagacactgatgtttaccaccagcaagaaaacatacgggccttatggaaacaccacaaatatacaaggtggtactactttcagcaccgtcgtgccaaatggccaagcaattgtcggcttcttcgggcatactgatatgaaatgcctgaacggaattggtgtctatatggcctaggttttatttgagtcatatgtggttaatttggttgttctttcaagaagaataagatgtttagggatctccggccccgttcttatgat

SEQ ID NO: 12054 - protein, 305 aa, Triticum aestivum
  misc_feature (1)..(305): Ceres Seq. ID no. 15220076
MATHPNFHASAFDGSVQNTEFKFSSLYWHHIYSGPSPNQSVLIGAEATTGLGQSAVNDWTIYGGVGSDAELVARAQGLHLYAGSWHNTFTLRFEIERLKKSTLQVMGASVEDEGEWSIVGGTGDLAMARGVVAKRLHEKTDGGDIVELTIHGFCRMQLPILNKRGPWGSKQGSAVGLEKPSKIASITIHYQEIINSFEYIYVDQYGNIGNTNIWGTKSPNHAEIVLGPDEIVTGMSGTVIKHNNLDVIQTLMFTTSKKTYGPYGNTTNIQGGTTFSTVVPNGQAIVGFFGHTDMKCLNGIGVYMA

SEQ ID NO: 12055 - protein, 200 aa, Triticum aestivum
  misc_feature (1)..(200): Ceres Seq. ID no. 15220077
MGASVEDEGEWSIVGGTGDLAMARGVVAKRLHEKTDGGDIVELTIHGFCRMQLPILNKRGPWGSKQGSAVGLEKPSKIASITIHYQEIINSFEYIYVDQYGNIGNTNIWGTKSPNHAEIVLGPDEIVTGMSGTVIKHNNLDVIQTLMFTTSKKTYGPYGNTTNIQGGTTFSTVVPNGQAIVGFFGHTDMKCLNGIGVYMA

SEQ ID NO: 12056 - protein, 179 aa, Triticum aestivum
  misc_feature (1)..(179): Ceres Seq. ID no. 15220078
MARGVVAKRLHEKTDGGDIVELTIHGFCRMQLPILNKRGPWGSKQGSAVGLEKPSKIASITIHYQEIINSFEYIYVDQYGNIGNTNIWGTKSPNHAEIVLGPDEIVTGMSGTVIKHNNLDVIQTLMFTTSKKTYGPYGNTTNIQGGTTFSTVVPNGQAIVGFFGHTDMKCLNGIGVYMA

SEQ ID NO: 12057 - DNA, 849 bp, Triticum aestivum
  misc_feature (1)..(849): Ceres Seq. ID no. 13661185
agaacatcctaatcgaaaatagattgttcctacacacgccatttgcattcttctctctcttcagctactaaccaacgaatctctctctctctctaaaacaatggctcaggaagacgtcgctgctgctgctgctgctgctaacggtgctaccacggcggtggagaagtccgttacgttcacggcgtacaagcctcagctgattgtggaagcacagaaggtcggtgacgctgttgcgttctacaaggctgtgtttggcgccgtggagactggacgctctctctaccccaagcgtaaggctgaccaagagctccctcacctcgtctcttccgagctcgagctcgccggaacaaccgtagtcgtttctgacgtatccgttaactctggccctgatgcgaagacggggactatgcctgcgatcctcgaaaccgatgacgtggaagctgccgttgcgaaggccgttgcggctggagctgtcaaggaggaggaggaggaggaggtctcggagggtggagtcaaggggaaagtgacggatccgttcgggttcacgtggatctttgttgctccggcgaagaagagtgagaaggaaggaaacaaagaggtctaactgttaaccgtcggatctgatcatttcgtcggtttctgaacgaactttttaatattattatcctatgctttttattagtttgtcttttgtggaatctccggtatgagtaaaccggattgattaggctaaaatgacttttgttcttcaccaccttttgacataaacttggtgaaagaaataacaaaaatatcggatgttaatgtcaaaaaaaaaaaaaaaaaagcttatcgataccgtcgacctyg

SEQ ID NO: 12058 - protein, 167 aa, Triticum aestivum
  misc_feature (1)..(167): Ceres Seq. ID no. 15220082
MAQEDVAAAAAAANGATTAVEKSVTFTAYKPQLIVEAQKVGDAVAFYKAVFGAVETGRSLYPKRKADQELPHLVSSELELAGTTVVVSDVSVNSGPDAKTGTMPAILETDDVEAAVAKAVAAGAVKEEEEEEVSEGGVKGKVTDPFGFTWIFVAPAKKSEKEGNKEV

SEQ ID NO: 12059 - DNA, 920 bp, Triticum aestivum
  misc_feature (1)..(920): Ceres Seq. ID no. 13661277
tcatctcaaaccaacaccactctaactcaagcttatcgttcgcatctagcctctgtttgtagtcactccatcgggtgcatctagcctctggtggtagtacattcaaattgaggaagcaaagatagatatgctgctgtcaggcggcttctcctgggtgtaccttgctctgctgttggccttgctcaccttcaactccgtcatggcggtgtaccactccaagggcgacacggccactgtcgccttcgtcgccacctcctacctcgacctggtgctgctcttctgctgcctctggctctacaacacaacggcagcggggtcggcgtggaggaaccggctcaaggcgtcagtgtggactctcaccacgctgctcaccttctccttcgcctacatggtcatgggcacggctggcctcaccctccacgtcgcgttgctcgtgtggttcatcgccgcggcgacggggattggtgccttctccgccttcttcgagcagggcagaatcaacccagctccgggtgaacccatgctgccgccaccggtgtagcccaggctctgaatcactacggggatatgcttttgtgatgcattcagacgcatggagtttgccaggttgtgagcttacgatggagttcaaatactgttgggtcgccctcgtcttgtaaatatatttaccttgaaagcatgcaagagtccttgtagaatcgttgtccttgtcccttctaggggtgcacgcttaggtgtgtatgtgtgtagtgtgcaatgtaaccggcaacgaaataatgaattgcgtggttcagtaacaagcgtgtgatctcctatgtctctgcagtcctttactattttgaatcacacgcaaggcgccaaatttccttggcgccaaatttagtattccatgcggattcgcctttattctgcgataatct

SEQ ID NO: 12060 - protein, 137 aa, Triticum aestivum
  misc_feature (1)..(137): Ceres Seq. ID no. 13661278
MLLSGGFSWVYLALLLALLTFNSVMAVYHSKGDTATVAFVATSYLDLVLLFCCLWLYNTTAAGSAWRNRLKASVWTLTTLLTFSFAYMVMGTAGLTLHVALLVWFIAAATGIGAFSAFFEQGRINPAPGEPMLPPPV

SEQ ID NO: 12061 - protein, 113 aa, Triticum aestivum
  misc_feature (1)..(113): Ceres Seq. ID no. 13661279
MAVYHSKGDTATVAFVATSYLDLVLLFCCLWLYNTTAAGSAWRNRLKASVWTLTTLLTFSFAYMVMGTAGLTLHVALLVWFIAAATGIGAFSAFFEQGRINPAPGEPMLPPPV

SEQ ID NO: 12062 - DNA, 762 bp, Triticum aestivum
  misc_feature (1)..(762): Ceres Seq. ID no. 13661295
ctctcagccccagcgaccaaatccgccaccgcgccgccgccgccggcaaggaaggaagagagccccgcagcgcgcgatgaacaccgacatcaccgcgtcggtgaagccggagtacccggtggtggaccggaaccccgccttcaccaaagtcgtcgccaacttctccacgctcgactacctccgcctctccaccatctccgccgtctccgtcaccgtcggctacctctccggtttgctgctagatgaccttcttggtgctgaaacaacaagcagctgcagctgctgctacatgcaagctggaggagcacctggcatatttgcttacaatgatgaacaaacagggcaaatgactacagaaacaactgcggatggagaagtggttcttggaaccccagttgcttctcctgttagataatggggatgtgcatactgatatcagccctgagaatgctgtggtccagggacagagaagatcgagcaaatgtgttgattacttggttgaagcatctgctgcagaggttggggcgatcactgctactttagctgctataaaggcgacacaagttaaaggggcctggctacatggtgatggtgaggaacggcaaagaaatctatgcatgaggtttattttgaatttccagtgtctttgagaaggattaaacttgtctgtcgttgcaccgttacctggtactagcatgcatggtgatctgtattttatgtaagctgttgttaaccagaagcagtaagctggttctgccttca

SEQ ID NO: 12063 - protein, 137 aa, Triticum aestivum
  misc_feature (1)..(137): Ceres Seq. ID no. 13661296
SQPQRPNPPPRRRRRQGRKRAPQRAMNTDITASVKPEYPVVDRNPAFTKVVANFSTLDYLRLSTISAVSVTVGYLSGLLLDDLLGAETTSSCSCCYMQAGGAPGIFAYNDEQTGQMTTETTADGEVVLGTPVASPVR

SEQ ID NO: 12064 - protein, 112 aa, Triticum aestivum
  misc_feature (1)..(112): Ceres Seq. ID no. 13661297
MNTDITASVKPEYPVVDRNPAFTKVVANFSTLDYLRLSTISAVSVTVGYLSGLLLDDLLGAETTSSCSCCYMQAGGAPGIFAYNDEQTGQMTTETTADGEVVLGTPVASPVR

SEQ ID NO: 12065 - protein, 93 aa, Triticum aestivum
  misc_feature (1)..(93): Ceres Seq. ID no. 13661298
MEKWFLEPQLLLLLDNGDVHTDISPENAVVQGQRRSSKCVDYLVEASAAEVGAITATLAAIKATQVKGAWLHGDGEERQRNLCMRFILNFQCL

SEQ ID NO: 12066 - DNA, 911 bp, Triticum aestivum
  misc_feature (1)..(911): Ceres Seq. ID no. 13661323
aaaacttcacctgtacacatagttatatagatatttactccggccatgattctgaaggtcctcacgctgggcgcgctcctcggctgccttgcctatggtaccaatggctgggagccagtgtgcggcgagaaggctggccgcatggagtgccccgacaacaagtgctgcagcaaggatgggcagtgtggcctaggccccgacttctgcggcgagggttgccaaagcggcgcctgctgcgtgagcttgcgctgtggctcgcagaacgacggcaagacgtgccccaacaaccagtgttgtggccaagacggggtatgcgggttcggcaacgagtactgcggctctggctgccagagcggcgcgtgctcgcagggcatgcaatgcggcagccacaggccatgccccgggaacttgtgctgcagccacgcaggttggtgcggtcttggccctcccttctgcgggactgggtgccagagcggagcctgttgcagctcggaccttaagccgtgcggcaacaggggctgtggccgagtgtgcgacaacaatctgtgttgcggcagggatggctactgcggtgacggcaagccctactgcggtggcggctgccagggcggtccatgctcctgcgccgctgccggcggcggtttcagctccactctactacggggactaggtgagtcatgatgagctcagcgtcgcctgcaatgttgcgccatggatggaagcactagatttgcaacgacgccaaataatatatggtagtaccagtttacattatcattactgccaaggtgtcggcgttttgatttcccacttttagttctctctccttgcaccatgtgaggttataatgggatcatatttataagtcgccagaattttatttttagtgtaaagtcacttttattgtgtgt

SEQ ID NO: 12067 - protein, 211 aa, Triticum aestivum
  misc_feature (1)..(211): Ceres Seq. ID no. 13661324
MILKVLTLGALLGCLAYGTNGWEPVCGEKAGRMECPDNKCCSKDGQCGLGPDFCGEGCQSGACCVSLRCGSQNDGKTCPNNQCCGQDGVCGFGNEYCGSGCQSGACSQGMQCGSHRPCPGNLCCSHAGWCGLGPPFCGTGCQSGACCSSDLKPCGNRGCGRVCDNNLCCGRDGYCGDGKPYCGGGCQGGPCSCAAAGGGFSSTLLRGLGES

SEQ ID NO: 12068 - protein, 179 aa, Triticum aestivum
  misc_feature (1)..(179): Ceres Seq. ID no. 13661325
MECPDNKCCSKDGQCGLGPDFCGEGCQSGACCVSLRCGSQNDGKTCPNNQCCGQDGVCGFGNEYCGSGCQSGACSQGMQCGSHRPCPGNLCCSHAGWCGLGPPFCGTGCQSGACCSSDLKPCGNRGCGRVCDNNLCCGRDGYCGDGKPYCGGGCQGGPCSCAAAGGGFSSTLLRGLGES

SEQ ID NO: 12069 - protein, 165 aa, Triticum aestivum
  misc_feature (1)..(165): Ceres Seq. ID no. 13661326
NFTCTHSYIDIYSGHDSEGPHAGRAPRLPCLWYQWLGASVRREGWPHGVPRQQVLQQGWAVWPRPRLLRRGLPKRRLLRELALWLAERRQDVPQQPVLWPRRGMRVRQRVLRLWLPERRVLAGHAMRQPQAMPRELVLQPRRLVRSWPSLLRDWVPERSLLQLGP

SEQ ID NO: 12070 - DNA, 1066 bp, Triticum aestivum
  misc_feature (1)..(1066): Ceres Seq. ID no. 13661330
gccgaatcacttcactaatcttgcgtccctcttccagctgcagctctgtccaagcgatcgatcgtccgctgtctgtccaacgagctctttctagctcgatcgaggcacgccattgccatggaagccgcacggatcgcgtcctttctgctcctcctcggggtcgtttggtcacgcgcacagcccggcgccgaggcggccggcacgacggtcttcacactgcgcaacaactgcaccttcacgatctggccggccacattgtccggcaacagcgccgtcgccgtcgggggcggcggcttcgagctcgcgccgggcgccaacgtgtcgttccccggcccgacgggctggtccggccggctctgggcgcgcaccggctgcgtcgccgccgcctccggcgcgtccctcgcctgcgccacgggcgactgcggcggcgccgtgcgctgcaccctgggcggggcgccccccgtcacgctcgccgagttcaccctcgggggcgcggacggcaaggacttctacgacgtgagcctggtggacgggtacaacgtcggcatcggcgtggcggccacgggcgccagggtgaactcctcgacatgcggctacgccgggtgcgtgggcgacgtgaacgcgctgtgccccgcggagctgcaggtggccggcaaggaaggggaccaggaggggaagacggtggcgtgccggagcgcgtgcgaggcgttcgggacggccgagtactgctgcacgggcgcgcacggcgggccgaacagctgcgggccgaccaagtactcgaggctgttcaaggcggcatgccccgccgcgtacagctacgcctacgacgatcccaccagcaccttcacctgcggcgccggagcgcagtacctcatcaccttttgcccggcgcagcagtagtccggcccttcgattttggctagtagtgtcgttcattcatcgttatggtgtctcgattttggttagtactatcgttcatccgaattaccagatgtttattggtttggtcgtgtcaatatgtatgcttttgattcattcatttcaaaaaaaaaagaaatatgctttt

SEQ ID NO: 12071 - protein, 306 aa, Triticum aestivum
  misc_feature (1)..(306): Ceres Seq. ID no. 13661331
RITSLILRPSSSCSSVQAIDRPLSVQRALSSSIEARHCHGSRTDRVLSAPPRGRLVTRTARRRGGRHDGLHTAQQLHLHDLAGHIVRQQRRRRRGRRLRARAGRQRVVPRPDGLVRPALGAHRLRRRRLRRVPRLRHGRLRRRRALHPGRGAPRHARRVHPRGRGRQGLLRREPGGRVQRRHRRGGHGRQGELLDMRLRRVRGRRERAVPRGAAGGRQGRGPGGEDGGVPERVRGVRDGRVLLHGRARRAEQLRADQVLEAVQGGMPRRVQLRLRRSHQHLHLRRRSAVPHHLLPGAAVVRPFDFG

SEQ ID NO: 12072 - protein, 260 aa, Triticum aestivum
  misc_feature (1)..(260): Ceres Seq. ID no. 13661332
MEAARIASFLLLLGVVWSRAQPGAEAAGTTVFTLRNNCTFTIWPATLSGNSAVAVGGGGFELAPGANVSFPGPTGWSGRLWARTGCVAAASGASLACATGDCGGAVRCTLGGAPPVTLAEFTLGGADGKDFYDVSLVDGYNVGIGVAATGARVNSSTCGYAGCVGDVNALCPAELQVAGKEGDQEGKTVACRSACEAFGTAEYCCTGAHGGPNSCGPTKYSRLFKAACPAAYSYAYDDPTSTFTCGAGAQYLITFCPAQQ

SEQ ID NO: 12073 - DNA, 608 bp, Triticum aestivum
  misc_feature (1)..(608): Ceres Seq. ID no. 13661369
acaatgaagaagttgttctaccatggtgtgcgatgtgctatccggaaccagggaggttgcaggaattgtgtcttcatgtggagacttctgctcactcactcaaaacagtgtgatcacggggactgctcagttcccagatgcagagatctgaaggtattcatgggcaaggccaaaatggttactgctggaccctgttgtgccatggaatgctagcggatcagaaattaaccccctaggttttctcgagcagaagatttgttgatgaaaatgcaataaatttgttgttggctaaccggattgcaagttgcgaaataaataaaacggcgacctggtggcgacggcagcagcagcagagttatttgtttcgccggttttcctgaaacttgtgggaagaaggcggaggcttacatagacagacatcctgacaaatgtagtggtgtaggtgcaatacctgtatatgtttcctgcaggccatagatgatggatcgacaggatataggattattttgtttcttatttattttacccccctctcccccttgaccccattgagttgaacaaggccgcagttttgctcagccctgttaatccaggtccagttaatgtgc

SEQ ID NO: 12074 - protein, 70 aa, Triticum aestivum
  misc_feature (1)..(70): Ceres Seq. ID no. 15218806
TMKKLFYHGVRCAIRNQGGCRNCVFMWRLLLTHSKQCDHGDCSVPRCRDLKVFMGKAKMVTAGPCCAMEC

SEQ ID NO: 12075 - protein, 69 aa, Triticum aestivum
  misc_feature (1)..(69): Ceres Seq. ID no. 15218807
MKKLFYHGVRCAIRNQGGCRNCVFMWRLLLTHSKQCDHGDCSVPRCRDLKVFMGKAKMVTAGPCCAMEC

SEQ ID NO: 12076 - protein, 45 aa, Triticum aestivum
  misc_feature (1)..(45): Ceres Seq. ID no. 15218808
MWRLLLTHSKQCDHGDCSVPRCRDLKVFMGKAKMVTAGPCCAMEC

SEQ ID NO: 12077 - DNA, 1137 bp, Triticum aestivum
  misc_feature (1)..(1137): Ceres Seq. ID no. 13661426
cctttcgatttcttcgcttgtggcgagtcacagcgttccaatttcccagcacttaactcgcccgacctacccaccaaccaccccgcgtcgagactgaccagactgaattgatcgataataaatcagcacgctgcacgcgctgggggtctgagtcagaggaggaagaagatcgaggagcagctgattcgttcgcacaaagcgccgggatcagatccatctctccgcgcgggatgtctgaggtggcggcgatggcggggcaggcgtacatgagacagctctccaagcaccctctccgcaccaaggccatcacctccggggtgctggcgggctgcagcgacgccgtcgcccagaagatctccggcgtcaagaggctccagctcaggaggctcctcctcataatgctctatggatttgcatacgcaggaccattcggtcattttttccacaagcttatggacaagattttcaagggacagaagaaaggaaaagaaactacagccaagaaggtcatagtggagcagctaactgtatcaccatggaacaatatgatgttcatgatgtactacggtctggtagttgaagggaggccattcgggcaagtaaagagcaaggtcaagaaggactttgcaaacatccaattgacagcttggaagttctggccaatagttagctggatcaactatgagtacatgccactccagctccgagttcttttcgccagctccgttgcatcatgctgggcagtgtttctgaacctgaaagcagcaagatccattgccggcgctagtaagaatgcatagaagaaggttggaaggaaggggctagtgctacattgtatttctagctaattaagtatccactagcgattttctcagttcatttttatcgctcagtttgtatttatgtttctatttgaaccccttgagcatcgagaacctagagttaatgtttcaactaagtatgccagtatgtcaatgtgaagagtccctttcttgccaccgggaaaaaaaccctacaaagcaaaaattatcctctacaaggtaccatgtttgttattcctttgggaggaaaatagggactttactgggatctgacgcgtggaaataaatgaacatgctctgaggtttgtagaagctc

SEQ ID NO: 12078 - protein, 189 aa, Triticum aestivum
  misc_feature (1)..(189): Ceres Seq. ID no. 13661427
MSEVAAMAGQAYMRQLSKHPLRTKAITSGVLAGCSDAVAQKISGVKRLQLRRLLLIMLYGFAYAGPFGHFFHKLMDKIFKGQKKGKETTAKKVIVEQLTVSPWNNMMFMMYYGLVVEGRPFGQVKSKVKKDFANIQLTAWKFWPIVSWINYEYMPLQLRVLFASSVASCWAVFLNLKAARSIAGASKNA

SEQ ID NO: 12079 - protein, 183 aa, Triticum aestivum
  misc_feature (1)..(183): Ceres Seq. ID no. 13661428
MAGQAYMRQLSKHPLRTKAITSGVLAGCSDAVAQKISGVKRLQLRRLLLIMLYGFAYAGPFGHFFHKLMDKIFKGQKKGKETTAKKVIVEQLTVSPWNNMMFMMYYGLVVEGRPFGQVKSKVKKDFANIQLTAWKFWPIVSWINYEYMPLQLRVLFASSVASCWAVFLNLKAARSIAGASKNA

SEQ ID NO: 12080 - protein, 177 aa, Triticum aestivum
  misc_feature (1)..(177): Ceres Seq. ID no. 13661429
MRQLSKHPLRTKAITSGVLAGCSDAVAQKISGVKRLQLRRLLLIMLYGFAYAGPFGHFFHKLMDKIFKGQKKGKETTAKKVIVEQLTVSPWNNMMFMMYYGLVVEGRPFGQVKSKVKKDFANIQLTAWKFWPIVSWINYEYMPLQLRVLFASSVASCWAVFLNLKAARSIAGASKNA

SEQ ID NO: 12081 - DNA, 981 bp, Triticum aestivum
  misc_feature (1)..(981): Ceres Seq. ID no. 13661434
agaacatcctaatcgaaaaactaccagcaggtccagcgccaccatcgccctacccctacgcccccacagcaacacgagaaaaccaccgcaagcacgcgccccgctccgccccgagacgcgacggtggaatccggcaggcacgggcacgagcaggcgtgcggacacatagcccgagcgcgcgcgatggcagtcggagggcggcgcgcggcggcggcggcgtgcgggcgctggtgcctggtgatcctcgccgtggcctccgcgctcggcgtctccgggcccgcgctctactggcgctacaagaagggcttctcctcccccgcctccggcgctgccgccgtctccgcaccctcctgcccgccctgcacctgcgactgcccgccgccgctctccctccagtccatcgcgccagggctcatgaacttctcaatttcagcttgcggcacaaatgaccctgagcgtaccaaggagatggcgaagcagtttgttgatctcctcaacgaggaactcaagctgcagcaggttgtagctgaggagcacatccatcacatgaatgccacacttgtcgaggcaaaaaggcaggctaccctgtaccagcgagaggcggagaagtgtaacgcggccacagagacttgtgaggaagccagggagaagtctgagggggcaatctcaaaggagaggaaactgacagcactgtgggaacgtcgagctcgcgaattgggttggcaggattctcgagccgcgaccaccgcacgatagcttggcaagcagtttgcttctgcaggtaaaagtatttgcagcaggcggcattttaccacaccgagcaatgttagctgtatgggtccacgtgtaatgtttgccagtgtatgactatgagttgtcccagttgaagtatagttactctagacactgtagattccttataaatgtaactagtatacattgtttaaatatgcaagctttatattgaagacaaaaaaaaaa

SEQ ID NO: 12082 - protein, 190 aa, Triticum aestivum
  misc_feature (1)..(190): Ceres Seq. ID no. 13661435
MAVGGRRAAAAACGRWCLVILAVASALGVSGPALYWRYKKGFSSPASGAAAVSAPSCPPCTCDCPPPLSLQSIAPGLMNFSISACGTNDPERTKEMAKQFVDLLNEELKLQQVVAEEHIHHMNATLVEAKRQATLYQREAEKCNAATETCEEAREKSEGAISKERKLTALWERRARELGWQDSRAATTAR

SEQ ID NO: 12083 - protein, 148 aa, Triticum aestivum
  misc_feature (1)..(148): Ceres Seq. ID no. 13661436
NILIEKLPAGPAPPSPYPYAPTATRENHRKHAPRSAPRRDGGIRQARARAGVRTHSPSARDGSRRAARGGGGVRALVPGDPRRGLRARRLRARALLALQEGLLLPRLRRCRRLRTLLPALHLRLPAAALPPVHRARAHELLNFSLRHK

SEQ ID NO: 12084 - protein, 113 aa, Triticum aestivum
  misc_feature (1)..(113): Ceres Seq. ID no. 13661437
MNFSISACGTNDPERTKEMAKQFVDLLNEELKLQQVVAEEHIHHMNATLVEAKRQATLYQREAEKCNAATETCEEAREKSEGAISKERKLTALWERRARELGWQDSRAATTAR

SEQ ID NO: 12085 - DNA, 799 bp, Triticum aestivum
  misc_feature (1)..(799): Ceres Seq. ID no. 13661453
ctagaacatcctaatcgaaaaaacacccgactgagtgagagagcgctagcgaccggataaggtttcgcctaccagctgccaacggccagcctcgacgccggcgggggctggtccgaccacgcgcctctccgcctcccgtcgcagcctctctcccccgagtttcccttctgcccaagctgcaccttgctagcaaggatactgcgcactccgatctataatatcagctctctatagcgaccgtcgctgtcgcccacctttcgccctgtaggcaagaacaagacggcatggcttgtgacgagtgccgcggtccgaaccataaacagaaagattgccccacactaccctgtcacaactgtgggggaactcttcacacccgaggcacttgctgttacacggatcctgtttaccgcgttggagaaagatgtcccagatgtggtggttttcaacacggggtacccggcaagcccccctgcccagtccaagaagctcatgctcgcccgcctatgtgcccgcggtgtcaagtgccacatcgtccaagagactgccctcatcgtggagccgaatattccgggtggacaagctccgacagatgcacgcaatgcaatgaaactggtcattttttccccgactgccctaacaaatactagtactagtttctctgtatcttgttattgtagctcgtaagtttgtttgagtatttttcaagactattagcttagtggtttgcccattgttgatgtatattattaagcctgaaagcacttcaattctcagtatcttttaatatatagtattattt

SEQ ID NO: 12086 - protein, 120 aa, Triticum aestivum
  misc_feature (1)..(120): Ceres Seq. ID no. 13661454
MACDECRGPNHKQKDCPTLPCHNCGGTLHTRGTCCYTDPVYRVGERCPRCGGFQHGVPGKPPCPVQEAHARPPMCPRCQVPHRPRDCPHRGAEYSGWTSSDRCTQCNETGHFFPDCPNKY

SEQ ID NO: 12087 - protein, 64 aa, Triticum aestivum
  misc_feature (1)..(64): Ceres Seq. ID no. 13661455
MLARLCARGVKCHIVQETALIVEPNIPGGQAPTDARNAMKLVIFSPTALTNTSTSFSVSCYCSS

SEQ ID NO: 12088 - protein, 61 aa, Triticum aestivum
  misc_feature (1)..(61): Ceres Seq. ID no. 13661456
MSQMWWFSTRGTRQAPLPSPRSSCSPAYVPAVSSATSSKRLPSSWSRIFRVDKLRQMHAMQ

SEQ ID NO: 12089 - DNA, 793 bp, Triticum aestivum
  misc_feature (1)..(793): Ceres Seq. ID no. 13661474
aatcgaaaacttctgattgggatcctaattatagtgatgagtcactattgcaagaagacaattcattgtcagctgatttaagcagcaaccttcatcttagggatgcaacttgtcagccaggcggatctgcgagatcaacccgtgcccaaagccacaactttgcaagctcaaaccctttaccgacaagccaaagctatggagcaggtcaacaactgcactcaggctcgcatgggaggggcacccgtcctactgttccaatcagttacggtggtttcaaccctccgaattatcctcagcaaagtctccggggtcgccatggacatcaatttctacaaccgagatacaaccagccaactaacagtcacatgcggccaccgatggggagtcaccaaagtgggcagcctgcatggcctccctatggcatgggcgagggagtgccctggggaggaacaggcgtgcatccgtttacgacgggcgggctaccctcgtcccttcccagaaaagattatgggagcatattttagtgtggactcggaggaatgccattcattgccgggataaattatttgtactggcgaaaccggagttgcaatggttctggctattggttttctttttctttcctgcaatgttgctgcatttgcgttgctccattgggtccctgattgtgaagacagtcttgaactctatgatatataatagaatcgatcgttacagcctttaaaaaaaaaaaaaaaaaaaaaaaaaaaaaaaaataaaaaaaaaaaaaaaaaagcttatcgataccgtcgac

SEQ ID NO: 12090 - protein, 173 aa, Triticum aestivum
  misc_feature (1)..(173): Ceres Seq. ID no. 13661475
SKTSDWDPNYSDESLLQEDNSLSADLSSNLHLRDATCQPGGSARSTRAQSHNFASSNPLPTSQSYGAGQQLHSGSHGRGTRPTVPISYGGFNPPNYPQQSLRGRHGHQFLQPRYNQPTNSHMRPPMGSHQSGQPAWPPYGMGEGVPWGGTGVHPFTTGGLPSSLPRKDYGSIF

SEQ ID NO: 12091 - protein, 152 aa, Triticum aestivum
  misc_feature (1)..(152): Ceres Seq. ID no. 13661476
MQLVSQADLRDQPVPKATTLQAQTLYRQAKAMEQVNNCTQARMGGAPVLLFQSVTVVSTLRIILSKVSGVAMDINFYNRDTTSQLTVTCGHRWGVTKVGSLHGLPMAWARECPGEEQACIRLRRAGYPRPFPEKIMGAYFSVDSEECHSLPG

SEQ ID NO: 12092 - protein, 121 aa, Triticum aestivum
  misc_feature (1)..(121): Ceres Seq. ID no. 13661477
MEQVNNCTQARMGGAPVLLFQSVTVVSTLRIILSKVSGVAMDINFYNRDTTSQLTVTCGHRWGVTKVGSLHGLPMAWARECPGEEQACIRLRRAGYPRPFPEKIMGAYFSVDSEECHSLPG

SEQ ID NO: 12093 - DNA, 555 bp, Triticum aestivum
  misc_feature (1)..(555): Ceres Seq. ID no. 13661526
aacagccagccagcacaagctcaacgagccacgctagcgtttgagagaacaaaaacagtccaccgacgtacgatggcgccgagcaccttcccgctcgcgctcctggccgtgtccctcgttctcctggtggtcggcggcctcgggccggcggcggaggcacagccgccggggaggtgcgtgccgcagctgaaccggctgctggcgtgccgcgcgtacctggtgcccggcgcggccgaccccagcgccgactgctgcagcgcgctgaactccatctcgcgcgactgcgcgtgcagcaccatgggcatcatcaacagcctcccctcccgctgcaacatcggacaagtcaactgctcggcttgaggcggaacgaagaaacgatgcgagtcacagagtgactaataatgaaggtggtcatttctgccgttgttgcggcatgtctgcctcttcgccgccgtcttagttttcgtttgtccagtctgtcgtgtcctgctgctgctgtcgatctcgacacgttaataaaatggacgatttgaggcacggcctctcactttaacc

SEQ ID NO: 12094 - protein, 119 aa, Triticum aestivum
  misc_feature (1)..(119): Ceres Seq. ID no. 13661527
NSQPAQAQRATLAFERTKTVHRRTMAPSTFPLALLAVSLVLLVVGGLGPAAEAQPPGRCVPQLNRLLACRAYLVPGAADPSADCCSALNSISRDCACSTMGIINSLPSRCNIGQVNCSA

SEQ ID NO: 12095 - protein, 95 aa, Triticum aestivum
  misc_feature (1)..(95): Ceres Seq. ID no. 13661528
MAPSTFPLALLAVSLVLLVVGGLGPAAEAQPPGRCVPQLNRLLACRAYLVPGAADPSADCCSALNSISRDCACSTMGIINSLPSRCNIGQVNCSA

SEQ ID NO: 12096 - DNA, 1002 bp, Triticum aestivum
  misc_feature (1)..(1002): Ceres Seq. ID no. 13661565
gaaactaaaaacattaatcttcaatacttgtctaaacaagaaaggagtgaactacaaaaacctcacatgctgctcacacaaccatcttaagataactaatgaaagtttaaaatttacaatgcaccatcaggataaagagttgaatccatttcattgagattaaaccaaagaaatattttaacatatctagtagtcatccaaaatctcatcttcctcttctttaccttcagcctctttcttctcaacttcattctcctcagcctcatcatcatcagcttgcttctcctcagcctcatcatcagcttgcttctcttcagcatcatcagcttccttctcctgctcattctcttcctcatcatcatcgttgctgctctccagtgacttgttgtattcagcctttagttcagcagctttctccaaataaactttcttctcttcctcatccaaagacttccacttttcaccaccctgctttgcaacatccttaacgccagcgtcaggattctcttctttgaaagttttgcggaaatcagccatgaagatgaagaaggctgtaagaggtcgcttgggcttgttggaggaagagctcttcttcttattctcatccttggacttcctgagtctctttgccttaggttcatcagatgttgacttcttcctctcagcaggtttcttcttagcctcggtttgtgtctcaacaacttgtgcttcgagattgactcgaattttagcgtcgaggctgcaattgtgcatactgataagcgcaacagctacgttcttgttgcatccttcacatttagcaaaggcgctgccatctttagcgcgaagcaaggtgttgatgttgttgttggtggttgtttcgggtttggattcagcttcaaccctcttcctcggtttgggtgcagttgatttcgacgatccacgaccaccggccatctctttcttttttttctagatctgaaggagagaatataatcttttttgttgagattgaggatcgat

SEQ ID NO: 12097 - protein, 139 aa, Triticum aestivum
  misc_feature (1)..(139): Ceres Seq. ID no. 13661566
MKMKKAVRGRLGLLEEELFFLFSSLDFLSLFALGSSDVDFFLSAGFFLASVCVSTTCASRLTRILASRLQLCILISATATFLLHPSHLAKALPSLARSKVLMLLLVVVSGLDSASTLFLGLGAVDFDDPRPPAISFFFF

SEQ ID NO: 12098 - protein, 137 aa, Triticum aestivum
  misc_feature (1)..(137): Ceres Seq. ID no. 13661567
MKKAVRGRLGLLEEELFFLFSSLDFLSLFALGSSDVDFFLSAGFFLASVCVSTTCASRLTRILASRLQLCILISATATFLLHPSHLAKALPSLARSKVLMLLLVVVSGLDSASTLFLGLGAVDFDDPRPPAISFFFF

SEQ ID NO: 12099 - DNA, 765 bp, Triticum aestivum
  misc_feature (1)..(765): Ceres Seq. ID no. 13661569
caacgccacatacgtgacttgactcaagttgagcacactttgtgatggaggcatggagccaaccagatcaccactagttttgctcgtggcgcaagccgtactcgctgcggcgatgctgcaacaaccatcagaagggagggtgcaggcagtggcgccatcagcgccacatctcgccggaggcaaagaagctgaagtagcagccgctacctcctcgccggcttcaccattcaccggcgacacgccattagttttgctcgtggcgtacgccgtactcgcggaggcgatgctgcaaccatcagagacgagggtacaggcggctacctcctcgccttcttcacagttcaccggtgacccgccacggccctccctcccgggcttgccgcctctacctggcttgcccgcgttaccgccgtcgccgggcttcccgggcatggcaggcgcgcagtcgtctccttcgccttcgcagcagccggccaaaacatgcttggagccgctgatacttgcggaaccgtgcgtcagttacctgacgaactccagcgtgccggcgccgccgagaacgtgctgcgacggcttcaggtcgctcgtcggcggcggcgacaggatttgcctgtgccacgccatcatgggcgacctgggtacatttgcaggcgggacgatagaccagcacgtcgccggagcttcttctgatgtgcatcggcaagtctgaatcgttgtttgttttgttttattaactgtatgaacttacgagatgaactgtcatgtgtt

SEQ ID NO: 12100 - protein, 217 aa, Triticum aestivum
  misc_feature (1)..(217): Ceres Seq. ID no. 13661570
MEPTRSPLVLLVAQAVLAAAMLQQPSEGRVQAVAPSAPHLAGGKEAEVAAATSSPASPFTGDTPLVLLVAYAVLAEAMLQPSETRVQAATSSPSSQFTGDPPRPSLPGLPPLPGLPALPPSPGFPGMAGAQSSPSPSQQPAKTCLEPLILAEPCVSYLTNSSVPAPPRTCCDGFRSLVGGGDRICLCHAIMGDLGTFAGGTIDQHVAGASSDVHRQV

SEQ ID NO: 12101 - protein, 197 aa, Triticum aestivum
  misc_feature (1)..(197): Ceres Seq. ID no. 13661571
MLQQPSEGRVQAVAPSAPHLAGGKEAEVAAATSSPASPFTGDTPLVLLVAYAVLAEAMLQPSETRVQAATSSPSSQFTGDPPRPSLPGLPPLPGLPALPPSPGFPGMAGAQSSPSPSQQPAKTCLEPLILAEPCVSYLTNSSVPAPPRTCCDGFRSLVGGGDRICLCHAIMGDLGTFAGGTIDQHVAGASSDVHRQV

SEQ ID NO: 12102 - protein, 140 aa, Triticum aestivum
  misc_feature (1)..(140): Ceres Seq. ID no. 13661572
MLQPSETRVQAATSSPSSQFTGDPPRPSLPGLPPLPGLPALPPSPGFPGMAGAQSSPSPSQQPAKTCLEPLILAEPCVSYLTNSSVPAPPRTCCDGFRSLVGGGDRICLCHAIMGDLGTFAGGTIDQHVAGASSDVHRQV

SEQ ID NO: 12103 - DNA, 521 bp, Triticum aestivum
  misc_feature (1)..(521): Ceres Seq. ID no. 13661576
catggacgacatacactacaacaacgcctacttcgcgcgggtgggcggcgtggaggtgcgggagatgaacggcctcgaattagagttcctcttcgcgctgcgcttccgcctcaacgtcacgcccgacgacttcgcatcctactgcgccgcgctcgagggcgagatgatggccaccaccacgccgccgccgctgtctccgccggcggtcatggtctcggtctcggtctcgccggaggaggaggaagaagcggccgtcgcgggaggcggcatcatcacggccttcgcggcggctgctcgggtatctgtggccgagatcacccaatgacacggagacaacgtacgagcgagcccgcctccgtgcgtggagggcaaaatgggcaatgcctgtgttacgattctttcatttatttttcattttttatactagcttcttggtggggtgtgtaccaggttcgttgtcaattgaatgtgtacatttctatctttttgagctatcgatgaataacttgttttcggatggc

SEQ ID NO: 12104 - protein, 166 aa, Triticum aestivum
  misc_feature (1)..(166): Ceres Seq. ID no. 13661577
HGRHTLQQRLLRAGGRRGGAGDERPRIRVPLRAALPPQRHARRLRILLRRARGRDDGHHHAAAAVSAGGHGLGLGLAGGGGRSGRRGRRHHHGLRGGCSGICGRDHPMTRRQRTSEPASVRGGQNGQCLCYDSFIYFSFFILASWWGVYQVRCQLNVYISIFLSYR

SEQ ID NO: 12105 - protein, 107 aa, Triticum aestivum
  misc_feature (1)..(107): Ceres Seq. ID no. 13661578
MDDIHYNNAYFARVGGVEVREMNGLELEFLFALRFRLNVTPDDFASYCAALEGEMMATTTPPPLSPPAVMVSVSVSPEEEEEAAVAGGGIITAFAAAARVSVAEITQ

SEQ ID NO: 12106 - protein, 86 aa, Triticum aestivum
  misc_feature (1)..(86): Ceres Seq. ID no. 13661579
MNGLELEFLFALRFRLNVTPDDFASYCAALEGEMMATTTPPPLSPPAVMVSVSVSPEEEEEAAVAGGGIITAFAAAARVSVAEITQ

SEQ ID NO: 12107 - DNA, 652 bp, Triticum aestivum
  misc_feature (1)..(652): Ceres Seq. ID no. 13661621
agaaaagaaggacttgttccagagccaggaggaggaaatccaaccccgccgccgccgccatgagcgccatgaagttctgccgcgagtgcaacaacatcctgtaccccaaggaggagaaggagcggaaactcctcctcttcgcctgccgcaactgcgagcaccaggaggtggccggcgacaactgcgtctaccgcaacatcgtgcaccacgaggccggggagcgcacgcaggtcctgcaggacgtggcctccgaccccaccctgccccgcaccaaggacgtccgctgcgccgcctgcggccacggcgaggccgtcttcttccaggctacagcaagaggggaggaggggatgactctcttcttcgtgtgctgcaacccctcctgcggcaaccggtggagggagtgaacgatccgcatctcctgcctgcggaggccaccgtcgacccgtgccctttaggccttaattgatcgtgctctggaatttagcttccgatagcttagccgtcttgtcagagcacaagagagctcaacttgtgaaacatataattgtggtttcagtacttgcccgtgaccatgtacttaatttacaaacccttatatgtctctagtgagactaatctcattttataggttggttcttgcctatccactgtt

SEQ ID NO: 12108 - protein, 154 aa, Triticum aestivum
  misc_feature (1)..(154): Ceres Seq. ID no. 13661622
EKKDLFQSQEEEIQPRRRRHERHEVLPRVQQHPVPQGGEGAETPPLRLPQLRAPGGGRRQLRLPQHRAPRGRGAHAGPAGRGLRPHPAPHQGRPLRRLRPRRGRLLPGYSKRGGGDDSLLRVLQPLLRQPVEGVNDPHLLPAEATVDPCPLGLN

SEQ ID NO: 12109 - protein, 133 aa, Triticum aestivum
  misc_feature (1)..(133): Ceres Seq. ID no. 13661623
KRRTCSRARRRKSNPAAAAMSAMKFCRECNNILYPKEEKERKLLLFACRNCEHQEVAGDNCVYRNIVHHEAGERTQVLQDVASDPTLPRTKDVRCAACGHGEAVFFQATARGEEGMTLFFVCCNPSCGNRWRE

SEQ ID NO: 12110 - protein, 114 aa, Triticum aestivum
  misc_feature (1)..(114): Ceres Seq. ID no. 13661624
MSAMKFCRECNNILYPKEEKERKLLLFACRNCEHQEVAGDNCVYRNIVHHEAGERTQVLQDVASDPTLPRTKDVRCAACGHGEAVFFQATARGEEGMTLFFVCCNPSCGNRWRE

SEQ ID NO: 12111 - DNA, 902 bp, Triticum aestivum
  misc_feature (1)..(902): Ceres Seq. ID no. 13661642
aacaaaaaacactttaaaatccaaaaagaaagaaagagaaattaaacatcttatccaaaatcaagactctgttttcgtttcattcgatggatccattttacacttctttttcagattccttcctctcgatccccgaccacaggtctcctgtttctgacagtagtgagtgttctccaaagctagcttcgagctgtccgaagaaactagcagggagaaagaagtttcgtgagacacgtcatccgatttacagaggagttcgtcagagaaactcagggaaatgggtttgtgaagttagggagcctaataagaagtcgaggatttggttagggacttttccgacagtcgaaatggccgctcgtgctcacgacgtcgccgctttagcccttcgtggccgctccgcttgtcttaatttcgccgactcggcttggcgtctacggattcctgagtctacttgtcctaaagaaattcagagagctgcggctgaagctgcaatggcgtttcagaacaagacggctacgactgagacgactatggttgaggcagtgaaaccggcagaggagacggttgggcaaacgggtggggagaccatggaagagaacggtgtgttttatatggccgaagaagcggttttggggatgccaaggtttcttgagaatatgggggaggagatgctcttgccgccgccggaacttggatggaatcataacgacttggccggagatgctgacgtgtcactctggagtttttagaatttgaatcttctcttattattcagattttgtaagattttttgaatttctaggattggtcaaaagttcaactacctactttttattggtagactggtagtacgatacggaaagagaatggagatatacaaatctaataaattctatattact

SEQ ID NO: 12112 - protein, 220 aa, Triticum aestivum
  misc_feature (1)..(220): Ceres Seq. ID no. 13661643
MDPFYTSFSDSFLSIPDHRSPVSDSSECSPKLASSCPKKLAGRKKFRETRHPIYRGVRQRNSGKWVCEVREPNKKSRIWLGTFPTVEMAARAHDVAALALRGRSACLNFADSAWRLRIPESTCPKEIQRAAAEAAMAFQNKTATTETTMVEAVKPAEETVGQTGGETMEENGVFYMAEEAVLGMPRFLENMGEEMLLPPPELGWNHNDLAGDADVSLWSF

SEQ ID NO: 12113 - protein, 133 aa, Triticum aestivum
  misc_feature (1)..(133): Ceres Seq. ID no. 13661644
MAARAHDVAALALRGRSACLNFADSAWRLRIPESTCPKEIQRAAAEAAMAFQNKTATTETTMVEAVKPAEETVGQTGGETMEENGVFYMAEEAVLGMPRFLENMGEEMLLPPPELGWNHNDLAGDADVSLWSF

SEQ ID NO: 12114 - DNA, 568 bp, Triticum aestivum
  misc_feature (1)..(568): Ceres Seq. ID no. 13661723
cttatcacaaaaaaaaaagagaaaatcaaaacacatgactatgggtctgaagttctttacatgccttgttttgacggtctgcattgccgcatcagtagatgcagcactcacatgtggtacagtgacaagtagcttggctccatgtgccacctacctatcgaaaggtggggcggtggtgccgggtccatgttgtgcgggagtaaaaaaattgaatgatatggctcaaaccacaccggaccgccaacaagcatgcaaatgcctaaaggccgctgcaaaaagcatcaatccaagtctagcctccggccttcctggaaagtgcagtgttagcattccctatcctatctccatgagcaccaactgcgacaatgtcaaatgaagtgggacgcatatcattgtgtggatgatgagtatggtttaccataagtaaaataaaagggtctatgtacgctgacctcaccatgctctaggttgtcttgtttgatttcttttgttgttgttgaaagtttgtcatgttactttgtaatcttttggtctagatattgtatcttaattattttaagatatgaca

SEQ ID NO: 12115 - protein, 124 aa, Triticum aestivum
  misc_feature (1)..(124): Ceres Seq. ID no. 13661724
LSQKKKRKSKHMTMGLKFFTCLVLTVCIAASVDAALTCGTVTSSLAPCATYLSKGGAVVPGPCCAGVKKLNDMAQTTPDRQQACKCLKAAAKSINPSLASGLPGKCSVSIPYPISMSTNCDNVK

SEQ ID NO: 12116 - protein, 113 aa, Triticum aestivum
  misc_feature (1)..(113): Ceres Seq. ID no. 13661725
MTMGLKFFTCLVLTVCIAASVDAALTCGTVTSSLAPCATYLSKGGAVVPGPCCAGVKKLNDMAQTTPDRQQACKCLKAAAKSINPSLASGLPGKCSVSIPYPISMSTNCDNVK

SEQ ID NO: 12117 - protein, 111 aa, Triticum aestivum
  misc_feature (1)..(111): Ceres Seq. ID no. 13661726
MGLKFFTCLVLTVCIAASVDAALTCGTVTSSLAPCATYLSKGGAVVPGPCCAGVKKLNDMAQTTPDRQQACKCLKAAAKSINPSLASGLPGKCSVSIPYPISMSTNCDNVK

SEQ ID NO: 12118 - DNA, 774 bp, Triticum aestivum
  misc_feature (1)..(774): Ceres Seq. ID no. 13661770
agataaggaaagctctggttctgcgcacaagctccaaccaaattccgactcctctgcgcagaccaatcaccaatgcctgggcctccttccaccatgtccctgccgaggccgagcaggtgctaccgctgctgctcgtcgtcgacgccgccgccgccgaagcagcgagccgcggagagcaagcggcggcctatccgcggagcgcggctgctgctgacccggagggcgctggcgggcgctgtggcgacggtgacgttggcggtggcgggccgtgccagggcggcggaggagggcggcgagggggtggtgggcgcgttcaagtcgctgttcgacccgaacgaggagaccaaggccgggaaggtgctgcccaaggcgtacctgaaggcggcgcgggaggtggtgcggacgctccgggagtcgctgggggagggcgacgccgccggcgactcggccagcttccgcaggggcgccgactccgccaagacgtccatccgagagttcctcggcggctggagaggccagcccgccgtcgccaaagaggagtcgtatgtggcgctggagaaggccatcaaatcgctggctgagttctactccaaggcagggcccttcgcctcgcttccgggagatgtcaaaaacaagatcctcgacgacctcaacgccgcagaggcctacctctaggtctctttgcttagcggcattgtattttccggcgtaaattcgttatacttgtgtccttttgttgcgacgttatgatgagtaaataataattgacatggt

SEQ ID NO: 12119 - protein, 200 aa, Triticum aestivum
  misc_feature (1)..(200): Ceres Seq. ID no. 13661771
MPGPPSTMSLPRPSRCYRCCSSSTPPPPKQRAAESKRRPIRGARLLLTRRALAGAVATVTLAVAGRARAAEEGGEGVVGAFKSLFDPNEETKAGKVLPKAYLKAAREVVRTLRESLGEGDAAGDSASFRRGADSAKTSIREFLGGWRGQPAVAKEESYVALEKAIKSLAEFYSKAGPFASLPGDVKNKILDDLNAAEAYL

SEQ ID NO: 12120 - protein, 193 aa, Triticum aestivum
  misc_feature (1)..(193): Ceres Seq. ID no. 13661772
MSLPRPSRCYRCCSSSTPPPPKQRAAESKRRPIRGARLLLTRRALAGAVATVTLAVAGRARAAEEGGEGVVGAFKSLFDPNEETKAGKVLPKAYLKAAREVVRTLRESLGEGDAAGDSASFRRGADSAKTSIREFLGGWRGQPAVAKEESYVALEKAIKSLAEFYSKAGPFASLPGDVKNKILDDLNAAEAYL

SEQ ID NO: 12121 - protein, 192 aa, Triticum aestivum
  misc_feature (1)..(192): Ceres Seq. ID no. 13661773
IRKALVLRTSSNQIPTPLRRPITNAWASFHHVPAEAEQVLPLLLVVDAAAAEAASRGEQAAAYPRSAAAADPEGAGGRCGDGDVGGGGPCQGGGGGRRGGGGRVQVAVRPERGDQGREGAAQGVPEGGAGGGADAPGVAGGGRRRRRLGQLPQGRRLRQDVHPRVPRRLERPARRRQRGVVCGAGEGHQIAG

SEQ ID NO: 12122 - DNA, 886 bp, Triticum aestivum
  misc_feature (1)..(886): Ceres Seq. ID no. 13661797
ctgcttggatggatcagccgagaccgcacacaccagccacaccactccaccgaagcgaaaggggacaaaggtttgcacgtcgccaagtcctgaaccattacctagcagagcagggatcccatcgacgaggcgaggacagaggtggatcaacaatggcgtcgcttctttcgccgaacaccgtcgctgcgaccacggcgaggccgtccggcaggaggagccgccttactcccagtgtcaccgccatggcaaccaagggcccgaagcccagctccggcggcacgaaaagatcgtcgggcactaccacggtgttcccggtggggaagcccgcgggcccgccgcggccggcgacgacgaaggggtcggcgcccgtgaagctgctgacgaacgtggagaagctacggctgctgaccaaggcggagaaggcgggcctgctgtccgcggcggagcgcgccgggctgtcgctgtcggcggtcgagcgcctcgggctgctgtccaaggcggaggagctcggggtgctgtcggccgccaccgaccctggcacccccggctcgctgcagggcctcgcgctcctgctgctggccgccggccccgccgtcgtcttcctcgtccccgagcagtacccctgggaggtggcgctccaggccgtcgccgccctcgtctgcgtcgccgggggctccgccgcgttcgccgcgtccagcttcgtgtccaggctccagggctcctccggctgatctcgacgaactctgcttgcttcagcatcgaccgagtgtcaattgccgcgtttgattctagcaccaatgatcttgcgtagagttaatctacttctgtaaagatgggctgatatttatacgatgcgccattcggttgcaatactgcaggtttttgt

SEQ ID NO: 12123 - protein, 269 aa, Triticum aestivum
  misc_feature (1)..(269): Ceres Seq. ID no. 13661798
CLDGSAETAHTSHTTPPKRKGTKVCTSPSPEPLPSRAGIPSTRRGQRWINNGVASFAEHRRCDHGEAVRQEEPPYSQCHRHGNQGPEAQLRRHEKIVGHYHGVPGGEARGPAAAGDDEGVGAREAADERGEATAADQGGEGGPAVRGGARRAVAVGGRAPRAAVQGGGARGAVGRHRPWHPRLAAGPRAPAAGRRPRRRLPRPRAVPLGGGAPGRRRPRLRRRGLRRVRRVQLRVQAPGLLRLISTNSACFSIDRVSIAAFDSSTNDLA

SEQ ID NO: 12124 - protein, 242 aa, Triticum aestivum
  misc_feature (1)..(242): Ceres Seq. ID no. 13661799
AWMDQPRPHTPATPLHRSERGQRFARRQVLNHYLAEQGSHRRGEDRGGSTMASLLSPNTVAATTARPSGRRSRLTPSVTAMATKGPKPSSGGTKRSSGTTTVFPVGKPAGPPRPATTKGSAPVKLLTNVEKLRLLTKAEKAGLLSAAERAGLSLSAVERLGLLSKAEELGVLSAATDPGTPGSLQGLALLLLAAGPAVVFLVPEQYPWEVALQAVAALVCVAGGSAAFAASSFVSRLQGSSG

SEQ ID NO: 12125 - protein, 240 aa, Triticum aestivum
  misc_feature (1)..(240): Ceres Seq. ID no. 13661800
MDQPRPHTPATPLHRSERGQRFARRQVLNHYLAEQGSHRRGEDRGGSTMASLLSPNTVAATTARPSGRRSRLTPSVTAMATKGPKPSSGGTKRSSGTTTVFPVGKPAGPPRPATTKGSAPVKLLTNVEKLRLLTKAEKAGLLSAAERAGLSLSAVERLGLLSKAEELGVLSAATDPGTPGSLQGLALLLLAAGPAVVFLVPEQYPWEVALQAVAALVCVAGGSAAFAASSFVSRLQGSSG

SEQ ID NO: 12126 - DNA, 902 bp, Triticum aestivum
  misc_feature (1)..(902): Ceres Seq. ID no. 13661833
agatcccctccaccggggcctccttcgacctcctctcctctcccaatccactgcagccggccggccttcccctcccccctccgaccgctagctgctcacccccctccctcctccgaccgctagctgctcgccccactccctccccgtgagaagcttggtccagcaccgagcggcgccgagagctgtccgcgtcgggcgctgttggcatggagagcagcgcggcggcgcggatggatcctgaggcggcgacggagctggcgcggaagggggtcaccctcctgctcctagacgtgccccagcacaccctcctcggcctcgacacccaggtgttctcggtgagccccaggttcagagggatcaagatggtgcccccaggcccacatttcctccactactgctcccccagcagagcaaaaaggttcaacaaccatgaaatcctagctgaggacgtgcgagactgggatatagccagtgaccgggggcaagggcagcgtgcgcagggtgatcgacgaggactactgcggcccgatgggagtcgtgctcttcaactactgagaggcagacttcaccgtgaagccccgcgaccgcgtcatacagattattgtccaggtgattgcgacgcaggaggtcctcggggtggaggagctcgacgccaccgttcggaggtcaccgaggtggaggacgacgccaccgtccggagttcctcaaggtggaggacctcgacgctttgtacatacatctagagaagtggtctggttaggttggtggtgaaacgctagagaaggtaccaaccttttgatgacgattgtgtgtgtcctcgtgatctcttcgagttgagatgttgaatgttgcatccatgaacactgcaagtgttaagatggttatgtgaaatttattttgct

SEQ ID NO: 12127 - protein, 178 aa, Triticum aestivum
  misc_feature (1)..(178): Ceres Seq. ID no. 13661834
MESSAAARMDPEAATELARKGVTLLLLDVPQHTLLGLDTQVFSVSPRFRGIKMVPPGPHFLHYCSPSRAKRFNNHEILAEDVRDWDIASDRGQGQRAQGDRRGLLRPDGSRALQLLRGRLHREAPRPRHTDYCPGDCDAGGPRGGGARRHRSEVTEVEDDATVRSSSRWRTSTLCTYI

SEQ ID NO: 12128 - protein, 170 aa, Triticum aestivum
  misc_feature (1)..(170): Ceres Seq. ID no. 13661835
MDPEAATELARKGVTLLLLDVPQHTLLGLDTQVFSVSPRFRGIKMVPPGPHFLHYCSPSRAKRFNNHEILAEDVRDWDIASDRGQGQRAQGDRRGLLRPDGSRALQLLRGRLHREAPRPRHTDYCPGDCDAGGPRGGGARRHRSEVTEVEDDATVRSSSRWRTSTLCTYI

SEQ ID NO: 12129 - protein, 126 aa, Triticum aestivum
  misc_feature (1)..(126): Ceres Seq. ID no. 13661836
MVPPGPHFLHYCSPSRAKRFNNHEILAEDVRDWDIASDRGQGQRAQGDRRGLLRPDGSRALQLLRGRLHREAPRPRHTDYCPGDCDAGGPRGGGARRHRSEVTEVEDDATVRSSSRWRTSTLCTYI

SEQ ID NO: 12130 - DNA, 624 bp, Triticum aestivum
  misc_feature (1)..(624): Ceres Seq. ID no. 13661873
agaacatcctaatcgaaaataaaagaaaaggaccgagataaagaaagcgaaagagagatctagaagaagaagaagaagaagaagatggcattgcaatggctgattctgtcgtacgtggttgccgcggaggtcgcgatcgccgtcatcttgactctcccttaccctatgcttctgaaaaaacgcatcgtgtcactcgtctcgctcgtactccagcctgccgcctccatcgtcgccttcgccgggtttcaactcctcgatatttactggaagaatgagcatagactagagtgctcatcggaggtttgcactgctacagaacgagatcgctatgagaaatccatctacaaggctcagaggaatgtggttctgtgtgcggctgggatccttctctactggtgtatttatcgcatctgcaagtacaacaaagaccttgaccatttggaggagctagagaagagatacaaggcagagtagtagtctcctcagagtctggttctgatgttataatatcacctcggcttgttgttagtagacgatgattaatctcgataaatctttgcacagaccttatttgtgtttgaacttgcaactttgatttacttttcgagaaacatgttctattct

SEQ ID NO: 12131 - protein, 129 aa, Triticum aestivum
  misc_feature (1)..(129): Ceres Seq. ID no. 15220707
MALQWLILSYVVAAEVAIAVILTLPYPMLLKKRIVSLVSLVLQPAASIVAFAGFQLLDIYWKNEHRLECSSEVCTATERDRYEKSIYKAQRNVVLCAAGILLYWCIYRICKYNKDLDHLEELEKRYKAE

SEQ ID NO: 12132 - protein, 102 aa, Triticum aestivum
  misc_feature (1)..(102): Ceres Seq. ID no. 15220708
MLLKKRIVSLVSLVLQPAASIVAFAGFQLLDIYWKNEHRLECSSEVCTATERDRYEKSIYKAQRNVVLCAAGILLYWCIYRICKYNKDLDHLEELEKRYKAE

SEQ ID NO: 12133 - DNA, 556 bp, Triticum aestivum
  misc_feature (1)..(556): Ceres Seq. ID no. 13661896
ctatagcagaaagaagaggaggattttcatgtctgaagctgccatcactcccaaaggagctagtattgccaccaagggcaccatctattcacaaagcagaggaagccacggataagagtaataccaatggtgtgaaacagcttactggtgtttcttgcccagagaaatgcaccggaactagttcaacagcaactgacagcaactcagaggctactgtccacggtgagaccatattaattgagcatactaactcagaggcctgtaattatgttcaactactagtctaccgatggccctgcatggagaagctgactgcattcgctcgcaaggatcttgacccaaaaacagtttttatttttgttgctcctaatgccagcagaagtgcagaagcagttaaaatggtatgcgtatgggtaggaggtgaatatgagtgtagtaaaggtgttgaaagtattgattggcagcaagttgctggtgattttcttaatcagaaggggttcagcaatactcttcctgttaaggttttcaaggagcatgaaaccgagaatcttttgga

SEQ ID NO: 12134 - protein, 184 aa, Triticum aestivum
  misc_feature (1)..(184): Ceres Seq. ID no. 13661897
IAERRGGFSCLKLPSLPKELVLPPRAPSIHKAEEATDKSNTNGVKQLTGVSCPEKCTGTSSTATDSNSEATVHGETILIEHTNSEACNYVQLLVYRWPCMEKLTAFARKDLDPKTVFIFVAPNASRSAEAVKMVCVWVGGEYECSKGVESIDWQQVAGDFLNQKGFSNTLPVKVFKEHETENLL

SEQ ID NO: 12135 - protein, 85 aa, Triticum aestivum
  misc_feature (1)..(85): Ceres Seq. ID no. 13661898
MEKLTAFARKDLDPKTVFIFVAPNASRSAEAVKMVCVWVGGEYECSKGVESIDWQQVAGDFLNQKGFSNTLPVKVFKEHETENLL

SEQ ID NO: 12136 - DNA, 884 bp, Triticum aestivum
  misc_feature (1)..(884): Ceres Seq. ID no. 13661939
cctagaacatcctaatcgaaaagattaagattcactttttattccgatagatcagattcatttcctgaatctgttatataaaattctttctaaagaggaagaaatctcacggttccaacaggaaaaatgggttctgaacagaatgatagcacgagcttcacacaatcatcagagccgaaactttgtgcaaacggatgtggtttctttggttcgccatcaaacatggatctgtgttcgaaatgctaccgagacatatgcgcagaggaagctcaaacagctgttgcaaaagctgccgttgagaaatctttcaagccatcgccatcgcctcctcctcctaccctcttcatagcagagcctgatgtggcgaaaccagagaaagaaaaggcggttgctactgttcttgtggtggccgagccatcttctgcaacaggagaagctacagttcctgaacagaacgaaccaccatctaaacctgcacggccgaaccggtgcctttgttgcaacaagaaggttggtatacttgggtttaagtgcaaatgcgggagcactttctgcggcgaacatcggtaccctgagagacatgattgcagctttgatttcaaagaagctgggcgtggagagattgcaaaagccaatccggttattaaagctgataaacttcaaaggttctgagaaaggctacggtgttggtctctcttttcttttatctcaaattgtatttgaatggaattgggtttctactagtggattgtttccaaaggggggtaacatgatgaatttggttctttaataaactcagtcatctctatttcatgctattcaggtacggattataatctttgtgggtaacttgtaaaatcaatttatcaaagcttcttttggcc

SEQ ID NO: 12137 - protein, 181 aa, Triticum aestivum
  misc_feature (1)..(181): Ceres Seq. ID no. 15220147
MGSEQNDSTSFTQSSEPKLCANGCGFFGSPSNMDLCSKCYRDICAEEAQTAVAKAAVEKSFKPSPSPPPPTLFIAEPDVAKPEKEKAVATVLVVAEPSSATGEATVPEQNEPPSKPARPNRCLCCNKKVGILGFKCKCGSTFCGEHRYPERHDCSFDFKEAGRGEIAKANPVIKADKLQRF

SEQ ID NO: 12138 - protein, 149 aa, Triticum aestivum
  misc_feature (1)..(149): Ceres Seq. ID no. 15220148
MDLCSKCYRDICAEEAQTAVAKAAVEKSFKPSPSPPPPTLFIAEPDVAKPEKEKAVATVLVVAEPSSATGEATVPEQNEPPSKPARPNRCLCCNKKVGILGFKCKCGSTFCGEHRYPERHDCSFDFKEAGRGEIAKANPVIKADKLQRF

SEQ ID NO: 12139 - protein, 143 aa, Triticum aestivum
  misc_feature (1)..(143): Ceres Seq. ID no. 15220149
MWRNQRKKRRLLLFLWWPSHLLQQEKLQFLNRTNHHLNLHGRTGAFVATRRLVYLGLSANAGALSAANIGTLRDMIAALISKKLGVERLQKPIRLLKLINFKGSEKGYGVGLSFLLSQIVFEWNWVSTSGLFPKGGNMMNLVL

SEQ ID NO: 12140 - DNA, 795 bp, Triticum aestivum
  misc_feature (1)..(795): Ceres Seq. ID no. 13661946
aagctgacgaggatggatgatggttggttttggtggagagatcagttttttaggcctgatgagtatcaaatgccatgagaaattcaaaaattccatgggaagaatgaagacagctagcaaggttgggttctccgaggaatgcccatccgagctggctatggggacgatgactcaagggatggacacggcgatcatgcttaaccagttgggcaatccgaagtggagttgtaacttggtcgtggagagacaggcagagatgattttagggcgtcgcctggtttgccggggcggcgcccagccggaccttctggggatgacgctatgatttggggagcagcagtgcggcgaggctggtttcccgcattcgggcgtgaggttgatggaggagactagactgatgcgtggctgttgacgctcccatccggcaacaccgaccaagcggacgcgtcccagatcaatggctatccggcaacaccgaccaacggcggatgcgtcccagatcaatgccagaaaaatcacatcgtcgatcgtaagtgctccggacttcgcgcagctcctgctgtactccgtcggtcacatgtaccatgaacatggagtgtcgcatgtagtttgttgctttacaaaagaagaagatgcttgatgccttgttttgttgacgacatttattaatgacttgcagcaacagtacgctgcttcagttattggctgggagctacaactacttatcataaaatatgccaaatacaatgattttattatgtagaagtacaaataaaaatattattatgtagtttc

SEQ ID NO: 12141 - protein, 102 aa, Triticum aestivum
  misc_feature (1)..(102): Ceres Seq. ID no. 13661947
MMVGFGGEISFLGLMSIKCHEKFKNSMGRMKTASKVGFSEECPSELAMGTMTQGMDTAIMLNQLGNPKWSCNLVVERQAEMILGRRLVCRGGAQPDLLGMTL

SEQ ID NO: 12142 - protein, 101 aa, Triticum aestivum
  misc_feature (1)..(101): Ceres Seq. ID no. 13661948
MVGFGGEISFLGLMSIKCHEKFKNSMGRMKTASKVGFSEECPSELAMGTMTQGMDTAIMLNQLGNPKWSCNLVVERQAEMILGRRLVCRGGAQPDLLGMTL

SEQ ID NO: 12143 - protein, 88 aa, Triticum aestivum
  misc_feature (1)..(88): Ceres Seq. ID no. 13661949
MSIKCHEKFKNSMGRMKTASKVGFSEECPSELAMGTMTQGMDTAIMLNQLGNPKWSCNLVVERQAEMILGRRLVCRGGAQPDLLGMTL

SEQ ID NO: 12144 - DNA, 887 bp, Triticum aestivum
  misc_feature (1)..(887): Ceres Seq. ID no. 13661963
aacgaatatatcctagctactcgatcttgtcccagccaataggtagctgcttctgtctgcctagtgaacttttctcgctagctaccagggaaaagaccacctcaccggtcaccaccatggctgggctagtgctagccaagtgccttcttctgttctccctctccgccgcgctcctctctctgctcggcaccggcgcctccgccattggcctgccccagcctcatgcgccagtgaacttcaccatcggcgtgcagggcatggtctggtgcaagacctgcaggtacatcggctacaatgccaacatggacgcctccccactcaaaggcgtggaggtgtacctgcagtgccggcacggcccggggcggctgaagaaggtgcaaggggcatcggggcagggcggctactttgtcatccagtcggcgcagatggcgtccttcaccaacgacgagtgcaaggtgtacgcggagagctcgtcgtcgaccgcgtgcagcctcgtcgacgaacccgctgccggcgaggggctgccgctcaagttcgactccttcgtcaagcacggcgatggcctgcaggcgctctactccgtcggcaacttcttcttccgccccagcaaccccaacaagtgctactgacgcatccatccgtcatgtacatacttgtgggacttgaataaatgggtcaggaactcaggatgaattagttgttggagtagctggggatatgcatccggtgctgtaatgttgatttaagtttcttctattgttgcagtagttttgtaagcttcttttaattagcaaccgcatgatcgaaataactcgaatatgattagggcagtgtatgtcctgtcatgtgatgactaaccgatgtgctacaaggctctatgtataact

SEQ ID NO: 12145 - protein, 208 aa, Triticum aestivum
  misc_feature (1)..(208): Ceres Seq. ID no. 13661964
RIYPSYSILSQPIGSCFCLPSELFSLATREKTTSPVTTMAGLVLAKCLLLFSLSAALLSLLGTGASAIGLPQPHAPVNFTIGVQGMVWCKTCRYIGYNANMDASPLKGVEVYLQCRHGPGRLKKVQGASGQGGYFVIQSAQMASFTNDECKVYAESSSSTACSLVDEPAAGEGLPLKFDSFVKHGDGLQALYSVGNFFFRPSNPNKCY

SEQ ID NO: 12146 - protein, 170 aa, Triticum aestivum
  misc_feature (1)..(170): Ceres Seq. ID no. 13661965
MAGLVLAKCLLLFSLSAALLSLLGTGASAIGLPQPHAPVNFTIGVQGMVWCKTCRYIGYNANMDASPLKGVEVYLQCRHGPGRLKKVQGASGQGGYFVIQSAQMASFTNDECKVYAESSSSTACSLVDEPAAGEGLPLKFDSFVKHGDGLQALYSVGNFFFRPSNPNKCY

SEQ ID NO: 12147 - protein, 123 aa, Triticum aestivum
  misc_feature (1)..(123): Ceres Seq. ID no. 13661966
MVWCKTCRYIGYNANMDASPLKGVEVYLQCRHGPGRLKKVQGASGQGGYFVIQSAQMASFTNDECKVYAESSSSTACSLVDEPAAGEGLPLKFDSFVKHGDGLQALYSVGNFFFRPSNPNKCY

SEQ ID NO: 12148 - DNA, 760 bp, Triticum aestivum
  misc_feature (1)..(760): Ceres Seq. ID no. 13661991
atgaaattagaagctttaagttcctctctgttctcaacttgtcaccgaagattacaaacagggtctctcataaatggccgctaggtttcttagtttgagacgagctttgtctgtctacctcactaaccaacaacctcgtgttcctctgtttcaagcaggtaagcttgcgcaatcaaagtcactcttgagcagagattatgcttatgggggattactacagaggcactttagtgaaactgcagcaaccaatggctgctgcaactcttcaaactctgctgcggaacttaccaaagctccctccacctcccctgcaacagcctatgaggagctgattgtgaagtacaagtcccagttgaaaataaacccgaggcatgacttcatgatggtctttacttgcaaggtctgtgagacgaggtcgatgaagatggcgagcagagagtcttacgagaagggagttgtggtggtacgatgcgaaggatgtgataatctacatttgattgcagaccgtcgtggttggtttggagagccggggagcgtggaggagtttcttgctgctcaaggggaagagttcaagaaaggatccatggattctcttagccttacagttgaagacttggctggagagaagatgtccagtgaatagagcaacaagctcttcgttgctttagctattaggacttgaaccctgcagagaaaataaaatattttatatatttttattttaatttttgagacaaattaagatacataatatttggct

SEQ ID NO: 12149 - protein, 189 aa, Triticum aestivum
  misc_feature (1)..(189): Ceres Seq. ID no. 15220150
MAARFLSLRRALSVYLTNQQPRVPLFQAGKLAQSKSLLSRDYAYGGLLQRHFSETAATNGCCNSSNSAAELTKAPSTSPATAYEELIVKYKSQLKINPRHDFMMVFTCKVCETRSMKMASRESYEKGVVVVRCEGCDNLHLIADRRGWFGEPGSVEEFLAAQGEEFKKGSMDSLSLTVEDLAGEKMSSE

SEQ ID NO: 12150 - DNA, 905 bp, Triticum aestivum
  misc_feature (1)..(905): Ceres Seq. ID no. 13662000
gattcaccgctccccctccacctccacccggacccgcaagatcccgacccgccgcggcccccgctcctcgatcgattgatatcagacgcggccgggtgggcggaagaaggcggcggcggcggcgatgagcgcggtgaacatcaccaacgtggcggtgctggacaaccccaccgccttcctcaaccccttccagttcgagatctcctacgagtgcctcgtcccgctcgacgacgatctggaatggaagctcacatatgttggatcagctgaagacgaaacctatgatcagcaacttgagagcgtgcttgttggacctgtcaatgttgggacctaccgttttgtcttccaggctgacccaccggaccctttgaagatacgtgaagaagacatcattggtgtcaccgtgctgctgttgacatgctcctacgtgggtcaggagttcatgagggtgggttattatgtgaacaatgattacgacgaggagcagctgagagaagagcccccggcaaagctattacttgacagggtgcagagaaacattttggctgacaagccccgtgtcaccaagttcccaatcaacttccaccctgaacctggcacgagctcagaacagccgcaacaggatgcagaacagcagcagcagccgacttcaccggaaccacagacggctccagtagagccacatatggcgccactagagaatgtccccattgccgccgaccaatgatcagagttggggtgctaacggtctgttctccatgccttctatggtgtcttaatgttacgaatcgagagtggtggttctgcaatgtactgatctgttgtttacatttcacaatctgttctgtggcaaatgttgggtgtctagctatttcttgataaagagtacttctgcctattttgtt

SEQ ID NO: 12151 - protein, 200 aa, Triticum aestivum
  misc_feature (1)..(200): Ceres Seq. ID no. 13662001
MSAVNITNVAVLDNPTAFLNPFQFEISYECLVPLDDDLEWKLTYVGSAEDETYDQQLESVLVGPVNVGTYRFVFQADPPDPLKIREEDIIGVTVLLLTCSYVGQEFMRVGYYVNNDYDEEQLREEPPAKLLLDRVQRNILADKPRVTKFPINFHPEPGTSSEQPQQDAEQQQQPTSPEPQTAPVEPHMAPLENVPIAADQ

SEQ ID NO: 12152 - DNA, 641 bp, Triticum aestivum
  misc_feature (1)..(641): Ceres Seq. ID no. 13662032
aaaacttccccatcatctctacctgcttatgcattagagcccccggtgttgacttcgatttgcagctaagtcctgctctcctttcctttcagtccttgtagcttcttttttccttgcagtctactccctgttccgttgcaaataagcccctgagctctgtcacattctagcctcgactccttggtcttgggaggagttcgtcgcagatccgatctagagagcctccccgcaccacccatgtttaccttccccttcctctggcggctgtcggtggcgacgttctacaaccccggggccgacgccgttgtggcgccggcgaccgcggcgagggagccggcggcgcagctgtaccccgggccgtacaggttcggcgactacctggactactaccagggcaccaagtttgctgacaaggcggcgaggtttcaggctgtcaaggaactgttcggttcacggattgtgcacgattgactagctgtgctcgttggggtttcattgtagtagtactccttggactatttcctggtgttcgttaactgctccctacttttctaaatataagtctttctagatattttaatatggacaaaaaaaaaaaaaaaaaagcttatcgataccgtcgacctcgagggggggcccgg

SEQ ID NO: 12153 - protein, 77 aa, Triticum aestivum
  misc_feature (1)..(77): Ceres Seq. ID no. 13662033
MFTFPFLWRLSVATFYNPGADAVVAPATAAREPAAQLYPGPYRFGDYLDYYQGTKFADKAARFQAVKELFGSRIVHD

SEQ ID NO: 12154 - DNA, 576 bp, Triticum aestivum
  misc_feature (1)..(576): Ceres Seq. ID no. 13662038
gtgttggggaaacagaaaggaaacccggaaaagaaaacagagcaggactccactccacactccactctcctcccccctcctcactctttcttggatcgtaaggaaacggaagaaatacatccgcgatcgtggaggggacattttgatcggtgttggtttcccaaggccgagacgagggtacgtggtggtcgtcatggatcggggcgtggacgggaggacggggagggaccagcagcggcggcggcggggcacgggcagatgttcctgcacgggaatttcctgaaggtggaggaggacgagacggggttcctggacgacgaggagccgtgcggtggcttcttcgccgacgagccgccgctggcgtggtggaccgagccgacggatccctggaaatgaggcgcggcagagagagagactcggtgggagacgacacctcgcgcggggaataaaagattagtgaagaaagcaggggcttttctgaaatttttgtaaatctcgtttttatctagtcctttcctgtcaaaccctcgccctcgctaggcagccagcatcagcaatagtactactactagtgcc

SEQ ID NO: 12155 - protein, 131 aa, Triticum aestivum
  misc_feature (1)..(131): Ceres Seq. ID no. 13662039
VLGKQKGNPEKKTEQDSTPHSTLLPPPHSFLDRKETEEIHPRSWRGHFDRCWFPKAETRVRGGRHGSGRGREDGEGPAAAAAGHGQMFLHGNFLKVEEDETGFLDDEEPCGGFFADEPPLAWWTEPTDPWK

SEQ ID NO: 12156 - protein, 93 aa, Triticum aestivum
  misc_feature (1)..(93): Ceres Seq. ID no. 13662040
CWGNRKETRKRKQSRTPLHTPLSSPLLTLSWIVRKRKKYIRDRGGDILIGVGFPRPRRGYVVVVMDRGVDGRTGRDQQRRRRGTGRCSCTGIS

SEQ ID NO: 12157 - protein, 45 aa, Triticum aestivum
  misc_feature (1)..(45): Ceres Seq. ID no. 13662041
MFLHGNFLKVEEDETGFLDDEEPCGGFFADEPPLAWWTEPTDPWK

SEQ ID NO: 12158 - DNA, 1182 bp, Triticum aestivum
  misc_feature (1)..(1182): Ceres Seq. ID no. 13662053
attctctctctctctctcgctgcctggccaggtagcttctctctctcctccacgctcctgccgacaaaaacaagaaacgacgtagcacggtagcagcaaagagaaagagagagagaccactggtagccaagggtgggagagaagcaggagtgccgctgccgatcgaccatggagccgggccccgacgcgcctcgcggcgagggagcgagcgcgccggaggagtctggaccgtcctcatcctcggtggccgtggagaaagctgaagagccacaggcacaagcgcagccgccggaaggaggaggccagcaagtcgcactgcaggagcacctgcagccgcagccgctgtcgcagcagccgccggtgccagcggggctgagccgctacgagtcgcagaagcgccgcgactggaacacgttcctgcagtacctgcgcaaccacaagccgccgctgacactcgcgcggtgcagcggcgcgcacgtcatcgagttcctcaagtacctggaccagttcggcaagaccaaggtgcacgccgacggctgcgcctacttcggccagcccaacccgccggctccgtgcgcgtgcccgctccgacaggcatggggcagcctcgacgcgctcattggccgcctgcgcgccgcctacgaggagtccggcggccgccctgagtccaaccccttcgccgcgcgcgccgtgcgcatctatctgcgcgaggtgcgcgaggcgcaggccaaggcgcgcgggataccctacgagaagaagaagcgcaagcgcggcagcacgtccgcccccgcggcgccgcctcccgttgtcaccgccgcggaggcggcagcgacctccggaggcggcgaggacgacgaggacgagccgtcacagtccgctgagcaacagcacacaacgccagcgtctcctccgactagaattagtagcgccggcgctactagtaccaccgcagcggcggcagccacaacgacgacgacgacaacgagagggaaggagaaggaagcggcagaaggatcagcgtgataagtgtagaccatcaaattacccttttgattattccatcgcatccaaattctaatctctgcaccatcataattttagttgtttgttattataattactgtgctgttatgatttgttggatatatatatatatataagagagaggtctaagtagttcgt

SEQ ID NO: 12159 - protein, 284 aa, Triticum aestivum
  misc_feature (1)..(284): Ceres Seq. ID no. 15220155
MEPGPDAPRGEGASAPEESGPSSSSVAVEKAEEPQAQAQPPEGGGQQVALQEHLQPQPLSQQPPVPAGLSRYESQKRRDWNTFLQYLRNHKPPLTLARCSGAHVIEFLKYLDQFGKTKVHADGCAYFGQPNPPAPCACPLRQAWGSLDALIGRLRAAYEESGGRPESNPFAARAVRIYLREVREAQAKARGIPYEKKKRKRGSTSAPAAPPPVVTAAEAAATSGGGEDDEDEPSQSAEQQHTTPASPPTRISSAGATSTTAAAAATTTTTTTRGKEKEAAEGSA

SEQ ID NO: 12160 - DNA, 1299 bp, Triticum aestivum
  misc_feature (1)..(1299): Ceres Seq. ID no. 13662173
attcattcattctccctcccctccttccttcctacctaatcctagaggagcatagctagggttcctccccgcagccgtcgcctcctctcctctcctcaccccgccgccgccggccaacgagatccagccagcgagatccgaccgacgccgtctccgtctccgtctccgcctcgccgccgccgcctgcttcggcatgtcgcattccaacgaagtaaggtacaccgcgcgctccatcacgcctccggcagacagggacagcggctccaagtcgcccccaccacggaggcgcgcggcttccaagtcgcctcccctgcctccccctccccctttccctcccaagggggtgcgcaccatctcgaggtcgcctccacctagtagtagaagacgcagcgtctcgaggtcccctccaccaaagaggcgcggcaggtccaggtccaggtccaggtccaggaacaggagccgctccaggagcagagacaaagacgatgtgaggaatcctggcaacaacctctatgtcactggactgtccacacggacgcaggaaactgacctggagaagttcttcagcaaagagggcaaggttaaagactgccgtgtcgttatcgatcctcgtacgaaagaatcacgtggctttgcgttcgtgaccatggagaatgttgaggatgcaaggcgctgcatcaagtacctgcaccgtactgtacttgaaggccgcctcatcagtgtggcaaaggcaaagagaactcgtgagaggacccctacccctggagaatactgtggtccgagaggcgggcgctcccgggtggagccgcggcggagccgttctccacgccgttccagcaggtcgtcgagggaccggtcaaggtcgccggccgcaaggagggacagggacagcagggacaggaagcgcgactgaatgaaacaaggcaaggggagaaacaaaatgatgctaaaatcacatatcgccgcgagttgtcgagtatgaatgtgtcttggattctttgttgctgaatgaatgtttgtttgatgaaggaggactctagtcagtatttctgctggatgctttctttagataagcagctgatttgtcttgtctttctgttttatcagaggagaggatttccctaacattcatttctttttaggttttgtgttgtgtatggacgatgaaggcgcatttcgtgtttttaaggtttctcgctatcgaatcggatgcgtctatttggttgtatgagcacctttgtcttgtcttggctggatgctaacattattattattattattatgtctgtgatggtatgc

SEQ ID NO: 12161 - protein, 239 aa, Triticum aestivum
  misc_feature (1)..(239): Ceres Seq. ID no. 13662174
MSHSNEVRYTARSITPPADRDSGSKSPPPRRRAASKSPPLPPPPPFPPKGVRTISRSPPPSSRRRSVSRSPPPKRRGRSRSRSRSRNRSRSRSRDKDDVRNPGNNLYVTGLSTRTQETDLEKFFSKEGKVKDCRVVIDPRTKESRGFAFVTMENVEDARRCIKYLHRTVLEGRLISVAKAKRTRERTPTPGEYCGPRGGRSRVEPRRSRSPRRSSRSSRDRSRSPAARRDRDSRDRKRD

SEQ ID NO: 12162 - DNA, 1542 bp, Triticum aestivum
  misc_feature (1)..(1542): Ceres Seq. ID no. 13662197
aattgccttcccgcaaaaataaggaaaattacaccttcccgccgccgccaacgaacgacgctttgcctcattgctcagttccctatgaccagcacgcccaccgttaccaagtcgccgccggcgctcatcccgccggcgggacctaccccctgcggcacccttccgttctcctccattgacaagaccgtcgccggctccggctttgtgaaccttatgcaggtctttcccccgccctcgatctccgccgcccgcaaggaccagggcgccgtcgcggccgtggccgcaatgcgcaacgggttcgcgagggcgcttgtgccgtactatccggtggccggccgcatcgcctcgagcggcctcgcggtggactgcaccggggagggcatctggtttgtggaagccgccgcgagctgcacgctcgccgacgtggacggcctcgacagctgcccactgctgatcccaggagagctcctcctccctcgccctccccccggcgagaagctcagcgacctcatcctcatagcccaggcgacgaggttcacctgcggtggtttcgccgtcgggatccgcttcagccacgcggtgttcgacgggcatggggctgcgcagttccttacggcggtgggggagctagcgcgggggctcaaggcgccgtcagtggctccggtgtgggaccgcgacgcgatcccagaagctccaagcccgctgccggggcagctcacggagttcaggctggtgacccaggtggtcgacatctcggcggagagcatcgcgcgcgtgaaggacgagttcaagcaggctgccgcgacatcgacgggggaagtgtgctccacctttgacgcggtgacggccgtggtgttcaagtgccgcgcgctggcgctggcatcggcgctcccggacgagaccgaggtccggatggccttcgccgccagcacgcggcaccttctccgcggtgtgctgccgacggtggagggctactacggcaactgcgtattcctggcgtgcgccactaggacaggcaaggccgtccgggaggccacgctggcggaggtggtcggcgcggtacgggaggcgaaggaggcggttcccgctcggttcgcgggctggatgcgcggcgtcgagcagtacgacgtgccgccgctggactacagcacagtgacgttgtcggactggagccgtctcggcttcgacgaggtggactacggcttcggtgcgcccgggtacgttttcccgctcaacgaccacgtcaacttcgtcgcggcgctcaactacgtcaggccgccggcgcccaggcgtgggggcatccgggtggtgctccgctgcgtcgaggagcctcatgcggctgcgttcgccgtcgagctcgccaagttcgcctagatgcaacgcacgcgtgcttcccatttcttggccatgtccgtccattaatgtgagaccgcgcagttcagggaacacattttcacattttttttctctcggcagccaacacgttgtatctccattgtatggtcgtataataagagtaatactttatcttttcctatcggg

SEQ ID NO: 12163 - protein, 457 aa, Triticum aestivum
  misc_feature (1)..(457): Ceres Seq. ID no. 13662198
NCLPAKIRKITPSRRRQRTTLCLIAQFPMTSTPTVTKSPPALIPPAGPTPCGTLPFSSIDKTVAGSGFVNLMQVFPPPSISAARKDQGAVAAVAAMRNGFARALVPYYPVAGRIASSGLAVDCTGEGIWFVEAAASCTLADVDGLDSCPLLIPGELLLPRPPPGEKLSDLILIAQATRFTCGGFAVGIRFSHAVFDGHGAAQFLTAVGELARGLKAPSVAPVWDRDAIPEAPSPLPGQLTEFRLVTQVVDISAESIARVKDEFKQAAATSTGEVCSTFDAVTAVVFKCRALALASALPDETEVRMAFAASTRHLLRGVLPTVEGYYGNCVFLACATRTGKAVREATLAEVVGAVREAKEAVPARFAGWMRGVEQYDVPPLDYSTVTLSDWSRLGFDEVDYGFGAPGYVFPLNDHVNFVAALNYVRPPAPRRGGIRVVLRCVEEPHAAAFAVELAKFA

SEQ ID NO: 12164 - protein, 429 aa, Triticum aestivum
  misc_feature (1)..(429): Ceres Seq. ID no. 13662199
MTSTPTVTKSPPALIPPAGPTPCGTLPFSSIDKTVAGSGFVNLMQVFPPPSISAARKDQGAVAAVAAMRNGFARALVPYYPVAGRIASSGLAVDCTGEGIWFVEAAASCTLADVDGLDSCPLLIPGELLLPRPPPGEKLSDLILIAQATRFTCGGFAVGIRFSHAVFDGHGAAQFLTAVGELARGLKAPSVAPVWDRDAIPEAPSPLPGQLTEFRLVTQVVDISAESIARVKDEFKQAAATSTGEVCSTFDAVTAVVFKCRALALASALPDETEVRMAFAASTRHLLRGVLPTVEGYYGNCVFLACATRTGKAVREATLAEVVGAVREAKEAVPARFAGWMRGVEQYDVPPLDYSTVTLSDWSRLGFDEVDYGFGAPGYVFPLNDHVNFVAALNYVRPPAPRRGGIRVVLRCVEEPHAAAFAVELAKFA

SEQ ID NO: 12165 - protein, 386 aa, Triticum aestivum
  misc_feature (1)..(386): Ceres Seq. ID no. 13662200
MQVFPPPSISAARKDQGAVAAVAAMRNGFARALVPYYPVAGRIASSGLAVDCTGEGIWFVEAAASCTLADVDGLDSCPLLIPGELLLPRPPPGEKLSDLILIAQATRFTCGGFAVGIRFSHAVFDGHGAAQFLTAVGELARGLKAPSVAPVWDRDAIPEAPSPLPGQLTEFRLVTQVVDISAESIARVKDEFKQAAATSTGEVCSTFDAVTAVVFKCRALALASALPDETEVRMAFAASTRHLLRGVLPTVEGYYGNCVFLACATRTGKAVREATLAEVVGAVREAKEAVPARFAGWMRGVEQYDVPPLDYSTVTLSDWSRLGFDEVDYGFGAPGYVFPLNDHVNFVAALNYVRPPAPRRGGIRVVLRCVEEPHAAAFAVELAKFA

SEQ ID NO: 12166 - DNA, 1328 bp, Triticum aestivum
  misc_feature (1)..(1328): Ceres Seq. ID no. 13662300
cgaaaaatcaccggttcacgagctgatacagagcatcctaggcaagaagaggagagactcaccacccgagagcagcggcaatggcgtccttcggttctatcgcggtggcgctcgtggtgtgcgcaatgctgctgcagacctgcgtggccacgaggaggctccaggcgctggtgcaggagcagcccatcaccatgaagtaccacaagggagcgctcctctccggccgcatcgccatcaacctcgtctggtacggcaacttctccgcgccgcagcgcgccatcgtcaccgacttcgtctcctcgctcgcctccgcgtccgcgtccccggcgccgcagccggagccgtcggtggccacctggttcaagacggcgcagaagtactacgccagctccaaggcccgcttcccggcgctggccctcggctcccacgtcttcgaccggtcctactccctcggccggcggctccgggagcgtgacctcgtcaggctggccgcgcgcggcgggcccagccgcgccatcaacgtggtgctcacggccgacgacgtggccgtcgacggcttctgcatgagccgctgcggctcccacggcgcctccccgcggtcccgcgccgggcggttcgcatacgtgtgggtgggcaacccggcgacgcagtgcgccgggcagtgtgcgtggccgttccaccagccgcagtacggcccgcagatggcacccctcgcgccgcccaacggcgacgtcggcgtcgacggcatggtggtgtccctcgcgtccatggtcgtcggcaccgtcaccaaccccttcggcaacggcttcttccagggccccgccgaggcgccgctggaggccgccacggcgtgcgccggtgtgtacggcaagggggcgtaccccggctacgccggctcactgctcgtcgacccggccaccggcgccagcttcaacgcgaacggagcccacggccggaagtacctggtcccggcgctcgtcgaccccgacacgtccgcctgctccaccttggggtaggctcgctcgtaggcgacatgatggtgtgtagttatagttgcggtggcgttgttgctgtgtggagagtgttccaccttccacgcgcgtgctaatattaatctgtgtgcctgtagaggcgttgagatgaaattctttcatttgttgaatgaaaarahgtttamtsacaataaakytttcatttgttgaadgaaaaaaagtttwctwtttdwmaaaaaaaaaaaaaaaaaaaaaaaaaaaaaaaaaaaaaaaaaaaaaaagaaaaaaaaaaaaaaaaargyttatcratmccgycracctcragggggggcccgg

SEQ ID NO: 12167 - protein, 311 aa, Triticum aestivum
  misc_feature (1)..(311): Ceres Seq. ID no. 15220165
MASFGSIAVALVVCAMLLQTCVATRRLQALVQEQPITMKYHKGALLSGRIAINLVWYGNFSAPQRAIVTDFVSSLASASASPAPQPEPSVATWFKTAQKYYASSKARFPALALGSHVFDRSYSLGRRLRERDLVRLAARGGPSRAINVVLTADDVAVDGFCMSRCGSHGASPRSRAGRFAYVWVGNPATQCAGQCAWPFHQPQYGPQMAPLAPPNGDVGVDGMVVSLASMVVGTVTNPFGNGFFQGPAEAPLEAATACAGVYGKGAYPGYAGSLLVDPATGASFNANGAHGRKYLVPALVDPDTSACSTLG

SEQ ID NO: 12168 - protein, 296 aa, Triticum aestivum
  misc_feature (1)..(296): Ceres Seq. ID no. 15220166
MLLQTCVATRRLQALVQEQPITMKYHKGALLSGRIAINLVWYGNFSAPQRAIVTDFVSSLASASASPAPQPEPSVATWFKTAQKYYASSKARFPALALGSHVFDRSYSLGRRLRERDLVRLAARGGPSRAINVVLTADDVAVDGFCMSRCGSHGASPRSRAGRFAYVWVGNPATQCAGQCAWPFHQPQYGPQMAPLAPPNGDVGVDGMVVSLASMVVGTVTNPFGNGFFQGPAEAPLEAATACAGVYGKGAYPGYAGSLLVDPATGASFNANGAHGRKYLVPALVDPDTSACSTLG

SEQ ID NO: 12169 - protein, 274 aa, Triticum aestivum
  misc_feature (1)..(274): Ceres Seq. ID no. 15220167
MKYHKGALLSGRIAINLVWYGNFSAPQRAIVTDFVSSLASASASPAPQPEPSVATWFKTAQKYYASSKARFPALALGSHVFDRSYSLGRRLRERDLVRLAARGGPSRAINVVLTADDVAVDGFCMSRCGSHGASPRSRAGRFAYVWVGNPATQCAGQCAWPFHQPQYGPQMAPLAPPNGDVGVDGMVVSLASMVVGTVTNPFGNGFFQGPAEAPLEAATACAGVYGKGAYPGYAGSLLVDPATGASFNANGAHGRKYLVPALVDPDTSACSTLG

SEQ ID NO: 12170 - DNA, 1603 bp, Triticum aestivum
  misc_feature (1)..(1603): Ceres Seq. ID no. 13662301
ctcttgtctatgcagcttgcttcccctatctattttctagagggagggggagagagggacaaccaagatccaaatcttggccagcgactcgatcggatctccagccgacgccggcgaccatggctcgccatcacctccttctcttcctccctcttctcgcgcttgccttctcctttgtcatcgccgcccctgagagacagggagatgccgcggccttcatcgatggcgcatcgcaccgctacctgagggatcagccagaggaccaggccacgtccatgtcacttggtgaagtttctgcagctgtttctgtcttgcttggttttgcaccacctgccattcttcctgcaccttcttctgcaaagttaaacaagctgctactcccaaacccatttgacagacctcgttctgttttcttgatgcaacttgatggatcccatgactatgttaatggcttcatatctgatgccggcagtatttacaaaaccaagattgatggtgcaaaaagtgctgctatagagctttcagataaggatgaattgattgtcattcgttcggatgaatcttctggattagatgttcttgataacgaactcgccaacttggcaacctggttggcgggatcctatcagaaagctgatagcaaattaaacattcccttgaagagtggaaacagtcttactttgttcctcactaaggaagcagacgttgaatttgcatccagcttgatctcccttcttaaaaccatcgaaaggggtattcaggttcacgaagatttctcaggaggcatggtgagccctgcagagttattagtatgccacttcacgggcattaaggctctggaagatgaatatggttccgcagaaattgttaagcagggagctgaagtagttcagacagctctcacaaaagcatttgatcaattgcagggagcatataatggaaaaattgttggactggtaatatccgctaaggaggcttcaacatccttggcatccatcatcgatgcaccgtcttcattgcatatctcaagacggcttgcagaagcatctaaaactaatgctacagcttctatagctgctatatatcttgttagattgagtcttgcatggattacagggatcatccttctcgtctcaactctcattgggatttgcttgctcatgaacatgccgcttacgagggacacactcctatattcaaatgccaagattgattagtttgtgctacatacgaattttcacacgatgacatgaaagttttcaacagtcatgcttggtttttcctttggatcctggggtttacagtaggaacgtgagtgtgggcttgctgttcatgcagtgtagcataaaaatactgttgctatgtccttcatttagaatcatactgccactgcctgtttgggcttctcatgtttttccgtaaataaataacaatattcgagtggggtttattttgttaatatcggtcatgattgtatttttgcaaaaagcagtatctgaataaattcgccactcgaatattcattgggatatattttgtcttcatatatgacgttaaatgatttattgagttgaaatttcatataaattgattaatcatatgt

SEQ ID NO: 12171 - protein, 404 aa, Triticum aestivum
  misc_feature (1)..(404): Ceres Seq. ID no. 13662302
LVYAACFPYLFSRGRGREGQPRSKSWPATRSDLQPTPATMARHHLLLFLPLLALAFSFVIAAPERQGDAAAFIDGASHRYLRDQPEDQATSMSLGEVSAAVSVLLGFAPPAILPAPSSAKLNKLLLPNPFDRPRSVFLMQLDGSHDYVNGFISDAGSIYKTKIDGAKSAAIELSDKDELIVIRSDESSGLDVLDNELANLATWLAGSYQKADSKLNIPLKSGNSLTLFLTKEADVEFASSLISLLKTIERGIQVHEDFSGGMVSPAELLVCHFTGIKALEDEYGSAEIVKQGAEVVQTALTKAFDQLQGAYNGKIVGLVISAKEASTSLASIIDAPSSLHISRRLAEASKTNATASIAAIYLVRLSLAWITGIILLVSTLIGICLLMNMPLTRDTLLYSNAKID

SEQ ID NO: 12172 - protein, 365 aa, Triticum aestivum
  misc_feature (1)..(365): Ceres Seq. ID no. 13662303
MARHHLLLFLPLLALAFSFVIAAPERQGDAAAFIDGASHRYLRDQPEDQATSMSLGEVSAAVSVLLGFAPPAILPAPSSAKLNKLLLPNPFDRPRSVFLMQLDGSHDYVNGFISDAGSIYKTKIDGAKSAAIELSDKDELIVIRSDESSGLDVLDNELANLATWLAGSYQKADSKLNIPLKSGNSLTLFLTKEADVEFASSLISLLKTIERGIQVHEDFSGGMVSPAELLVCHFTGIKALEDEYGSAEIVKQGAEVVQTALTKAFDQLQGAYNGKIVGLVISAKEASTSLASIIDAPSSLHISRRLAEASKTNATASIAAIYLVRLSLAWITGIILLVSTLIGICLLMNMPLTRDTLLYSNAKID

SEQ ID NO: 12173 - protein, 313 aa, Triticum aestivum
  misc_feature (1)..(313): Ceres Seq. ID no. 13662304
MSLGEVSAAVSVLLGFAPPAILPAPSSAKLNKLLLPNPFDRPRSVFLMQLDGSHDYVNGFISDAGSIYKTKIDGAKSAAIELSDKDELIVIRSDESSGLDVLDNELANLATWLAGSYQKADSKLNIPLKSGNSLTLFLTKEADVEFASSLISLLKTIERGIQVHEDFSGGMVSPAELLVCHFTGIKALEDEYGSAEIVKQGAEVVQTALTKAFDQLQGAYNGKIVGLVISAKEASTSLASIIDAPSSLHISRRLAEASKTNATASIAAIYLVRLSLAWITGIILLVSTLIGICLLMNMPLTRDTLLYSNAKID

SEQ ID NO: 12174 - DNA, 1525 bp, Triticum aestivum
  misc_feature (1)..(1525): Ceres Seq. ID no. 13662324
ttttcctccgcgtagccttcccaccatattccagttcggcaagctcgccagtcaccaagctcctcctcctccacaggaaagcaacagcgcagcgcggcttcactggtttcgccctcaattcgagagctagtcttggaaggccttccatggctcagccgtcgctgctcctcggctctccggcatcgattgtcctccttatcaccttcttccaaggaccggtagtgagcgccatcacgttcaccttcgccaaccggtgcacggacacggtgtggcccgggttgctctcgggctccacctcgccgccgctggagaccaccggcttcgcgctctcgccgggccagtcgcgctcaatctacgggccgaccgggtggtcgggccgcttctgggcgcgctctggctgtaatttcaacggcggcaagggcacctgcgtcacgggggactgcggctccggcgagatagagtgccgcggcgccggggccaccccgcccgccacgctcgcggagttcaccctcgacggcgacggcgggaaggacttctatgacgtcagcctcgtcgacggctacaacttgcccatgctcgtgcagccgtccgtgcctgggtgccccgacaccgggtgcctcgtcgacctcaacgagcgctgcccctccgagctccgctccggcggcggcctcgcctgccgcagcgcctgcgaggccttcggcaagcccgagttctgctgcaacggcgcctacgggaaccctgacacgtgccacccctcccagtactcgcagctcttcaagtcggcgtgccccaagtcctacagctacgcctacgacgacgccacctccaccttcacctgcaaccacaccgattacaccattaccttctgcccgcagtccaatccttacagtggcaaaccgaacaagcacgcattgcggaggccgagccatgagcagcttgaggacgacgtgtggctggcatctttgaagaaaaccagcggcgccggtggaagcagcatggcatcatggtcggcgtccggaggtttccaagccgccctggcaattgctgtggccgtcgtgcttgccgcggcacaggggggtcatccccgtttcagcttgttatgaccgggcaaggcaggcgattcttcatccctaggagtgatctgcagagggtttttttaggataaaaaaggaggatcagagcactagaggaagagacgtggatatcatgttctttaggcctttttgcttgttgataaagaacatgacgcgtcctcatgttggcaattgtagttgttctagtagtggcatttcatattgctttattgcctttttgaaaacattgttcttctggttgtattcatctttctgcgcaatttttttgtggggatcctgatcagtgcatcgtcactaggagatcgcaagctttgaagtgggaagactgtaagatctgaatatactattgctctgccttctgagctccttttttttgtaaaaatctgaaatgccttcttaaaaaaaaaaaaaaaaaagcttatcgataccgt

SEQ ID NO: 12175 - protein, 366 aa, Triticum aestivum
  misc_feature (1)..(366): Ceres Seq. ID no. 13662325
FLRVAFPPYSSSASSPVTKLLLLHRKATAQRGFTGFALNSRASLGRPSMAQPSLLLGSPASIVLLITFFQGPVVSAITFTFANRCTDTVWPGLLSGSTSPPLETTGFALSPGQSRSIYGPTGWSGRFWARSGCNFNGGKGTCVTGDCGSGEIECRGAGATPPATLAEFTLDGDGGKDFYDVSLVDGYNLPMLVQPSVPGCPDTGCLVDLNERCPSELRSGGGLACRSACEAFGKPEFCCNGAYGNPDTCHPSQYSQLFKSACPKSYSYAYDDATSTFTCNHTDYTITFCPQSNPYSGKPNKHALRRPSHEQLEDDVWLASLKKTSGAGGSSMASWSASGGFQAALAIAVAVVLAAAQGGHPRFSLL

SEQ ID NO: 12176 - protein, 318 aa, Triticum aestivum
  misc_feature (1)..(318): Ceres Seq. ID no. 13662326
MAQPSLLLGSPASIVLLITFFQGPVVSAITFTFANRCTDTVWPGLLSGSTSPPLETTGFALSPGQSRSIYGPTGWSGRFWARSGCNFNGGKGTCVTGDCGSGEIECRGAGATPPATLAEFTLDGDGGKDFYDVSLVDGYNLPMLVQPSVPGCPDTGCLVDLNERCPSELRSGGGLACRSACEAFGKPEFCCNGAYGNPDTCHPSQYSQLFKSACPKSYSYAYDDATSTFTCNHTDYTITFCPQSNPYSGKPNKHALRRPSHEQLEDDVWLASLKKTSGAGGSSMASWSASGGFQAALAIAVAVVLAAAQGGHPRFSLL

SEQ ID NO: 12177 - DNA, 1440 bp, Triticum aestivum
  misc_feature (1)..(1440): Ceres Seq. ID no. 13662367
atcagaaatccaaagccaaaaaccactctctaaacccgacacaaaaactcaagcccgaacccaagaaagcttccttcccgagacgagatcaagatggctcccgagctggccggcaagatgaccgccaaggccgccgtggcggcggccaagcccgcgacgaaggcgtacgtgacgttcctggcgggggcgggggactactggatgggcgtggtggggcttgccaagggcctgcgcaaggttgggtcggcctacccgctggtggtggccgtgctgcccgacgtgcccgagctccaccgcaagatcctcgtctcccagggctgcatcgtccgcgagatcgctcccgtgtacccgcccgagaaccacacccagtttgccatggcctactacgtcatcaactactccaagctccgcatctgggagtttgtggagtacgagaggatggtgtacctcgacgccgacatccaggtgttcgacaacatcgacgagttgtttgatctgcccaaggggcatttctacgccgtgatggactgcttctgcgagaagacgtggagccacaccccgcagtaccagatcggctactgccagcagtgtcccgacaaggtgacgtggccggccgccgagatgggcccgccgccggcgctctacttcaacgccggcatgttcgtgcacgagcccagcatggccaccgccaaggcgctccttgacaccctccgcgtgacgccgacgaccccattcgcggagcaggatttcctcaacatgttcttcagggagcagtacaagccgatcccgctggtctacaaccttgttctggcgatgctctggaggcacccggagaacgtgcagctggagaaggtcaaggtggtgcactactgcgctgcgggatcgaagccatggaggttcacgggcaaagaggagaacatggacagggaggacatcaagatcctcgccaggaactggtgggacatctacaacgacgagagcctcgatttcaagggcctgcccgccctggccgccgacgccgacgagctcgaggcggcggccaagaagccgctccgcgcggcgcttgcggaagccggcaccgtcaagtacgtcaccgcgccctcggctgcgtgatccccggttgcctagctccggcccgtgccactgtggtcatcaaagcaggaagccgggcacctataagcatttgcattttggtattttgcgtctgttcggttccaagttagcagtatcatttcaagtttaagataggatcgaaagagtccacgtatgtgaatatcctcgaccctttgtgaagtagagtgctgagtcgtcctgtatgaaagaattatgtgtgaatcaataggaagctttaaaaattatggcatatatttttcacgtcaaaaaaaaaaaaaaaaaaaaaaaaggagggggggggagggaaaaaaaaaaaaaaaagagctt

SEQ ID NO: 12178 - protein, 339 aa, Triticum aestivum
  misc_feature (1)..(339): Ceres Seq. ID no. 13662368
MAPELAGKMTAKAAVAAAKPATKAYVTFLAGAGDYWMGVVGLAKGLRKVGSAYPLVVAVLPDVPELHRKILVSQGCIVREIAPVYPPENHTQFAMAYYVINYSKLRIWEFVEYERMVYLDADIQVFDNIDELFDLPKGHFYAVMDCFCEKTWSHTPQYQIGYCQQCPDKVTWPAAEMGPPPALYFNAGMFVHEPSMATAKALLDTLRVTPTTPFAEQDFLNMFFREQYKPIPLVYNLVLAMLWRHPENVQLEKVKVVHYCAAGSKPWRFTGKEENMDREDIKILARNWWDIYNDESLDFKGLPALAADADELEAAAKKPLRAALAEAGTVKYVTAPSAA

SEQ ID NO: 12179 - protein, 331 aa, Triticum aestivum
  misc_feature (1)..(331): Ceres Seq. ID no. 13662369
MTAKAAVAAAKPATKAYVTFLAGAGDYWMGVVGLAKGLRKVGSAYPLVVAVLPDVPELHRKILVSQGCIVREIAPVYPPENHTQFAMAYYVINYSKLRIWEFVEYERMVYLDADIQVFDNIDELFDLPKGHFYAVMDCFCEKTWSHTPQYQIGYCQQCPDKVTWPAAEMGPPPALYFNAGMFVHEPSMATAKALLDTLRVTPTTPFAEQDFLNMFFREQYKPIPLVYNLVLAMLWRHPENVQLEKVKVVHYCAAGSKPWRFTGKEENMDREDIKILARNWWDIYNDESLDFKGLPALAADADELEAAAKKPLRAALAEAGTVKYVTAPSAA

SEQ ID NO: 12180 - protein, 303 aa, Triticum aestivum
  misc_feature (1)..(303): Ceres Seq. ID no. 13662370
MGVVGLAKGLRKVGSAYPLVVAVLPDVPELHRKILVSQGCIVREIAPVYPPENHTQFAMAYYVINYSKLRIWEFVEYERMVYLDADIQVFDNIDELFDLPKGHFYAVMDCFCEKTWSHTPQYQIGYCQQCPDKVTWPAAEMGPPPALYFNAGMFVHEPSMATAKALLDTLRVTPTTPFAEQDFLNMFFREQYKPIPLVYNLVLAMLWRHPENVQLEKVKVVHYCAAGSKPWRFTGKEENMDREDIKILARNWWDIYNDESLDFKGLPALAADADELEAAAKKPLRAALAEAGTVKYVTAPSAA

SEQ ID NO: 12181 - DNA, 1767 bp, Triticum aestivum
  misc_feature (1)..(1767): Ceres Seq. ID no. 13662391
tttttagccgatcagtatcctccacaagaaaaaaaatactataagcgcaatagaaaaatagtgatccctcaataagaaaatcaagaaaagatttccttttcttcttgggctcccttccaccaccaacctcttctccggccggccgagttgtcccgctccggctgcgtcttctccggcgagaggtgtagctaggttgcctgctcttcctttgagcggtctcctcccggcagggctgaggagatctctcgggacctcgggactggggcgtgtatgatggggatttcgcttatgccgatgaagacgcccacgcggcttctgtggagcaccagcttcttccgccacaagctcgccgccatgatcgcctcctcgtcctgcttcttataagagcccctccgccgcgcagcagctgtatatatacgtctttttcatttgattccgccccccgttcgatcgacaaccaaccaaggcaacttcttgaagctttctctgcgatggagcccggccggctcatcttcaacacgtcgggctccggcaacggacagatgctcttcatggactgcggcgccggcggcatcgccggcgcggccggcatgttccatcgaggggtgagaccggtcctcggcggcatggaagaagggcgcggcgtgaagcggcccttcttcacctcgccggatgacatgctcgaggaggagtactacgacgagcagctcccggagaagaagcggcgcctcaccccggagcaggtccacctgctggagaggagcttcgaggaggagaataagctggagccggagaggaagacggagctggcccgcaagctcgggctgcagccacgccaggtggccgtctggttccagaaccgccgcgcccggtggaagacaaagacgctggagcgcgacttcgaccgcctcaaggcgtccttcgacgccctccgggccgaccacgacgccctcctccaggacaaccaccggctccggtcacaggtggtaacgttgaccgagaagatgcaagataaggaggcgccggaaggcagcttcggtgcagccgtcgacgccttggagccggagcaggcggcggcggaggcgaaggcttccttggccaacgccgaggaacatgccgcggcagcggaggcgttcgaggtggtgcagcagcagctgcatgtgaaggacgaggagaggctgagcccggggagcggcgggagcgcggtgctggacgcgagggacgcgctgctcgggagcggatgcggtctcgccggcgtggtggacagcagcgtggactcgtactgcttcccggggggcgccggcggcgacgagtaccacgagtgcgtgatgggccccgtggcgggcggcatccagtcggaggaggacgacggcgcgggcagcgacgagggctgcagctactaccccgacgacgccgccgtcttcttcgccgccgcgcaagggcacggccaccatcacacggacgacgacgatcagcaggacgacggccagatcagctactggatgtggaactaggctcgcgcacgcatcaagaagcgtgcgtgcgtgcgccgtggaatcgatcaatttcggagtatatcagtaaaagaaatcgtggcgttttgttttctctccttgtatgcttcccgctgtaatcttgggtcactacgatcgaccaagttgtatgcatatgcattgtactacgagttagggtaatacatcggtggtaaaatctgtcgtgatgtacgggaaataagtgaacggagtcagagcctcattcttatggcac

SEQ ID NO: 12182 - protein, 340 aa, Triticum aestivum
  misc_feature (1)..(340): Ceres Seq. ID no. 13662392
MEPGRLIFNTSGSGNGQMLFMDCGAGGIAGAAGMFHRGVRPVLGGMEEGRGVKRPFFTSPDDMLEEEYYDEQLPEKKRRLTPEQVHLLERSFEEENKLEPERKTELARKLGLQPRQVAVWFQNRRARWKTKTLERDFDRLKASFDALRADHDALLQDNHRLRSQVVTLTEKMQDKEAPEGSFGAAVDALEPEQAAAEAKASLANAEEHAAAAEAFEVVQQQLHVKDEERLSPGSGGSAVLDARDALLGSGCGLAGVVDSSVDSYCFPGGAGGDEYHECVMGPVAGGIQSEEDDGAGSDEGCSYYPDDAAVFFAAAQGHGHHHTDDDDQQDDGQISYWMWN

SEQ ID NO: 12183 - protein, 323 aa, Triticum aestivum
  misc_feature (1)..(323): Ceres Seq. ID no. 13662393
MLFMDCGAGGIAGAAGMFHRGVRPVLGGMEEGRGVKRPFFTSPDDMLEEEYYDEQLPEKKRRLTPEQVHLLERSFEEENKLEPERKTELARKLGLQPRQVAVWFQNRRARWKTKTLERDFDRLKASFDALRADHDALLQDNHRLRSQVVTLTEKMQDKEAPEGSFGAAVDALEPEQAAAEAKASLANAEEHAAAAEAFEVVQQQLHVKDEERLSPGSGGSAVLDARDALLGSGCGLAGVVDSSVDSYCFPGGAGGDEYHECVMGPVAGGIQSEEDDGAGSDEGCSYYPDDAAVFFAAAQGHGHHHTDDDDQQDDGQISYWMWN

SEQ ID NO: 12184 - protein, 320 aa, Triticum aestivum
  misc_feature (1)..(320): Ceres Seq. ID no. 13662394
MDCGAGGIAGAAGMFHRGVRPVLGGMEEGRGVKRPFFTSPDDMLEEEYYDEQLPEKKRRLTPEQVHLLERSFEEENKLEPERKTELARKLGLQPRQVAVWFQNRRARWKTKTLERDFDRLKASFDALRADHDALLQDNHRLRSQVVTLTEKMQDKEAPEGSFGAAVDALEPEQAAAEAKASLANAEEHAAAAEAFEVVQQQLHVKDEERLSPGSGGSAVLDARDALLGSGCGLAGVVDSSVDSYCFPGGAGGDEYHECVMGPVAGGIQSEEDDGAGSDEGCSYYPDDAAVFFAAAQGHGHHHTDDDDQQDDGQISYWMWN

SEQ ID NO: 12185 - DNA, 927 bp, Triticum aestivum
  misc_feature (1)..(927): Ceres Seq. ID no. 13662452
accaccctccctccatccacacctcagcctcagctcacctgctcctgctctccttgcctccctccatccgtcctccttgggattgggagagaagagaccacgagcaactcatccaaacaatgaagagcaggacgcagagcggccgcggaggagccatggtcgccgacgggggcagcaagatggagcgcaaggaggtggagaagaaccggcggctgcacatgaagggactctgcctcaagctctcctccctcctcccctcctcctcctcagcccaccacctccgccattattcttcctcgccgccgtccagcaacaaggacgcgacgacgcagctggaccagctggacagcgcggcggcgtacatcaagaagctcaagagccgggtcgacgaactcaagcgccgcaagcaggccgtcgtctccggcaccgctggctgctcgtcctccgtctccgccggcgactacaagggagcagcactgtccacaactgcgctgcctgtgatcgaggtgcggcaccaggacggaacgctggacgtggcgctggcgagcgaggccgggcggccgttccggctgcacgaggtgatcgccgtcctggagcaggagggcgccgaggtggtcagcgccagcttttcggtcgtgggtgacaagatcttctacacggtccattcccaggcattgtacccccgcatcggcctcgaggccggccgggtcgcccaccggctgcgcggcctcgccgcagccgcagccatctcgccgtcggtcctcctgacatgatctctttctctctttcttcgttgttttgccatggtgacagattagctgatctatgggcagcttagcttagtactgctctactctgctcgtgagtgagcttcaggtttgtctgaaatctactagtgtaggcacgtgcttgcgtatcctcctttct

SEQ ID NO: 12186 - protein, 256 aa, Triticum aestivum
  misc_feature (1)..(256): Ceres Seq. ID no. 13662453
HPPSIHTSASAHLLLLSLPPSIRPPWDWERRDHEQLIQTMKSRTQSGRGGAMVADGGSKMERKEVEKNRRLHMKGLCLKLSSLLPSSSSAHHLRHYSSSPPSSNKDATTQLDQLDSAAAYIKKLKSRVDELKRRKQAVVSGTAGCSSSVSAGDYKGAALSTTALPVIEVRHQDGTLDVALASEAGRPFRLHEVIAVLEQEGAEVVSASFSVVGDKIFYTVHSQALYPRIGLEAGRVAHRLRGLAAAAAISPSVLLT

SEQ ID NO: 12187 - protein, 217 aa, Triticum aestivum
  misc_feature (1)..(217): Ceres Seq. ID no. 13662454
MKSRTQSGRGGAMVADGGSKMERKEVEKNRRLHMKGLCLKLSSLLPSSSSAHHLRHYSSSPPSSNKDATTQLDQLDSAAAYIKKLKSRVDELKRRKQAVVSGTAGCSSSVSAGDYKGAALSTTALPVIEVRHQDGTLDVALASEAGRPFRLHEVIAVLEQEGAEVVSASFSVVGDKIFYTVHSQALYPRIGLEAGRVAHRLRGLAAAAAISPSVLLT

SEQ ID NO: 12188 - protein, 213 aa, Triticum aestivum
  misc_feature (1)..(213): Ceres Seq. ID no. 13662455
PPSLHPHLSLSSPAPALLASLHPSSLGLGEKRPRATHPNNEEQDAERPRRSHGRRRGQQDGAQGGGEEPAAAHEGTLPQALLPPPLLLLSPPPPPLFFLAAVQQQGRDDAAGPAGQRGGVHQEAQEPGRRTQAPQAGRRLRHRWLLVLRLRRRLQGSSTVHNCAACDRGAAPGRNAGRGAGERGRAAVPAARGDRRPGAGGRRGGQRQLFGRG

SEQ ID NO: 12189 - DNA, 1377 bp, Triticum aestivum
  misc_feature (1)..(1377): Ceres Seq. ID no. 13662567
cccgccccgccccgccccttccctccctcccttcctcccccaaattcgcccaacaccttcggaaccccaatggcgagctttaacgccgccggcgccggcgccgccaaccccaaccctaacaaatccctcgaggtgcgtgcgcttggccaatactgttgcccttggtctaaatggctaaaacctaatgtgtgggtcgattcgaccggggactgccttcgtttcgtgcaggtgaatccggcgcccggggactcggtttccagcctcagcttcagccccaaggcgaaccacctaattgccacctcctgggacaaccaggttcggtgctgggaggttcagcctggcggccaatgccaggcgaaggcgtctatttcgcacgatcagccagtcttgtgctctgcctggaaggatgacgggactactgttttttcgggaggttgtgacaaagtggtgaagatgtggccgctgctgtctggcggccaggccacggccttctcagggcatgaggcgccggtcaaagaactcgcctggataccacagatgagccttcttgtcagtgggtcttgggataagactctgaggtactgggacattcggcaacctaatccagctcatgttcagcaacttccggagcgctgctatgcactctcacttagttatcctctaatggcggtcggtactgctgatcgcaacgtagttatcttcaatctgcagaatccacaggctgaattcaagaggatcgtgtcacctttgaaattccagacaaggtgtatcgccgccttccctgatcaacaaggattcttggttggatcaatagagggacgcgttggtgttcatcatgtagatgattctaatcaaagcaagaatttcacattcaaatgtcaccgcgagggcaatgatatattctctgttaactcgctgaactttcatcctgtgcaccatacatttgctactgcaggctctgatggaggtttcaacttttgggacaaggacagtaaacaaagactgaaggcttttagtaagtgcccatcacccatcacatgcagcacatttaatcaggatggctcaatctttgcttatgcggtatgctatgattggagcaagggtgccgagaagcataatccttctactgcaaagacaaatatctttctgcatagcgtgcaggaatctgatgtcaaaggaaagccccgtactggaaaaaagtagacttggaaatggcaagctgcagatctgtgctccgaacctgatgagtttgccgtcgcttgatgctaattacccgcacgagtgttttaatcttttagatcttgactctgtagggcattccttcatctctgagactgcaggcgtatcttctataatgtttaaacacaataaagtggg

SEQ ID NO: 12190 - protein, 400 aa, Triticum aestivum
  misc_feature (1)..(400): Ceres Seq. ID no. 13662568
PAPPRPFPPSLPPPNSPNTFGTPMASFNAAGAGAANPNPNKSLEVRALGQYCCPWSKWLKPNVWVDSTGDCLRFVQVNPAPGDSVSSLSFSPKANHLIATSWDNQVRCWEVQPGGQCQAKASISHDQPVLCSAWKDDGTTVFSGGCDKVVKMWPLLSGGQATAFSGHEAPVKELAWIPQMSLLVSGSWDKTLRYWDIRQPNPAHVQQLPERCYALSLSYPLMAVGTADRNVVIFNLQNPQAEFKRIVSPLKFQTRCIAAFPDQQGFLVGSIEGRVGVHHVDDSNQSKNFTFKCHREGNDIFSVNSLNFHPVHHTFATAGSDGGFNFWDKDSKQRLKAFSKCPSPITCSTFNQDGSIFAYAVCYDWSKGAEKHNPSTAKTNIFLHSVQESDVKGKPRTGKK

SEQ ID NO: 12191 - protein, 377 aa, Triticum aestivum
  misc_feature (1)..(377): Ceres Seq. ID no. 13662569
MASFNAAGAGAANPNPNKSLEVRALGQYCCPWSKWLKPNVWVDSTGDCLRFVQVNPAPGDSVSSLSFSPKANHLIATSWDNQVRCWEVQPGGQCQAKASISHDQPVLCSAWKDDGTTVFSGGCDKVVKMWPLLSGGQATAFSGHEAPVKELAWIPQMSLLVSGSWDKTLRYWDIRQPNPAHVQQLPERCYALSLSYPLMAVGTADRNVVIFNLQNPQAEFKRIVSPLKFQTRCIAAFPDQQGFLVGSIEGRVGVHHVDDSNQSKNFTFKCHREGNDIFSVNSLNFHPVHHTFATAGSDGGFNFWDKDSKQRLKAFSKCPSPITCSTFNQDGSIFAYAVCYDWSKGAEKHNPSTAKTNIFLHSVQESDVKGKPRTGKK

SEQ ID NO: 12192 - protein, 249 aa, Triticum aestivum
  misc_feature (1)..(249): Ceres Seq. ID no. 13662570
MWPLLSGGQATAFSGHEAPVKELAWIPQMSLLVSGSWDKTLRYWDIRQPNPAHVQQLPERCYALSLSYPLMAVGTADRNVVIFNLQNPQAEFKRIVSPLKFQTRCIAAFPDQQGFLVGSIEGRVGVHHVDDSNQSKNFTFKCHREGNDIFSVNSLNFHPVHHTFATAGSDGGFNFWDKDSKQRLKAFSKCPSPITCSTFNQDGSIFAYAVCYDWSKGAEKHNPSTAKTNIFLHSVQESDVKGKPRTGKK

SEQ ID NO: 12193 - DNA, 2111 bp, Triticum aestivum
  misc_feature (1)..(2111): Ceres Seq. ID no. 13662574
agaacatcctaatcgaaaaaaccaaaaattattagaggcgacgaagaagggtgcgaacccgccgccgttccgggttccgattagatagagctgtcgcgccgccgatcccgtcgccccgccgcgccgagcttacagtttgtgcgtcatggggacttcttcaggtgcgaatttccatcaacagcctccgccccaggggatgctgccgcctcgccatggtgcccgggcccctagcctgcagacttccctctcattggcctcgtcggaacaggttggctcgcctgaaatgcaggaacctgtgtccaattctgaccagggccatgactctgccaccgaaagtgcaagttcgagggagacctggcctgtagagccggaacatagcaatgctgctgctgctagtagtggcggtgctgtgaaaaaggtggagatggaaaaggatatcagaaatggtatccccaagttgcaggttattcgtggaagctcccgcatcgatagggtgtcactgagggagattgcgcgggagagagtggacctagttgttgagaaaatgaaggtaatgccagaggagcacctggaggagattaaaaatgagctcaggtcgattctggaggggacagggggctctcatcatattgaggagtttctgtatctgcagaagtttgtccagggcagaggtgatttgacaccaactatgctttcaatggcccatcatgtccaactggagatcctcgtggcaatcaagactggaatccaggcgtttttgcaccccagcgtcaccattccccaaagccacctggtggaggtcttcttgtataagaggtgccggaacattgcttgccagagtgctctcccggctgaggaatgcagatgcaatgtatgtgctaacagaaatgggttttgcaacctttgcatgtgcgtgatttgcaacaagtttgattttgaggtcaacacatgccgatgggttgggtgcgatttctgttcccattggacgcacaccgactgtgcgattcgtgttggccagattgggacagggcaatcaattaagagcggcaccggtcatgccgaaatgctttttaggtgccaggcttgccagaagacatcagaattattcggttgggttaaggatgtgtttcaacaatgtgctcctggttgggatagggatgccttagtacgagagcttgagtttgtttgtaagatatttcgtctaagcgaagacccaaaaggaagaaatttgttcaggaaatgtgcgaatctgattgaaagattgaggaatagttctcctgattctgtcaatcctaggatgatactgcatgcacttcgagagcttgagatggattcccctaagagctctgaaaatgaagaatcgggacgcttgatcactccccaggaggcatgtaatcgtattgcagaggtagtccaagaagctgtcagaaagatggagcttgttgctgaagagaaaatgggactgtacaaaaaggctcgcaccgctgtggaggcctgtgaccgtgagcttgatgagaaggccagacaagttcaggagttcaaggccgagaggctgcggaagaagcagcaggtggaggagctcgagagcattgttcggttgaaacaggccgaggctgagatgttccagctcaaggcaagtgaggctcgccaggaggctgagaggctccagagcatcgcgcttgccaaatctgagagggctgagcaggactacgctagcctctacctcaagcggcgcctggaggaagcggaggcagagaagcagtttctttttgagaaaataaagcttcaggacggccataggcccccgcaggcgagcagcagcgtgcctgctgattcctctcaggctccctctcaggcgttgatgctgtccaaaattcaggaccttctcaagaacgttcgtaccatgccgacaaagtcggaggcgcattcaaaataagagcagcaggtgcacttcagatttgggattacatgttgtgttattgtgctaatgtatggtgacttctgtgtgatgtgttaggagtatataatgggcggtgccccccttggaaaatcgaatattaatgttgttggcgatatcgtgatatgatatactcatgtaggctacatatttc

SEQ ID NO: 12194 - protein, 596 aa, Triticum aestivum
  misc_feature (1)..(596): Ceres Seq. ID no. 15220178
MGTSSGANFHQQPPPQGMLPPRHGARAPSLQTSLSLASSEQVGSPEMQEPVSNSDQGHDSATESASSRETWPVEPEHSNAAAASSGGAVKKVEMEKDIRNGIPKLQVIRGSSRIDRVSLREIARERVDLVVEKMKVMPEEHLEEIKNELRSILEGTGGSHHIEEFLYLQKFVQGRGDLTPTMLSMAHHVQLEILVAIKTGIQAFLHPSVTIPQSHLVEVFLYKRCRNIACQSALPAEECRCNVCANRNGFCNLCMCVICNKFDFEVNTCRWVGCDFCSHWTHTDCAIRVGQIGTGQSIKSGTGHAEMLFRCQACQKTSELFGWVKDVFQQCAPGWDRDALVRELEFVCKIFRLSEDPKGRNLFRKCANLIERLRNSSPDSVNPRMILHALRELEMDSPKSSENEESGRLITPQEACNRIAEVVQEAVRKMELVAEEKMGLYKKARTAVEACDRELDEKARQVQEFKAERLRKKQQVEELESIVRLKQAEAEMFQLKASEARQEAERLQSIALAKSERAEQDYASLYLKRRLEEAEAEKQFLFEKIKLQDGHRPPQASSSVPADSSQAPSQALMLSKIQDLLKNVRTMPTKSEAHSK

SEQ ID NO: 12195 - protein, 579 aa, Triticum aestivum
  misc_feature (1)..(579): Ceres Seq. ID no. 15220179
MLPPRHGARAPSLQTSLSLASSEQVGSPEMQEPVSNSDQGHDSATESASSRETWPVEPEHSNAAAASSGGAVKKVEMEKDIRNGIPKLQVIRGSSRIDRVSLREIARERVDLVVEKMKVMPEEHLEEIKNELRSILEGTGGSHHIEEFLYLQKFVQGRGDLTPTMLSMAHHVQLEILVAIKTGIQAFLHPSVTIPQSHLVEVFLYKRCRNIACQSALPAEECRCNVCANRNGFCNLCMCVICNKFDFEVNTCRWVGCDFCSHWTHTDCAIRVGQIGTGQSIKSGTGHAEMLFRCQACQKTSELFGWVKDVFQQCAPGWDRDALVRELEFVCKIFRLSEDPKGRNLFRKCANLIERLRNSSPDSVNPRMILHALRELEMDSPKSSENEESGRLITPQEACNRIAEVVQEAVRKMELVAEEKMGLYKKARTAVEACDRELDEKARQVQEFKAERLRKKQQVEELESIVRLKQAEAEMFQLKASEARQEAERLQSIALAKSERAEQDYASLYLKRRLEEAEAEKQFLFEKIKLQDGHRPPQASSSVPADSSQAPSQALMLSKIQDLLKNVRTMPTKSEAHSK

SEQ ID NO: 12196 - protein, 550 aa, Triticum aestivum
  misc_feature (1)..(550): Ceres Seq. ID no. 15220180
MQEPVSNSDQGHDSATESASSRETWPVEPEHSNAAAASSGGAVKKVEMEKDIRNGIPKLQVIRGSSRIDRVSLREIARERVDLVVEKMKVMPEEHLEEIKNELRSILEGTGGSHHIEEFLYLQKFVQGRGDLTPTMLSMAHHVQLEILVAIKTGIQAFLHPSVTIPQSHLVEVFLYKRCRNIACQSALPAEECRCNVCANRNGFCNLCMCVICNKFDFEVNTCRWVGCDFCSHWTHTDCAIRVGQIGTGQSIKSGTGHAEMLFRCQACQKTSELFGWVKDVFQQCAPGWDRDALVRELEFVCKIFRLSEDPKGRNLFRKCANLIERLRNSSPDSVNPRMILHALRELEMDSPKSSENEESGRLITPQEACNRIAEVVQEAVRKMELVAEEKMGLYKKARTAVEACDRELDEKARQVQEFKAERLRKKQQVEELESIVRLKQAEAEMFQLKASEARQEAERLQSIALAKSERAEQDYASLYLKRRLEEAEAEKQFLFEKIKLQDGHRPPQASSSVPADSSQAPSQALMLSKIQDLLKNVRTMPTKSEAHSK

SEQ ID NO: 12197 - DNA, 937 bp, Triticum aestivum
  misc_feature (1)..(937): Ceres Seq. ID no. 13662587
gattaagcaagcatctgccttcaatatctcctgtattttctcatctaattagccacgcttgaagttcatacttgaaccatatttcctgctcttcttcgtgctaatcggctggccacttccagaaaccaatttctgtcctcagttttagtattgtgattctagattagaaaaaagagaaccaggtgatcgagcgaggtgaggcaatgggaggcaccctgcggttcctgtcggatgtgctgctaggtagcagcagccagaggcagcacagcaagaagcggaggcagttcaacacggtggagctcaaggtgaagatggactgcgacggctgcgagctcaagatccggaacaccctcgccaacatgagaggagctcagtcggtggagatcaaccggaagcagcacaaggtgacggtgaaggggttcgtggagccgcagcgtgtgctgaggagagtccagtcgacggggaagcgggccgagctctggccgtacgtgccttacacaaacccctacatggcgccggtgtacgacaagcgggctcccgccggccacgtgcgcaaggtggaaggtgtcatgccggtctccaccgggcaggaggagcgcctcgccacgatcttcagcgacgacaacccaaacgcctgctccgtcatgtagtcatgctcatgcaagtcactgcgccaaaagaccctttgcttcttcttcctttttcgggggtgattcctaccaaacgaccctctgctgaactttctccaccgacagactataaaatagcccattagtagaactactattacaaaactcgtcaacgatgcttgtaacaaaagactcatatttttaataatttaacaaagtactgtaatatatggtgaacgctatggtgaagctgatgctagcaagatttcatcgtatttcagaaatttaaaattatttgaagctagccc

SEQ ID NO: 12198 - protein, 148 aa, Triticum aestivum
  misc_feature (1)..(148): Ceres Seq. ID no. 13662588
MGGTLRFLSDVLLGSSSQRQHSKKRRQFNTVELKVKMDCDGCELKIRNTLANMRGAQSVEINRKQHKVTVKGFVEPQRVLRRVQSTGKRAELWPYVPYTNPYMAPVYDKRAPAGHVRKVEGVMPVSTGQEERLATIFSDDNPNACSVM

SEQ ID NO: 12199 - protein, 112 aa, Triticum aestivum
  misc_feature (1)..(112): Ceres Seq. ID no. 13662589
MDCDGCELKIRNTLANMRGAQSVEINRKQHKVTVKGFVEPQRVLRRVQSTGKRAELWPYVPYTNPYMAPVYDKRAPAGHVRKVEGVMPVSTGQEERLATIFSDDNPNACSVM

SEQ ID NO: 12200 - protein, 96 aa, Triticum aestivum
  misc_feature (1)..(96): Ceres Seq. ID no. 13662590
MRGAQSVEINRKQHKVTVKGFVEPQRVLRRVQSTGKRAELWPYVPYTNPYMAPVYDKRAPAGHVRKVEGVMPVSTGQEERLATIFSDDNPNACSVM

SEQ ID NO: 12201 - DNA, 1374 bp, Triticum aestivum
  misc_feature (1)..(1374): Ceres Seq. ID no. 13662634
actcaattacggacccctcaaatcaaaacccaaacacaaaaccctgtcgcgctctgaccgaccgtcataccgcctaccatggcctccctctcgccgtcaccgccccgccgcacacccaccgccggcgggaggcagtcccccttcttccgcgacctcgcccctgccatcccttcccaccggacctccgggtccctcgacccctcatccacgccgcccccgccgccgccccttttcaccctcgacgaccgcctatacgcacaggatttctcccctgatcgatccgcctccaacctcctccccgtcgctccatccccatccccacccacacgcgcttcctccggcaatcgccctccctcgtgggaccgttcccgcgccgttccccccggtccgtgctcgctgagtgactggctcgtggagccggcccgtaaagaggtcctcgcgctgcccccgccatcgccgcctcctactcgtgcggcgaacgcggaggtgcgatcgccggtgattccgttgcctgcgccgtctaggacggctccatcagcgaccgtcacgggggccgacggggaggagtgggtcaccgtgttcggattcaccgcgagggagaccaaccttgttctgcgagagtttgggaagtgtggagtgatactgagacactgctctggcccaagagatggtaattggcttcacatattgtatcagcaccaatatgatgctcgaagggcccttgaaaagaatggaatccagctgtttagtggtgttgcaattggggttaaaattactgatccagtgcagcggcaaatggatgagaagatgagtgagagcaattataagggcttcatggtctccttgccttcgaaatcatctatacagaatgcaggggcatcaagcaatttaggagatctcccacgtccctatgacccaaaagctggcagaaatgttaacagagacatggggtgttcaacaggaagtgttgccatgccagcaaaatcagtattggcgaaaactatggacttgatttttggcatttgatatgcagtgctggagattctatgatatttttctacccttgctcgtcgcttctgtggattctctttttgtcaatgcatgtgctgatctgcgagttccttatttctagttctagtgtctgaagatggtattgtttttcactgcagttgaagtagttcttttccccagcatctgagcatatctattcctgggttctgttgtgtagtatttgcaatgtgaaacgtttgcgttggcaatgtaatatactacagtacctttctaaagtggcgagaggtgtaaaagggttttgatgattatacatggtgttatactcagaccagaaatgatggccagtcatttttcattgcttcg

SEQ ID NO: 12202 - protein, 315 aa, Triticum aestivum
  misc_feature (1)..(315): Ceres Seq. ID no. 15220711
MASLSPSPPRRTPTAGGRQSPFFRDLAPAIPSHRTSGSLDPSSTPPPPPPLFTLDDRLYAQDFSPDRSASNLLPVAPSPSPPTRASSGNRPPSWDRSRAVPPGPCSLSDWLVEPARKEVLALPPPSPPPTRAANAEVRSPVIPLPAPSRTAPSATVTGADGEEWVTVFGFTARETNLVLREFGKCGVILRHCSGPRDGNWLHILYQHQYDARRALEKNGIQLFSGVAIGVKITDPVQRQMDEKMSESNYKGFMVSLPSKSSIQNAGASSNLGDLPRPYDPKAGRNVNRDMGCSTGSVAMPAKSVLAKTMDLIFGI

SEQ ID NO: 12203 - DNA, 1171 bp, Triticum aestivum
  misc_feature (1)..(1171): Ceres Seq. ID no. 13662721
gaatatacggttacacccacaagcttcccctgcacacacgcgaccaactcttacgccgccgccgccgccgccggcggagagatggactcccggggcttcgattccacgggccgcgagttttccagcgccacggagatgtgggcccaggagatcggcgccaccgcctccgcctcggcctccgaagtccctccgggcgccgccgccgcggctccaagcaatggggacgccggcgaggaggcgggcggagaagggaagcgcgaggagtggtactccaaaggaatcgcctactggcagggcgtggaggcgtcgaccgagggcgtcctgggagggtacgggtgcgtcaacgacgccgacgtcaagggcagcgccgccttcctccgccctctcctcaccgagcgattcggcgccgcgaagcgccatcttgtcgcgcttgattgtggctcgggcatcgggcgggttacaaagaattttcttatcaagcatttcaatgaggttgatctcgttgagccagtagcccattttctagaagcggcacgggaaaatcttagtagctgtatggatgtagagcaggatacgcataaggctgcaaacttttattgtacacctcttcaggacttcactcctgaggaaggaagatatgatgtgatatggatccagtggtgcatagggcaacttactgatgatgattttatttcattttttaaccgcgcaaaggttgggctcaaaccagatggtttttttgttctgaaagagaacattgcaaaaaatggatttgttttagacaaggaggataacagtgtcactaggtctgatgcatatttcagggagctatttaacaagtgtggattgtatatccacagcatcaagaaccaaaaggagctaccagaggaactatttgctgtcagaatgtacgcattggtgaccagccagccaaaggtcacaaaaaatggcaagagagggcggcctaaaaattcaccccgtataatccgctcttgaaggggggactattgtgccagcgtattgtctggcaatgtactgttgttcacttgtttctagtcgcaatttagctcggtctacattttgttttgagcatgctgtctttttcagagatcaaatccactagttgctgtcgaaacttaatgcatatggcatctagcaccttttgattctg

SEQ ID NO: 12204 - protein, 331 aa, Triticum aestivum
  misc_feature (1)..(331): Ceres Seq. ID no. 13662722
EYTVTPTSFPCTHATNSYAAAAAAGGEMDSRGFDSTGREFSSATEMWAQEIGATASASASEVPPGAAAAAPSNGDAGEEAGGEGKREEWYSKGIAYWQGVEASTEGVLGGYGCVNDADVKGSAAFLRPLLTERFGAAKRHLVALDCGSGIGRVTKNFLIKHFNEVDLVEPVAHFLEAARENLSSCMDVEQDTHKAANFYCTPLQDFTPEEGRYDVIWIQWCIGQLTDDDFISFFNRAKVGLKPDGFFVLKENIAKNGFVLDKEDNSVTRSDAYFRELFNKCGLYIHSIKNQKELPEELFAVRMYALVTSQPKVTKNGKRGRPKNSPRIIRS

SEQ ID NO: 12205 - protein, 304 aa, Triticum aestivum
  misc_feature (1)..(304): Ceres Seq. ID no. 13662723
MDSRGFDSTGREFSSATEMWAQEIGATASASASEVPPGAAAAAPSNGDAGEEAGGEGKREEWYSKGIAYWQGVEASTEGVLGGYGCVNDADVKGSAAFLRPLLTERFGAAKRHLVALDCGSGIGRVTKNFLIKHFNEVDLVEPVAHFLEAARENLSSCMDVEQDTHKAANFYCTPLQDFTPEEGRYDVIWIQWCIGQLTDDDFISFFNRAKVGLKPDGFFVLKENIAKNGFVLDKEDNSVTRSDAYFRELFNKCGLYIHSIKNQKELPEELFAVRMYALVTSQPKVTKNGKRGRPKNSPRIIRS

SEQ ID NO: 12206 - protein, 286 aa, Triticum aestivum
  misc_feature (1)..(286): Ceres Seq. ID no. 13662724
MWAQEIGATASASASEVPPGAAAAAPSNGDAGEEAGGEGKREEWYSKGIAYWQGVEASTEGVLGGYGCVNDADVKGSAAFLRPLLTERFGAAKRHLVALDCGSGIGRVTKNFLIKHFNEVDLVEPVAHFLEAARENLSSCMDVEQDTHKAANFYCTPLQDFTPEEGRYDVIWIQWCIGQLTDDDFISFFNRAKVGLKPDGFFVLKENIAKNGFVLDKEDNSVTRSDAYFRELFNKCGLYIHSIKNQKELPEELFAVRMYALVTSQPKVTKNGKRGRPKNSPRIIRS

SEQ ID NO: 12207 - DNA, 1055 bp, Triticum aestivum
  misc_feature (1)..(1055): Ceres Seq. ID no. 13662746
ccrtttaamcwagaacatcctaatcgaaaaacgaggcggagttgaaattccacacggcctctctcttcgccttcgcctgccccctctcgtgctcgcgagccgcgtcaaaaccctagccaccttctgcccaccacatgcaccgcggcagcgaccgctccggcgacccctccggccccgcgggcggcgctcgcagcggcgcggacggcagattcgcgcgcggaccctcgcgctggtccggcggcggcgggggtagccccccgccccaccgctcctcccgcggcgggagcagcgacggcggcggaggcggaggcggaggcgggaggttccatccgtaccgtgcgccgtctgaatacgttgttggcggtggtggaactggagggtacagaggcggcggcggcggcggcggcgacttcggtgagacggccggtggagcgaggagccgctacggaggcggtggcgggggaggccgtggagactactcagatcatgataacaaaagtggttatgttaaactttttgttggatcagttccaagaacagcaaatgaagatgatgttcgacctttattcgaggatcatggagatgttcttgaagttgctttgatcagggataggaaaactggtgaacaacaaggtgagccataagtatatttttcttatattatcaatataccagtatcgctttcttttcaggttctgagagtattaggagcaacaaggttgcatcttctttcagttagatttggcggttgttgaattttgtttcctgcgcttccgttctgtttcttcgtctgggttaatagaaggcaagaaaggaagcagctaactcttggctggttactgtaatctaactaggctccaccctgctggtacataaggtagcagatttgaacaaacaactttgttcaggtcatagcaatcttgtgcttgttgccgtgttcaatgtagtatgaccagaaataactaagggtgctgtgttactgttgcatctatttgttttgaatgcgatgcaaaaggccagaggacctcctaatgaattaagattaacttttcatt

SEQ ID NO: 12208 - protein, 169 aa, Triticum aestivum
  misc_feature (1)..(169): Ceres Seq. ID no. 15220184
MHRGSDRSGDPSGPAGGARSGADGRFARGPSRWSGGGGGSPPPHRSSRGGSSDGGGGGGGGGRFHPYRAPSEYVVGGGGTGGYRGGGGGGGDFGETAGGARSRYGGGGGGGRGDYSDHDNKSGYVKLFVGSVPRTANEDDVRPLFEDHGDVLEVALIRDRKTGEQQGEP

SEQ ID NO: 12209 - DNA, 1770 bp, Triticum aestivum
  misc_feature (1)..(1770): Ceres Seq. ID no. 13662762
attctaaaattgcctcgactaacaccagcgcagcagctagcttacctccatcgtgtgtgtccgtctgtccatggcgccgtcggagacgatgctggagtcggcggcgtacaggcggatgaaggcggagaacccgtccgagttcgtgccgcgcagcgtcttcttcgcgcgcgacggcggcagcggcatcgaccgccgcaacagcctctgggtcaaggcggcgctcgtctacgagtccgtcaccggcagccacgtcgacgacggcgtcaagcccctcgccaccagcctcttcctccaggtcgcccgcgaatgccgctcccgcatccccgacgacccaccgcagaccaaggccacggtggtgacggacgccctcaaaaaagtaccggctgccgtggctacgcctattgccggcgcgggcggcggcgaagatgactcagaggagaaaccgaacaagacggcggagctgcacgacgaagaaaaggagtcggacgacaagcaggtgatcgacgccgtcttcctcgtcgtcggcttcctcacgaggctggtcaagaccgccgcgggcgtcaggcgcgacgccgtcgacgaggggttcaagtccacgcacatgcaggacatcgtcacggacatgatcaagctggagaaccagctccccctcaagctcatcctcgacgtcgtcgagcacgtccaggacgcggcacgcgccgtcgccgccgaagccaggttcgaggggctccggaaatgcctcgaggggtacaagctcggcttcaaccccgccaccttcttcgacgacgtcgtcaggcccttctgctggtactactcgcccttcttcaacaagcagctgccggccgtggaccgcggcatgttcgacggcaaccacgagatcacgctcctggacttcctgcgcgccagcgtggtgccggcgccgccgggcgcggagaagggggcggccgccggcggcaggacgtcccgcatgccgacggccagggagctgagccgctctggcgtgcggatcgcgccgggggaggacggacgcgcgacggtggagttcgacgaggcgtccgccaggctgcagctgccggcgctggtgtacgacttcaagctggccacggtggcccggaacctgctggcgcgggagtacgaggagcagaacaagccggtgacgcgctacttccagatgatgaacgagctcgtcgacgaggcggccgacgccaagatcctccgccgcgccggcgccgtgcgcggtggcggggcgtccggcgccgaggtgcacgagctggtcaagcgcatcgacggctacgcgacgtacccgtcggtgtacatggccatggacgtgcagatcgcgaaggtgaggcggttccacgacatgaggatgcagaacttcctcgtccgctaccgccccggcgtcatctgggcgtcgtcggtggccgccgtctccttggtcgccattgtcgccgccaggagacgggggtgaggaagccaacggcggctaaccaaggcccgcgcatgaagattgtacaacttgaagtgtaatgttgtgtcttgtggttgtgtaccggtgtacaatgtgtaagtccaagcaaagatgattggatgcggggatttgtgggggctcgccatcctattgctaataatgattaattgcatgatagtccatgcaatttggtgcagattatgccaatccatgtaactgtaatcatagcttcactcatcaccaagatagggggtgagatttggagatgcaaaatggagtacaaatgaggacgtgagatactt

SEQ ID NO: 12210 - protein, 465 aa, Triticum aestivum
  misc_feature (1)..(465): Ceres Seq. ID no. 13662763
MAPSETMLESAAYRRMKAENPSEFVPRSVFFARDGGSGIDRRNSLWVKAALVYESVTGSHVDDGVKPLATSLFLQVARECRSRIPDDPPQTKATVVTDALKKVPAAVATPIAGAGGGEDDSEEKPNKTAELHDEEKESDDKQVIDAVFLVVGFLTRLVKTAAGVRRDAVDEGFKSTHMQDIVTDMIKLENQLPLKLILDVVEHVQDAARAVAAEARFEGLRKCLEGYKLGFNPATFFDDVVRPFCWYYSPFFNKQLPAVDRGMFDGNHEITLLDFLRASVVPAPPGAEKGAAAGGRTSRMPTARELSRSGVRIAPGEDGRATVEFDEASARLQLPALVYDFKLATVARNLLAREYEEQNKPVTRYFQMMNELVDEAADAKILRRAGAVRGGGASGAEVHELVKRIDGYATYPSVYMAMDVQIAKVRRFHDMRMQNFLVRYRPGVIWASSVAAVSLVAIVAARRRG

SEQ ID NO: 12211 - protein, 459 aa, Triticum aestivum
  misc_feature (1)..(459): Ceres Seq. ID no. 13662764
MLESAAYRRMKAENPSEFVPRSVFFARDGGSGIDRRNSLWVKAALVYESVTGSHVDDGVKPLATSLFLQVARECRSRIPDDPPQTKATVVTDALKKVPAAVATPIAGAGGGEDDSEEKPNKTAELHDEEKESDDKQVIDAVFLVVGFLTRLVKTAAGVRRDAVDEGFKSTHMQDIVTDMIKLENQLPLKLILDVVEHVQDAARAVAAEARFEGLRKCLEGYKLGFNPATFFDDVVRPFCWYYSPFFNKQLPAVDRGMFDGNHEITLLDFLRASVVPAPPGAEKGAAAGGRTSRMPTARELSRSGVRIAPGEDGRATVEFDEASARLQLPALVYDFKLATVARNLLAREYEEQNKPVTRYFQMMNELVDEAADAKILRRAGAVRGGGASGAEVHELVKRIDGYATYPSVYMAMDVQIAKVRRFHDMRMQNFLVRYRPGVIWASSVAAVSLVAIVAARRRG

SEQ ID NO: 12212 - protein, 450 aa, Triticum aestivum
  misc_feature (1)..(450): Ceres Seq. ID no. 13662765
MKAENPSEFVPRSVFFARDGGSGIDRRNSLWVKAALVYESVTGSHVDDGVKPLATSLFLQVARECRSRIPDDPPQTKATVVTDALKKVPAAVATPIAGAGGGEDDSEEKPNKTAELHDEEKESDDKQVIDAVFLVVGFLTRLVKTAAGVRRDAVDEGFKSTHMQDIVTDMIKLENQLPLKLILDVVEHVQDAARAVAAEARFEGLRKCLEGYKLGFNPATFFDDVVRPFCWYYSPFFNKQLPAVDRGMFDGNHEITLLDFLRASVVPAPPGAEKGAAAGGRTSRMPTARELSRSGVRIAPGEDGRATVEFDEASARLQLPALVYDFKLATVARNLLAREYEEQNKPVTRYFQMMNELVDEAADAKILRRAGAVRGGGASGAEVHELVKRIDGYATYPSVYMAMDVQIAKVRRFHDMRMQNFLVRYRPGVIWASSVAAVSLVAIVAARRRG

SEQ ID NO: 12213 - DNA, 582 bp, Triticum aestivum
  misc_feature (1)..(582): Ceres Seq. ID no. 13662788
cctaatcgaaaaccgtctcgtctcccccaaccaggcgaaaaccagcatcgcgaacggcaccagaccaaacccccgaatccgagccaaggagcaagggcaaaaccccatctgcggcggcggcggcggcggcggcggcggcgatggagtcggtggaggcgctcgtggcgcacatccagggtctctccgggagcccggacgagctggcgcagctccacggcctcctcaagcaggccgacggcgacgccctgcgcgtccactccgccggcctcctgcccttcctctcccacctccaccccggcgcccactccctcggctacctctacctcctggattctttcgtgtcgtcgtctgctaatctgagggcgcacgccggcggggaccttcttgtgaccgtggccgatttcctcacctcttgctcggccgaccagatacgcatggcgcccgacaaatttttgaatgtctgtagggtgctcaagaacgaggtcatgcagctcaatgcgccgatccgagggattgctccgcttcgggctgctgtccgcaagatccagacatcgtcagagcagcttaccccactccacgctg

SEQ ID NO: 12214 - protein, 147 aa, Triticum aestivum
  misc_feature (1)..(147): Ceres Seq. ID no. 13662789
MESVEALVAHIQGLSGSPDELAQLHGLLKQADGDALRVHSAGLLPFLSHLHPGAHSLGYLYLLDSFVSSSANLRAHAGGDLLVTVADFLTSCSADQIRMAPDKFLNVCRVLKNEVMQLNAPIRGIAPLRAAVRKIQTSSEQLTPLHA

SEQ ID NO: 12215 - protein, 119 aa, Triticum aestivum
  misc_feature (1)..(119): Ceres Seq. ID no. 13662790
PNRKPSRLPQPGENQHRERHQTKPPNPSQGARAKPHLRRRRRRRRRRWSRWRRSWRTSRVSPGARTSWRSSTASSSRPTATPCASTPPASCPSSPTSTPAPTPSATSTSWILSCRRLLI

SEQ ID NO: 12216 - protein, 117 aa, Triticum aestivum
  misc_feature (1)..(117): Ceres Seq. ID no. 13662791
LIENRLVSPNQAKTSIANGTRPNPRIRAKEQGQNPICGGGGGGGGGDGVGGGARGAHPGSLREPGRAGAAPRPPQAGRRRRPARPLRRPPALPLPPPPRRPLPRLPLPPGFFRVVVC

SEQ ID NO: 12217 - DNA, 603 bp, Triticum aestivum
  misc_feature (1)..(603): Ceres Seq. ID no. 13662816
aacttgttacagcctacccacataaaatctccgtcgatccaccacaccctgcaatggcgtccgcgctcaccaacgtgagcctgtctaccttcgcgcccacggccaggggcgacgtcctcgcgaggccgcaggtggccgccgcccgcgtcaccttcccgacggcgcaccgcggcagcggcgccctctcctgcagggcgggcgggccggccacgccgccgggcatctccgacaagatgtcggacagcatcaaggaggcccaggagacgtgctcggaggacgccgccagcggggagtgcgcggcggcgtgggacgaggtggaggagctcagcgccgccgccagccacgcccgggacaagctcaaggactccgacccgctggagaactactgcaaggagaaccccgagaccgacgagtgccgcacctacgacagctgagcgtacgtgctaatctcttctggatggcggatggtgaaggtggacgtggtgttcttggctcgtgggagcccgagaaacctgctatgtctcaacctaccgttacttacacgatcgggatgtatgtagtaaaaacgctccaaatattttccctgggacatacgtggttgat

SEQ ID NO: 12218 - protein, 143 aa, Triticum aestivum
  misc_feature (1)..(143): Ceres Seq. ID no. 13662817
LVTAYPHKISVDPPHPAMASALTNVSLSTFAPTARGDVLARPQVAAARVTFPTAHRGSGALSCRAGGPATPPGISDKMSDSIKEAQETCSEDAASGECAAAWDEVEELSAAASHARDKLKDSDPLENYCKENPETDECRTYDS

SEQ ID NO: 12219 - protein, 126 aa, Triticum aestivum
  misc_feature (1)..(126): Ceres Seq. ID no. 13662818
MASALTNVSLSTFAPTARGDVLARPQVAAARVTFPTAHRGSGALSCRAGGPATPPGISDKMSDSIKEAQETCSEDAASGECAAAWDEVEELSAAASHARDKLKDSDPLENYCKENPETDECRTYDS

SEQ ID NO: 12220 - DNA, 382 bp, Triticum aestivum
  misc_feature (1)..(382): Ceres Seq. ID no. 13662823
tcttcgtttcgtgctttcctctccttcttcctagcgcgcgcagacttgtccgccacttcacggaaattcccccaggaatacttctacatatatatacgccgcccgcctccattccggtgttcctagtttccactcatccgccgccgcacccgaatccccgccccacgaagcttcgtcgcgcaaggtgatgcttttagcaacaacaggcatcaaacaatgtcgatgagttacgatgggtctcaaagtgaggatcggcaaagtgaggaggttcagtcagcatacaaaaagttcagtgcaggggatgaggacgtggtaaggggttttgtaaatttggatgaaaccgaagagcaaaatgaagaaaatgagtggagttgggtgcccc

SEQ ID NO: 12221 - protein, 61 aa, Triticum aestivum
  misc_feature (1)..(61): Ceres Seq. ID no. 13662824
FVSCFPLLLPSARRLVRHFTEIPPGILLHIYTPPASIPVFLVSTHPPPHPNPRPTKLRRAR

SEQ ID NO: 12222 - protein, 55 aa, Triticum aestivum
  misc_feature (1)..(55): Ceres Seq. ID no. 13662825
MSMSYDGSQSEDRQSEEVQSAYKKFSAGDEDVVRGFVNLDETEEQNEENEWSWVP

SEQ ID NO: 12223 - protein, 53 aa, Triticum aestivum
  misc_feature (1)..(53): Ceres Seq. ID no. 13662826
MSYDGSQSEDRQSEEVQSAYKKFSAGDEDVVRGFVNLDETEEQNEENEWSWVP

SEQ ID NO: 12224 - DNA, 1434 bp, Triticum aestivum
  misc_feature (1)..(1434): Ceres Seq. ID no. 13662855
aacgctccccgcaaccctccaaaccaaagccccccaccgctctctcgcccccacccataaacccccgccgcccagatcctcctcctcctccctcctccccgtcgccgcgccgccgccgccatgcatcccgacgccacctccccctcccaccgcatcgcccgcgtcgccgcgcacctcaacccgacacgcccgcagatggaggagggcgcggcgctgaggcccgcggcgtgccgcgccaagggcggcgcgccggggttcaaggtggcggtggtgggcgcggccgggggcatcggccagtcgctgtcgctgctcatgaagatgaacccgctcgtctccgtgctccacctctacgacgtcgtcaacacgcccggggtcaccgccgacgtcagccacatggacaccagcgccgtggtgcgcggcttcattggccaacaacagcttgaggcagcacttacaggaatggatcttgtcatcatccctgccggcctcccaagaaaaccaggaatgacaagggatgatctgttcaacaaaaatgctgggatcgttcgctcgatctgtgaaggcgttgccaagagctgtcctaatgctattgtgaatttgatcagcaaccctgtgaactcaaccgtccccattgctgcggaggttttcaagagagctggaacttactgtcccaagcgtctccttggagtgacaacacttgatgtagcgagggctaatacctttgtggcggaagtgcttggagttgatccaagagaagtcaatgttccagttgttggcgggcatgcaggggtcactatattacccctcctgtcacaggtcagccccccatgctcattcactccagatgaaatcagctatttgactaaccgcatacagaacggtggtacagaagttgtggaggcaaaggctggagcaggctctgcaactttgtcaatggcttttgctgctgcaaaattcgccgacgcgtgcctgcgaggaatgcgcggagatgctggcatcgtggagtgttcatacgtcgcatctgaggtgacagagctgccgttcttcgcatcgaaggtgaggttaggtcgtggtggagccgaagagattctccctcttgggccattgaatgactttgagagggccggcctggagaaggcgaagaaggagctgagcgagagcattgagaagggcgtgtcgttcatgaacaagtgagatcgtacgaatggaccgtccccgacctatacagatatgcaaagactaaagaaagagtgatatagtgctccaatacctgtaaagccacccctgcatgtgcaagacagtactagtactcctttagctgcactgagccttttcccccgtcgtggaatataaatcatgtactcgtactagacaagaacgtatacttttgtgaatagctggaccgaacatgtttacagccaaaaaaaaaaaaaa

SEQ ID NO: 12225 - protein, 357 aa, Triticum aestivum
  misc_feature (1)..(357): Ceres Seq. ID no. 15220192
MHPDATSPSHRIARVAAHLNPTRPQMEEGAALRPAACRAKGGAPGFKVAVVGAAGGIGQSLSLLMKMNPLVSVLHLYDVVNTPGVTADVSHMDTSAVVRGFIGQQQLEAALTGMDLVIIPAGLPRKPGMTRDDLFNKNAGIVRSICEGVAKSCPNAIVNLISNPVNSTVPIAAEVFKRAGTYCPKRLLGVTTLDVARANTFVAEVLGVDPREVNVPVVGGHAGVTILPLLSQVSPPCSFTPDEISYLTNRIQNGGTEVVEAKAGAGSATLSMAFAAAKFADACLRGMRGDAGIVECSYVASEVTELPFFASKVRLGRGGAEEILPLGPLNDFERAGLEKAKKELSESIEKGVSFMNK

SEQ ID NO: 12226 - protein, 332 aa, Triticum aestivum
  misc_feature (1)..(332): Ceres Seq. ID no. 15220193
MEEGAALRPAACRAKGGAPGFKVAVVGAAGGIGQSLSLLMKMNPLVSVLHLYDVVNTPGVTADVSHMDTSAVVRGFIGQQQLEAALTGMDLVIIPAGLPRKPGMTRDDLFNKNAGIVRSICEGVAKSCPNAIVNLISNPVNSTVPIAAEVFKRAGTYCPKRLLGVTTLDVARANTFVAEVLGVDPREVNVPVVGGHAGVTILPLLSQVSPPCSFTPDEISYLTNRIQNGGTEVVEAKAGAGSATLSMAFAAAKFADACLRGMRGDAGIVECSYVASEVTELPFFASKVRLGRGGAEEILPLGPLNDFERAGLEKAKKELSESIEKGVSFMNK

SEQ ID NO: 12227 - protein, 293 aa, Triticum aestivum
  misc_feature (1)..(293): Ceres Seq. ID no. 15220194
MKMNPLVSVLHLYDVVNTPGVTADVSHMDTSAVVRGFIGQQQLEAALTGMDLVIIPAGLPRKPGMTRDDLFNKNAGIVRSICEGVAKSCPNAIVNLISNPVNSTVPIAAEVFKRAGTYCPKRLLGVTTLDVARANTFVAEVLGVDPREVNVPVVGGHAGVTILPLLSQVSPPCSFTPDEISYLTNRIQNGGTEVVEAKAGAGSATLSMAFAAAKFADACLRGMRGDAGIVECSYVASEVTELPFFASKVRLGRGGAEEILPLGPLNDFERAGLEKAKKELSESIEKGVSFMNK

SEQ ID NO: 12228 - DNA, 1373 bp, Triticum aestivum
  misc_feature (1)..(1373): Ceres Seq. ID no. 13662898
agaacatcctaatcgaaaaacgctctcaagcaacaatctcaagtagtaggctggcagttcttctcttcccattgaaccatctgtacaagggagagaaaatcctgaagcctgactatcatcctaactagctagcttggtagaactatctcattgtgatctcctcatcaactccaaaggtagtcttttttttgagggggactccaaaggtagttaagatcttgcaatgggtggtctctctcttcagcacccgtgggcctttgcctttggcctcctaggcaacgtcatctcgttcatgacctacctggccccactgccgacgttctaccgaatctaccggagcaagtcgacgcaggggttccagtcggtcccttacgtggtggcgctctttagcgcgatgttgtggatctactacgcgctgctcaagtctgacgagtgcctcctcatcaccatcaactccgccggctgtgtcattgagaccatctacatcatcatctacctcacctatgcaccaaagcaagccaagctcttcacggcgaagatcctcctcctcctgaatgtgggtgtgttcggtcttatcctcctcctcaccctactcctgtcggagggcgagaagcgcgtcgtcatgctcgggtgggtttgcgtcggcttctctgtcagcgtcttcatcgcgcccctcagcgtcatccgccttgtggtgcgtacccggagcgtggagttcatgcctttttccctctccctctccctcactgtcagcgccgtcgtctggttcctctacggcctcctcatcaaggacaaatatgttgccctgccaaacattcttgggtttgccttcggtgtgattcaaatggggctttacgccctctaccgcaacgccatgccttcaccggctcccaagcaggtggacgatgctgatgccatcaaggtgcccgagcatgtcatccacatcgctaagcttggcccagcagctgccatcgagctcaacacacacaatcccatggaacgggggatgccaccgccgatggaggataacggcttggcctgcgccagcgacatgaccaaggggggcattgacatggttgagaaagcaacccgcgtcgagcaagtctaggcagtcatgcgttcatgcctaggatatatgcgtgcacttaagccatgatgggcaggggtcgagcaaaggagctatagggagagaaatgcatgcgcgtgagcttgtgatttccactgtcgacgttccattagttgctcgagccagttattttatcctggtcgtattcattagtatgttcatctatcaattccatgtaatggtcttattataaaagttgccattttctaatgaagcatagcaggataagaaaatggcatctcagtcc

SEQ ID NO: 12229 - protein, 294 aa, Triticum aestivum
  misc_feature (1)..(294): Ceres Seq. ID no. 15220195
MGGLSLQHPWAFAFGLLGNVISFMTYLAPLPTFYRIYRSKSTQGFQSVPYVVALFSAMLWIYYALLKSDECLLITINSAGCVIETIYIIIYLTYAPKQAKLFTAKILLLLNVGVFGLILLLTLLLSEGEKRVVMLGWVCVGFSVSVFIAPLSVIRLVVRTRSVEFMPFSLSLSLTVSAVVWFLYGLLIKDKYVALPNILGFAFGVIQMGLYALYRNAMPSPAPKQVDDADAIKVPEHVIHIAKLGPAAAIELNTHNPMERGMPPPMEDNGLACASDMTKGGIDMVEKATRVEQV

SEQ ID NO: 12230 - protein, 271 aa, Triticum aestivum
  misc_feature (1)..(271): Ceres Seq. ID no. 15220196
MTYLAPLPTFYRIYRSKSTQGFQSVPYVVALFSAMLWIYYALLKSDECLLITINSAGCVIETIYIIIYLTYAPKQAKLFTAKILLLLNVGVFGLILLLTLLLSEGEKRVVMLGWVCVGFSVSVFIAPLSVIRLVVRTRSVEFMPFSLSLSLTVSAVVWFLYGLLIKDKYVALPNILGFAFGVIQMGLYALYRNAMPSPAPKQVDDADAIKVPEHVIHIAKLGPAAAIELNTHNPMERGMPPPMEDNGLACASDMTKGGIDMVEKATRVEQV

SEQ ID NO: 12231 - protein, 237 aa, Triticum aestivum
  misc_feature (1)..(237): Ceres Seq. ID no. 15220197
MLWIYYALLKSDECLLITINSAGCVIETIYIIIYLTYAPKQAKLFTAKILLLLNVGVFGLILLLTLLLSEGEKRVVMLGWVCVGFSVSVFIAPLSVIRLVVRTRSVEFMPFSLSLSLTVSAVVWFLYGLLIKDKYVALPNILGFAFGVIQMGLYALYRNAMPSPAPKQVDDADAIKVPEHVIHIAKLGPAAAIELNTHNPMERGMPPPMEDNGLACASDMTKGGIDMVEKATRVEQV

SEQ ID NO: 12232 - DNA, 1542 bp, Triticum aestivum
  misc_feature (1)..(1542): Ceres Seq. ID no. 13662984
gtgtgtcccttcccggaagaattccccaattaaaagatctctctctctctctctctctcgtcacatccacctcactccctcgcttcctgctgccattccgcggccggacatgtcgtcgtcgggggccggcgaggagggcgccgccgcgccgcaggggccgctgcccgtggagcaccgcaagggcgccaacgggctcgacaaggtcgtcctccgcgaggcccggcgcatctccgccgaggtgtacctgtatggtggccatgtaacatcatggaaagatgagcatggggaggagctgcttttcgttagtaataaggctattttcaaacctccaaaagctatacgtggaggtataccaatctgctttcctcagttttccaacttcggacagctggaagctcatggatttgcaaggaacaagatctggagtgttgacactgatccaccaccatttccagtaccaatctctagtagagcttacatcgatttaatccttaaacctactgatgaagacttaaagatctggccacatagttttgagtaccgtctgagggttgcacttggacctggtggagatctgatgctgacttcacgtataaggaatacgaatgcagatggaaagccattctcttttacctttgcatatcacacgtacttctcaatttctgatataagtgagatacgagtagaaggcctggaaactctggattacctagacaacttacaagatagggcccgcttcactgaacaaggcgatgctattgtttttgaatctgagttggacagaatatatctgggcacgccgtcaaaaattgccattattgatcatgagaaaaaaagaacatttgttgtgaggaaaggaggacttccggatgctgttgtttggaacccatgggacaaaaaagctaaggcaatggcagattttggggatgacgaatataaacgcatggtatgtgtggaagcagctgctatagaaaaggcgattactctgaagcctggcgaggagtggactggaaaattggaactatctgcagttccgtctagttattacagtggtcaattggacccagatcgtgttattcaggattcagttgttccggaggattcagtcagctagcccttagtcaagttctgtgcaggtagactattaatatcatatgcacaagggaaatggcagccacgagtgtccaaacatttcttccattctattcaaatctttgttattttcagcgtaccgaccggaacagagcgaaaatctcaacactggtttctgtttcgggatccacatgacataaagggacaaatcagtgtttgtgccctgcatagggatgatcgaagaaacatcttagatgggttgtaaaataaatttataactgtattttctttatcagtttcttttattcccagatgagtaagtttcatagtgtggccaaaaggcgaagacgatgttgaaccacctttcagataaacacacatgatgtgtaaacatgccaaggttttgagttgcatggcttgttggtggttgcggaaccatgcttattttgg

SEQ ID NO: 12233 - protein, 370 aa, Triticum aestivum
  misc_feature (1)..(370): Ceres Seq. ID no. 13662985
CVPSRKNSPIKRSLSLSLSRHIHLTPSLPAAIPRPDMSSSGAGEEGAAAPQGPLPVEHRKGANGLDKVVLREARRISAEVYLYGGHVTSWKDEHGEELLFVSNKAIFKPPKAIRGGIPICFPQFSNFGQLEAHGFARNKIWSVDTDPPPFPVPISSRAYIDLILKPTDEDLKIWPHSFEYRLRVALGPGGDLMLTSRIRNTNADGKPFSFTFAYHTYFSISDISEIRVEGLETLDYLDNLQDRARFTEQGDAIVFESELDRIYLGTPSKIAIIDHEKKRTFVVRKGGLPDAVVWNPWDKKAKAMADFGDDEYKRMVCVEAAAIEKAITLKPGEEWTGKLELSAVPSSYYSGQLDPDRVIQDSVVPEDSVS

SEQ ID NO: 12234 - protein, 334 aa, Triticum aestivum
  misc_feature (1)..(334): Ceres Seq. ID no. 13662986
MSSSGAGEEGAAAPQGPLPVEHRKGANGLDKVVLREARRISAEVYLYGGHVTSWKDEHGEELLFVSNKAIFKPPKAIRGGIPICFPQFSNFGQLEAHGFARNKIWSVDTDPPPFPVPISSRAYIDLILKPTDEDLKIWPHSFEYRLRVALGPGGDLMLTSRIRNTNADGKPFSFTFAYHTYFSISDISEIRVEGLETLDYLDNLQDRARFTEQGDAIVFESELDRIYLGTPSKIAIIDHEKKRTFVVRKGGLPDAVVWNPWDKKAKAMADFGDDEYKRMVCVEAAAIEKAITLKPGEEWTGKLELSAVPSSYYSGQLDPDRVIQDSVVPEDSVS

SEQ ID NO: 12235 - DNA, 869 bp, Triticum aestivum
  misc_feature (1)..(869): Ceres Seq. ID no. 13662992
atcggtacttaggttgtgatcccttcaccactgcgccatgcccacatccaaggcatttctcatcttggtgctcgccgtgctcactcccatggcggcgacctcccaggacacggcgacgaacctcaccctccacaacctgtgcgcgtaccctgtgtggccgctcatcactccgaacatcggcctccccgccatccccgacctggacgacgccgccagccgcctcgacgggggcggagaggggctcgtcaccctggcgttcccttccggcgcgtggtccggccgcgtcgtggcgcgcaccggctgcagcagcagcgatgactacgactcctcctccccctcctcctcctcgacggcggcggtggccaggtgcgtcacgggcatgccgccggcgccggtgacggtggcgcaggtgagcgtgcacgggtccggcgggctggcggagtacagcgtgagcctggtggacgggttcaacctgccggtgatggtgacgccgcacgggttcgagcagggccggcagtgcccgtccctcggctgcgccgtggacctcgacgtggactgcccccgcgacgccagggcccccgccggcgggtgcagggcccagggtcaggggcacttcttcaaggagaggtgcccggacactcggacgacgccgacggacgtggaggccacgccacagcgctgcctccagcccggcgagctcaagatcgtcttctgccccgattcttccgactagtcacttgctaccacacacactaggctagctagaccggctgtgtgtcactcacgatgccggttatataataagctaagcgattgattgctgattcgctaagccagattcaaccgaataatatgttaactattcttct

SEQ ID NO: 12236 - protein, 231 aa, Triticum aestivum
  misc_feature (1)..(231): Ceres Seq. ID no. 13662993
MPTSKAFLILVLAVLTPMAATSQDTATNLTLHNLCAYPVWPLITPNIGLPAIPDLDDAASRLDGGGEGLVTLAFPSGAWSGRVVARTGCSSSDDYDSSSPSSSSTAAVARCVTGMPPAPVTVAQVSVHGSGGLAEYSVSLVDGFNLPVMVTPHGFEQGRQCPSLGCAVDLDVDCPRDARAPAGGCRAQGQGHFFKERCPDTRTTPTDVEATPQRCLQPGELKIVFCPDSSD

SEQ ID NO: 12237 - protein, 214 aa, Triticum aestivum
  misc_feature (1)..(214): Ceres Seq. ID no. 13662994
MAATSQDTATNLTLHNLCAYPVWPLITPNIGLPAIPDLDDAASRLDGGGEGLVTLAFPSGAWSGRVVARTGCSSSDDYDSSSPSSSSTAAVARCVTGMPPAPVTVAQVSVHGSGGLAEYSVSLVDGFNLPVMVTPHGFEQGRQCPSLGCAVDLDVDCPRDARAPAGGCRAQGQGHFFKERCPDTRTTPTDVEATPQRCLQPGELKIVFCPDSSD

SEQ ID NO: 12238 - protein, 131 aa, Triticum aestivum
  misc_feature (1)..(131): Ceres Seq. ID no. 13662995
RYLGCDPFTTAPCPHPRHFSSWCSPCSLPWRRPPRTRRRTSPSTTCARTLCGRSSLRTSASPPSPTWTTPPAASTGAERGSSPWRSLPARGPAASWRAPAAAAAMTTTPPPPPPPRRRRWPGASRACRRRR

SEQ ID NO: 12239 - DNA, 640 bp, Triticum aestivum
  misc_feature (1)..(640): Ceres Seq. ID no. 13663039
acaccaaaacaaccagatctcaggctcatagctcagacaatggagaagtccccagccacagcaggataccatcatgcaccacttttccaagagccacttggtattctcatccttttcatcctcacctggtgcatctcgaagcttcaaagtctccttcccacttcttgttgccaatcctgcacttgtactgtctccccgacaacctcgacgccggtcctcgccgagacgaagatatcgaaggcaccaaataagagtgaatatgatgagatgaatgcgacgcagtcagatgccgaggtagccatgagaaagatgggacttgattttgatcaagagaaaagctgcgaatatatttctacgcttttcgatgaagacgagccaagcttcaaggaagtgaaaatggcattcttggtttttgatgagaacaatgatgggtacatcgatgcattggatttgcgacgagtcctccacaacttagggttaggcgaccgggtaggggtcaatgagtctgagcagatgattgctagatatgacatgaacaataacaagaggttagatttgatggagttcactaaggttttggaggacagcttttgctagacccctttatttctgtatttttttcctatatctgtagatgcat

SEQ ID NO: 12240 - protein, 198 aa, Triticum aestivum
  misc_feature (1)..(198): Ceres Seq. ID no. 13663040
TPKQPDLRLIAQTMEKSPATAGYHHAPLFQEPLGILILFILTWCISKLQSLLPTSCCQSCTCTVSPTTSTPVLAETKISKAPNKSEYDEMNATQSDAEVAMRKMGLDFDQEKSCEYISTLFDEDEPSFKEVKMAFLVFDENNDGYIDALDLRRVLHNLGLGDRVGVNESEQMIARYDMNNNKRLDLMEFTKVLEDSFC

SEQ ID NO: 12241 - protein, 185 aa, Triticum aestivum
  misc_feature (1)..(185): Ceres Seq. ID no. 13663041
MEKSPATAGYHHAPLFQEPLGILILFILTWCISKLQSLLPTSCCQSCTCTVSPTTSTPVLAETKISKAPNKSEYDEMNATQSDAEVAMRKMGLDFDQEKSCEYISTLFDEDEPSFKEVKMAFLVFDENNDGYIDALDLRRVLHNLGLGDRVGVNESEQMIARYDMNNNKRLDLMEFTKVLEDSFC

SEQ ID NO: 12242 - protein, 109 aa, Triticum aestivum
  misc_feature (1)..(109): Ceres Seq. ID no. 13663042
MNATQSDAEVAMRKMGLDFDQEKSCEYISTLFDEDEPSFKEVKMAFLVFDENNDGYIDALDLRRVLHNLGLGDRVGVNESEQMIARYDMNNNKRLDLMEFTKVLEDSFC

SEQ ID NO: 12243 - DNA, 762 bp, Triticum aestivum
  misc_feature (1)..(762): Ceres Seq. ID no. 13663047
aacttcataagccataacaagttcgaagactgaaggtgcaaaaggttcacagcagagttgtctgatacgtcgcgccacacagcacttccaagctgctcatctgtgcacgtggcgcagtttaacttggttcagttggttacccgtggcttcaccgaaaccgacctgacccctggctgatctcccttgtcctgcgttttcgctctcgcctgacgttctgatttgatgcttgtggtttgtttagtgtagtaggttcctatcatgttctttatatactcattatatttgagtttggcagttgttaaaagaaggcagttcataacagtgttatgtctctgctgtgtatttttcattttgttttacattaggttcctttgccaaaatgtgatggtaatggtaatctgaatgaaacattcgatccggctattcttattctannaaaaaaaaaaaaaaaaaaaaaaaaaaaaaaaaaaaaaaaaaaaaaaaaaaaaaaaaaaaaaaaaaaaaaaaaaaaaaaaaaaaaaagaaaaaaaaaaaaaaaaaggttaatcaaaaccgccacaccccaaggggggccccgaaaccaaattccccaaaaaggaagccaaaaaacccgcgtcaatgggccgccttttaaaaaggcggggagggaaaaaacccgggggaaaccaaaataaaccccttggaaaaaaacccccttttcccaagtggggaaaaagaaaaaaagccccccccaaacccccttcccaaaaagtggccaacccg

SEQ ID NO: 12244 - protein, 47 aa, Triticum aestivum
  misc_feature (1)..(47): Ceres Seq. ID no. 13663048
  misc_feature (11)..(11): Xaa is any aa, unknown or other
  misc_feature (12)..(12): Xaa is any aa, unknown or other
MKHSIRLFLFXXKKKKKKKKKKKKKKKKKKKKKKKKKKKKEKKKKKG

SEQ ID NO: 12245 - protein, 47 aa, Triticum aestivum
  misc_feature (1)..(47): Ceres Seq. ID no. 13663049
MFFIYSLYLSLAVVKRRQFITVLCLCCVFFILFYIRFLCQNVMVMVI

SEQ ID NO: 12246 - protein, 48 aa, Triticum aestivum
  misc_feature (1)..(48): Ceres Seq. ID no. 13663050
MGRLLKRRGGKKPGGNQNKPLGKKPPFPKWGKRKKAPPKPPSQKVANP

SEQ ID NO: 12247 - DNA, 1273 bp, Triticum aestivum
  misc_feature (1)..(1273): Ceres Seq. ID no. 13663074
attctcctccccgctcgctcctatcctcccccatgccgccgcccccttccccccgctcgcctctgccgcctcctctccttccccgcacgtccggcctaccccctcctccctcctcctccatcctccctcattcgtcatcacggcagaccatctcccgtcacttgggccccatgctggcggccgggtcggggtggaggcgcagcagggctgcaggggccctacgtgtactacctctacagccagtacgggttcgacaagggcgacatcggccgcctcttcatcgccggctttggctcctccatgctcttcggcaccatcgtcgggtcgctcgccgacaagcagggaaggaagagggcgtgcatcacctacatcctcagctgcatcacgaagcactcgccgcagtacaggattctgatgataggccgtgtgcttggaggcattgcaacatcgctgctcttctcggcattcgagtcgtggctcgtggcggagcacaacaagggagagttgactgatgtacatgagacccaggcgaaaatgagtgtgctagcggaggctccagggatgcagggtgatagggcccagtctatgctccggttgtgttgttggggaagcttcggacgggatttagataaggaaaaggagtcccgtgcgaaatcgagcgtcctggtgttgggactgatgatccgcacttgttgtctaaatgcagaacatgcgcattgcagtgctttctatcagtaccgacgaccacaaatgggatggatcgagcaaccaagactcagagtgtggttgacagtgcggcctgctcccaaccctgcagataactctgggtttgaactggaaccttgtgtcatttggtgcaatgggtaattttgttcacagtacttgcttatgaagttaaagttggcatatatgcctgcccatgaacaagtctattgatacatgttttttaaagcacacatgttagtgggtctccgtgtcatttgcgtacatgatttcaaatggatccatttgcgtacatgatttcaaatggatccatttgcgtacatgatttcaaatggatctttgcgaatatggtagcaagtattttgtgctatgaaattaaaatgtgtacatacatctcatcgtagacaacaatccaacatgtttcttannaaaaaaaaaaaaaaaaaaaaaaaaaaaaaaaaaaaaaaaaaaaaaaaaaaaaaaaaaaaaaaaaaagaaaaaaaaaaaaaaaaaggtttatcgataccgccaacctcaagggggggcccgg

SEQ ID NO: 12248 - protein, 288 aa, Triticum aestivum
  misc_feature (1)..(288): Ceres Seq. ID no. 13663075
ILLPARSYPPPCRRPLPPARLCRLLSFPARPAYPLLPPPPSSLIRHHGRPSPVTWAPCWRPGRGGGAAGLQGPYVYYLYSQYGFDKGDIGRLFIAGFGSSMLFGTIVGSLADKQGRKRACITYILSCITKHSPQYRILMIGRVLGGIATSLLFSAFESWLVAEHNKGELTDVHETQAKMSVLAEAPGMQGDRAQSMLRLCCWGSFGRDLDKEKESRAKSSVLVLGLMIRTCCLNAEHAHCSAFYQYRRPQMGWIEQPRLRVWLTVRPAPNPADNSGFELEPCVIWCNG

SEQ ID NO: 12249 - protein, 188 aa, Triticum aestivum
  misc_feature (1)..(188): Ceres Seq. ID no. 13663076
MLFGTIVGSLADKQGRKRACITYILSCITKHSPQYRILMIGRVLGGIATSLLFSAFESWLVAEHNKGELTDVHETQAKMSVLAEAPGMQGDRAQSMLRLCCWGSFGRDLDKEKESRAKSSVLVLGLMIRTCCLNAEHAHCSAFYQYRRPQMGWIEQPRLRVWLTVRPAPNPADNSGFELEPCVIWCNG

SEQ ID NO: 12250 - protein, 169 aa, Triticum aestivum
  misc_feature (1)..(169): Ceres Seq. ID no. 13663077
SPPRSLLSSPMPPPPSPRSPLPPPLLPRTSGLPPPPSSSILPHSSSRQTISRHLGPMLAAGSGWRRSRAAGALRVLPLQPVRVRQGRHRPPLHRRLWLLHALRHHRRVARRQAGKEEGVHHLHPQLHHEALAAVQDSDDRPCAWRHCNIAALLGIRVVARGGAQQGRVD

SEQ ID NO: 12251 - DNA, 860 bp, Triticum aestivum
  misc_feature (1)..(860): Ceres Seq. ID no. 13663127
ctctctctctctttccgtgccactccccaatccgttctccaatcccactcccctatgccggcgtccgggacgcgctcccggggccgcccgccgcagccggtggaggagggggcgcgcgacgaagaagcgccggtggaggaggcgggcgagctcggcgccgacggcgatgcggcggttcgtgcgttaccggctcacccggtgagctctaccagctcgggtgatgaggatggggaggaggcgggggatggggatgatgaggacgcggaggggacgctcctccccagctgccccgtgtgtatgaatccgtggaccgccgatggcgagcatcgcgtaagttgcattccttgtgggcatgtctatggcagatcttgcttagaaaaatggttagcacagtgtggaaagaaaagtgccatgtgtcctcagtgcggcaagatgtttagacaaaagaacattatcaacctctatgcaccagagattgttgttccaaataatgatcttgaaaagcaagtattgtcactgagagataaaaatgaatttcttgagaatcaacaacaaaaattaattgaggagattgcattggagcagcaaaaggagaaagaggcgctggaggagggaggcgatgcagctcaagagtgacgtggtactggtgccggtccaaatgtttgtgtagaacagaggaagcagctagcggaagtcaaacattgatgtgtttgtaatgcacggtgtcggctgaggactaatgtacggagattgtagtcatgtgctcacctgatacatggataatgattttcagttcagtacccagaattttgagttctagtgatggttagtgtcttatgtctaagtgatcaaattgaata

SEQ ID NO: 12252 - protein, 211 aa, Triticum aestivum
  misc_feature (1)..(211): Ceres Seq. ID no. 13663128
LSLSFRATPQSVLQSHSPMPASGTRSRGRPPQPVEEGARDEEAPVEEAGELGADGDAAVRALPAHPVSSTSSGDEDGEEAGDGDDEDAEGTLLPSCPVCMNPWTADGEHRVSCIPCGHVYGRSCLEKWLAQCGKKSAMCPQCGKMFRQKNIINLYAPEIVVPNNDLEKQVLSLRDKNEFLENQQQKLIEEIALEQQKEKEALEEGGDAAQE

SEQ ID NO: 12253 - protein, 193 aa, Triticum aestivum
  misc_feature (1)..(193): Ceres Seq. ID no. 13663129
MPASGTRSRGRPPQPVEEGARDEEAPVEEAGELGADGDAAVRALPAHPVSSTSSGDEDGEEAGDGDDEDAEGTLLPSCPVCMNPWTADGEHRVSCIPCGHVYGRSCLEKWLAQCGKKSAMCPQCGKMFRQKNIINLYAPEIVVPNNDLEKQVLSLRDKNEFLENQQQKLIEEIALEQQKEKEALEEGGDAAQE

SEQ ID NO: 12254 - protein, 112 aa, Triticum aestivum
  misc_feature (1)..(112): Ceres Seq. ID no. 13663130
MNPWTADGEHRVSCIPCGHVYGRSCLEKWLAQCGKKSAMCPQCGKMFRQKNIINLYAPEIVVPNNDLEKQVLSLRDKNEFLENQQQKLIEEIALEQQKEKEALEEGGDAAQE

SEQ ID NO: 12255 - DNA, 676 bp, Triticum aestivum
  misc_feature (1)..(676): Ceres Seq. ID no. 13663146
cctaatcgaaaatttattcctgcaccaccggaagttgcaatgcgtatgttgagggagcagggtgggccaccacctttcgagccgaatgctggtccacgtcctaggaaagcaggaagggctggtggtcccccaatgggtggtccatcaccaatccttaatgctccacttcctataatgcatgatccacgtatgcaagatccacgcatgcaagatccccgtaaaatacgaagctatcaagatctggacgctcctggagatgaagtgacagttttggactaccggagcctgtagtcgtgtgctgtacggccttttaatcttcgaagccgtggacgataccaccaccgcaacgggaccttgctcatctccattagtttgaccgtggcggaggaacactgatgcggtgccccgtcccgtgagctatgttatactactcaatggtgcttctaaaactgaaccacatgaaatcaaagcaactggcgcactgaaagcacggttgtggagtgtgtatttccaacagaattttttagcttttcaaaatttccaccatctagagagagagagagtagaggtctctgctgccgtatccagaactccagaccagatattcctcaccgtgtatgcaatctgtaatttatatacaggaaaaaacggttggtagatggaaccctgattggtc

SEQ ID NO: 12256 - protein, 96 aa, Triticum aestivum
  misc_feature (1)..(96): Ceres Seq. ID no. 13663147
PNRKFIPAPPEVAMRMLREQGGPPPFEPNAGPRPRKAGRAGGPPMGGPSPILNAPLPIMHDPRMQDPRMQDPRKIRSYQDLDAPGDEVTVLDYRSL

SEQ ID NO: 12257 - protein, 83 aa, Triticum aestivum
  misc_feature (1)..(83): Ceres Seq. ID no. 13663148
MRMLREQGGPPPFEPNAGPRPRKAGRAGGPPMGGPSPILNAPLPIMHDPRMQDPRMQDPRKIRSYQDLDAPGDEVTVLDYRSL

SEQ ID NO: 12258 - protein, 81 aa, Triticum aestivum
  misc_feature (1)..(81): Ceres Seq. ID no. 13663149
MLREQGGPPPFEPNAGPRPRKAGRAGGPPMGGPSPILNAPLPIMHDPRMQDPRMQDPRKIRSYQDLDAPGDEVTVLDYRSL

SEQ ID NO: 12259 - DNA, 710 bp, Triticum aestivum
  misc_feature (1)..(710): Ceres Seq. ID no. 13663154
ctactggctgcagctcgggaggcggtccaaagcccggctccacatggtcatggccctgctctcatacatggtgttcgggctgctcccgccggtcctctacgggctgtcgttccgcgagagcaacgaccgggagaacaagatgatggccgtcgccggtgcttcactcgcctgcatcgctctgctggcgctcggaaaggcgcgcgtgcacaccaggacctacttcaagaccctggtgtactaccttgccctcgccgtgagctcgtcggggctgtcgtacgtcgccggcgtgctgatcacgcggctcctggtgcactatggaatcattgagcagggcggctcggctgctcctgctcctccagggctgtcgtcgccgttcgcttatgttgctgctggtgcagagtcgtctgcatgggcctcattctgaaaagtctgaagttcagggcagcactgctggtataaaaagagaggacatgagcgagctcaagagaaagtgcctgcaaatgcatgaagaaacacctgaaggcttctttgagttgctgctacctcctgctagctgttctgctgtagttttgttgtacatttgaagctctgatgcttctcatggtgatctctgtaagcatgtttgtgagcaggaagagcaataagttcagtgttacatactataaaaacaataatatatgccatgtttttgtttaaamamaawaaaraaa

SEQ ID NO: 12260 - protein, 140 aa, Triticum aestivum
  misc_feature (1)..(140): Ceres Seq. ID no. 15220204
YWLQLGRRSKARLHMVMALLSYMVFGLLPPVLYGLSFRESNDRENKMMAVAGASLACIALLALGKARVHTRTYFKTLVYYLALAVSSSGLSYVAGVLITRLLVHYGIIEQGGSAAPAPPGLSSPFAYVAAGAESSAWASF

SEQ ID NO: 12261 - protein, 126 aa, Triticum aestivum
  misc_feature (1)..(126): Ceres Seq. ID no. 15220205
MVMALLSYMVFGLLPPVLYGLSFRESNDRENKMMAVAGASLACIALLALGKARVHTRTYFKTLVYYLALAVSSSGLSYVAGVLITRLLVHYGIIEQGGSAAPAPPGLSSPFAYVAAGAESSAWASF

SEQ ID NO: 12262 - protein, 124 aa, Triticum aestivum
  misc_feature (1)..(124): Ceres Seq. ID no. 15220206
MALLSYMVFGLLPPVLYGLSFRESNDRENKMMAVAGASLACIALLALGKARVHTRTYFKTLVYYLALAVSSSGLSYVAGVLITRLLVHYGIIEQGGSAAPAPPGLSSPFAYVAAGAESSAWASF

SEQ ID NO: 12263 - DNA, 741 bp, Triticum aestivum
  misc_feature (1)..(741): Ceres Seq. ID no. 13663156
caagattacttgaatctgaaggaactcaaacacatctaacattcgtttacagttttgcacaagcagcagctgcagcgcaagctggtgcatcagtcgtacaaatatttgtggggcgtattcgggattgggcaaagaatcactctggtgacccagagattgatgaagctttaaagaagggagaagatgctgggcttgccttggtgaagaaagcgtatgtgtacattcacaagaatgggtacaagacaaagttgatggccgctgccgtgcgcaacaagcaagacgtgtttagccttctggggatcgactacatcatcgcgcccctgaagatactgcagtccttggatgaatctgtgaccgattccgatgaaaagtacggttatgtccagaggctgactccttcgcttgacaagatgtacaacttcagccaagaggagcttgtgaaatgggaccagctgagcctggcggcggcgatggggccagcggcggaggagctgcttgcttctgggctggaagggtacgcgaaccaggcgcggcgcgtggaggagctcttcgtcaagatctggccaccccccaatgtttgaacttcaatttgaagccgtttcttctttcttggtattttcgttccaacaaagggtgttttgtgtgtcaacatgtttacttttgtccttggaatgtctgccggacttgaaatctgaatcgtttgtggaaatatgaaggcattttgtggcgacagtttctttg

SEQ ID NO: 12264 - protein, 192 aa, Triticum aestivum
  misc_feature (1)..(192): Ceres Seq. ID no. 13663157
RLLESEGTQTHLTFVYSFAQAAAAAQAGASVVQIFVGRIRDWAKNHSGDPEIDEALKKGEDAGLALVKKAYVYIHKNGYKTKLMAAAVRNKQDVFSLLGIDYIIAPLKILQSLDESVTDSDEKYGYVQRLTPSLDKMYNFSQEELVKWDQLSLAAAMGPAAEELLASGLEGYANQARRVEELFVKIWPPPNV

SEQ ID NO: 12265 - protein, 109 aa, Triticum aestivum
  misc_feature (1)..(109): Ceres Seq. ID no. 13663158
MAAAVRNKQDVFSLLGIDYIIAPLKILQSLDESVTDSDEKYGYVQRLTPSLDKMYNFSQEELVKWDQLSLAAAMGPAAEELLASGLEGYANQARRVEELFVKIWPPPNV

SEQ ID NO: 12266 - DNA, 2094 bp, Triticum aestivum
  misc_feature (1)..(2094): Ceres Seq. ID no. 13663320
gagtccattccccttcttccttctccccactccccactcccactccatcttcttccgccatcttcttgccggagggcactccgtctccctctcgtgtttgtccatgaatccggttccgactacaatctgattgtgattcttagacctcacccctcctctcaataagtaccaccaccagtcctagataggagtacgcctgtgtgagatcgcacaagacccaccatgccgcacgaaggctattacgaagcctctttgcgtccgccggccttggatgatgcgccggcggcgaaggactggggggaagtcctcctcgaccgcgtcgcttacatggtcgacaagaaaaaccatacttccgtcaaccttcaattcaagagggatctggacggcaaggaggtggatctgtgggtcactctgtgcttcgcccggccgcctcgtctctcctatttctgctgccacgcctcctgccccaacgacaaagaagaagacacccgcttgttcttccgcgagcctttcgtgttcgccacggagggtaacctcgccgtcatcaccctctgccacgggcgcagccgcccctccgccttcgggtccaagaagaacaactacgaatacttggtgtaccaggcaccatcctcaccggcggggaagccggagctcatctgggtcccgcacatccccgccagcatgttgccaagcacgggagtcgactgcatcccttccagctcgattggtgtcgtgcgttacaacagcaacattttcacccatgctcacccccacaaaatccccctcgcgccccctgcccccatcctcagccctgccgttgcacttgcccgccccaaaagtttcccttccacgcccccaacctccgtcctcagcccctccgtcgccgccctccccaaggaggatgaggacttcgatgcccacagaatcgtagcgcttgcctacgactatttccacgactctggcaatagcccacatggcccatactacctgtgcatctacgactccaaaacccaggtttggacccgcaagccagctgctattccacagccgctgctgccattcgactatatctgcgacatcgacatggtcatcaccatcggtggctccagccgtggcatcatgggctgggtcgacctctggaatggcatactattctctgacgtgcttgcagaccacacaccctacagcccgcttcgctatgtctcccttccgaagccaaggcagccgcaaaattgcctccctattcccctggacattggatgccgctttcgggacattgtctttgtcaaagactctggcatcatcaggttcgttgacctgcagatccacaccgaccccaacatcccttactcagaaacccctagtggctggacggtggtcacatggatcctggaggggctcaatgagggtttggaaacccggggtggtttgagcttccggcaggagcacgaactccgttctagtgatatctccaactacaacttgccccagtctctatttgttaccaaccccattctcagcgcccatgaagatggcttcttgtacctcaggaccaatgtcagtagcagaaccagcagcaactcgagagtgatcactgttgacatcaagcatgggaagctgctggatgtgcaggacttcgatatgcagagacccaacacctacatgcgcaccgccatctccagccatctcatgcccccagtttcaaaggagaatttgaaacgacgagcgacagtgcctcagtgatcctctcgcaagaagccacagcatcagcttgccatcactactaacccagcggaagaaggagaggatgatgaggggaatgcgatggacacacagtaggtggtttgttgaggtatgagtgtgcccaccagcgttatggtttcttggctgtcaacatgtatatgcgcgcctgttttcttgcttggttaactagtcaggatcagaattttatttattatttaggttatataagacttggtaagcctgtatgatgggaggttgaggctaggagacgattattaatatttagagcttcctctattttgctagtatcatgttctggtgcaacctgatgtccatggtttgtaatccccg

SEQ ID NO: 12267 - protein, 506 aa, Triticum aestivum
  misc_feature (1)..(506): Ceres Seq. ID no. 15220216
MPHEGYYEASLRPPALDDAPAAKDWGEVLLDRVAYMVDKKNHTSVNLQFKRDLDGKEVDLWVTLCFARPPRLSYFCCHASCPNDKEEDTRLFFREPFVFATEGNLAVITLCHGRSRPSAFGSKKNNYEYLVYQAPSSPAGKPELIWVPHIPASMLPSTGVDCIPSSSIGVVRYNSNIFTHAHPHKIPLAPPAPILSPAVALARPKSFPSTPPTSVLSPSVAALPKEDEDFDAHRIVALAYDYFHDSGNSPHGPYYLCIYDSKTQVWTRKPAAIPQPLLPFDYICDIDMVITIGGSSRGIMGWVDLWNGILFSDVLADHTPYSPLRYVSLPKPRQPQNCLPIPLDIGCRFRDIVFVKDSGIIRFVDLQIHTDPNIPYSETPSGWTVVTWILEGLNEGLETRGGLSFRQEHELRSSDISNYNLPQSLFVTNPILSAHEDGFLYLRTNVSSRTSSNSRVITVDIKHGKLLDVQDFDMQRPNTYMRTAISSHLMPPVSKENLKRRATVPQ

SEQ ID NO: 12268 - protein, 471 aa, Triticum aestivum
  misc_feature (1)..(471): Ceres Seq. ID no. 15220217
MVDKKNHTSVNLQFKRDLDGKEVDLWVTLCFARPPRLSYFCCHASCPNDKEEDTRLFFREPFVFATEGNLAVITLCHGRSRPSAFGSKKNNYEYLVYQAPSSPAGKPELIWVPHIPASMLPSTGVDCIPSSSIGVVRYNSNIFTHAHPHKIPLAPPAPILSPAVALARPKSFPSTPPTSVLSPSVAALPKEDEDFDAHRIVALAYDYFHDSGNSPHGPYYLCIYDSKTQVWTRKPAAIPQPLLPFDYICDIDMVITIGGSSRGIMGWVDLWNGILFSDVLADHTPYSPLRYVSLPKPRQPQNCLPIPLDIGCRFRDIVFVKDSGIIRFVDLQIHTDPNIPYSETPSGWTVVTWILEGLNEGLETRGGLSFRQEHELRSSDISNYNLPQSLFVTNPILSAHEDGFLYLRTNVSSRTSSNSRVITVDIKHGKLLDVQDFDMQRPNTYMRTAISSHLMPPVSKENLKRRATVPQ

SEQ ID NO: 12269 - protein, 353 aa, Triticum aestivum
  misc_feature (1)..(353): Ceres Seq. ID no. 15220218
MLPSTGVDCIPSSSIGVVRYNSNIFTHAHPHKIPLAPPAPILSPAVALARPKSFPSTPPTSVLSPSVAALPKEDEDFDAHRIVALAYDYFHDSGNSPHGPYYLCIYDSKTQVWTRKPAAIPQPLLPFDYICDIDMVITIGGSSRGIMGWVDLWNGILFSDVLADHTPYSPLRYVSLPKPRQPQNCLPIPLDIGCRFRDIVFVKDSGIIRFVDLQIHTDPNIPYSETPSGWTVVTWILEGLNEGLETRGGLSFRQEHELRSSDISNYNLPQSLFVTNPILSAHEDGFLYLRTNVSSRTSSNSRVITVDIKHGKLLDVQDFDMQRPNTYMRTAISSHLMPPVSKENLKRRATVPQ

SEQ ID NO: 12270 - DNA, 1877 bp, Triticum aestivum
  misc_feature (1)..(1877): Ceres Seq. ID no. 13663328
cccactgtaggtgggcagtagtacttggtcatgtgccaccgtctcgtgcccctttgcatcttccaagctctctctgggctggagactctcacgcgtttgcttcaagcattgacccgagcataaatcttccagccacttgttcctggcctcttcttgatttctttctatcccctgcctgtcagtgtagtgctcagatttggtcatcatgaagccatgaacagagctggcgcctctggtgcaggatcctgacgacctgcgtctctgaagggggagaagggcttcttttctcagatcttcttgaagacttgtgaaaaatgaagccgcctttggaaaggaacccatccaggaagcgccattcatggtggtgggatagtcacattagccccaagaactcaaaatggcttgcagaaaacctcgaagaaatggataagcaagtgaaggaaatggtgcagcttattgaggaagatggcgactcctttgcaaagaaagctcaaatgtattatcagaggcgcccagtcctcgttacccatgtcgagaacttctaccggatgtaccgcgctttagctgagcgctacgacaatgttaccggtgaactgcgcaagaacatcccttcaaggatgcagtcccaaggatctttatccggttctgagttcggttcagagctgcaaaggtcgcccacaccatctcctgagccccagaagtcctggacaagggagcagagccctagagccgccggtttcaatttctttctgagtaacaagagcaatgactcaccgtcctcaaggaaggagcctgggtcagcttcacagtcagaatctgacatgaagtctgaagatggtgaggatgatggcattacctacacattgcaccagagagttctcgagctcgaggatgatctcaatgcggcaaaccggaagctgcttgacgcaaacgaaaagctcgaggttttcgaggagaggatcctgaggtgccattgcgattataaggaaaatggaaatggcgccgatcatgctaccaaaattagagacattgatggagagttcgtgtcaactaaggagaagctacaatcttcacaagtggagatcaacaatcttgaaaggaggctcgaagacgctgcaattttgtcagaagagcactccaggctgctggaacaaaacaagggactggaagctgaaattgtgagtctgaaggaagagatgacttcagctagacggcgtttcaacgacaaaatatccgagagtgatgccgagatcagccagtacaggcaagagcttgccaccgcgtccgagaagctgttgcaggagaagtccaccaacagcacagaggtaggaaagctgcaagaaatgaaccggatcaccagtctcaagctggagaaagtttctgaagagaagtctctagtggaggaccaggtgaaggagctggaggaggcgaacgccgaagccgaaaggcagaggcaggagctcgtccatgccgccgaaatgctgtcggaggacaagttcagacatgaagctgagatcctgacgatgcagcagagcatcgaggacctgaagccgaaacttgagagcatcgcaagagagaaatcgctgctgaaactctggttcgcggatctggagcgcgtcgtggagcgaggaaggagcgttgtcattcccccggaataacccggtttcgtctggaaattcagtagctagaatttagcaaactagcagtgctatctctttgtttttttggcctgagatgtaacatcatacggaactgtgaaaccctaccgtggacatcagcttttccttttcttggattatttcttgcactgtgaggtgatgggtggtggtcgtggtgtatgaaacatttgcactgaatgcatttcctttggcmcttct

SEQ ID NO: 12271 - protein, 447 aa, Triticum aestivum
  misc_feature (1)..(447): Ceres Seq. ID no. 15220219
MKPPLERNPSRKRHSWWWDSHISPKNSKWLAENLEEMDKQVKEMVQLIEEDGDSFAKKAQMYYQRRPVLVTHVENFYRMYRALAERYDNVTGELRKNIPSRMQSQGSLSGSEFGSELQRSPTPSPEPQKSWTREQSPRAAGFNFFLSNKSNDSPSSRKEPGSASQSESDMKSEDGEDDGITYTLHQRVLELEDDLNAANRKLLDANEKLEVFEERILRCHCDYKENGNGADHATKIRDIDGEFVSTKEKLQSSQVEINNLERRLEDAAILSEEHSRLLEQNKGLEAEIVSLKEEMTSARRRFNDKISESDAEISQYRQELATASEKLLQEKSTNSTEVGKLQEMNRITSLKLEKVSEEKSLVEDQVKELEEANAEAERQRQELVHAAEMLSEDKFRHEAEILTMQQSIEDLKPKLESIAREKSLLKLWFADLERVVERGRSVVIPPE

SEQ ID NO: 12272 - protein, 411 aa, Triticum aestivum
  misc_feature (1)..(411): Ceres Seq. ID no. 15220220
MDKQVKEMVQLIEEDGDSFAKKAQMYYQRRPVLVTHVENFYRMYRALAERYDNVTGELRKNIPSRMQSQGSLSGSEFGSELQRSPTPSPEPQKSWTREQSPRAAGFNFFLSNKSNDSPSSRKEPGSASQSESDMKSEDGEDDGITYTLHQRVLELEDDLNAANRKLLDANEKLEVFEERILRCHCDYKENGNGADHATKIRDIDGEFVSTKEKLQSSQVEINNLERRLEDAAILSEEHSRLLEQNKGLEAEIVSLKEEMTSARRRFNDKISESDAEISQYRQELATASEKLLQEKSTNSTEVGKLQEMNRITSLKLEKVSEEKSLVEDQVKELEEANAEAERQRQELVHAAEMLSEDKFRHEAEILTMQQSIEDLKPKLESIAREKSLLKLWFADLERVVERGRSVVIPPE

SEQ ID NO: 12273 - protein, 404 aa, Triticum aestivum
  misc_feature (1)..(404): Ceres Seq. ID no. 15220221
MVQLIEEDGDSFAKKAQMYYQRRPVLVTHVENFYRMYRALAERYDNVTGELRKNIPSRMQSQGSLSGSEFGSELQRSPTPSPEPQKSWTREQSPRAAGFNFFLSNKSNDSPSSRKEPGSASQSESDMKSEDGEDDGITYTLHQRVLELEDDLNAANRKLLDANEKLEVFEERILRCHCDYKENGNGADHATKIRDIDGEFVSTKEKLQSSQVEINNLERRLEDAAILSEEHSRLLEQNKGLEAEIVSLKEEMTSARRRFNDKISESDAEISQYRQELATASEKLLQEKSTNSTEVGKLQEMNRITSLKLEKVSEEKSLVEDQVKELEEANAEAERQRQELVHAAEMLSEDKFRHEAEILTMQQSIEDLKPKLESIAREKSLLKLWFADLERVVERGRSVVIPPE

SEQ ID NO: 12274 - DNA, 1741 bp, Triticum aestivum
  misc_feature (1)..(1741): Ceres Seq. ID no. 13663345
aaaagaaacaaacacgcacacgccacctcacgccgccccgcgcacactgcggccgcgccactcgcacacggccaccacctgctaggctgcgagcggcgagcggcgagatcggcggcgggcggaggaatggtggcgccggcgggaggagggtcgccgtcgcggtggccgtcggatgaggagcttgacattgtgcggaagaatgtggtcgagattagtggaagagatgcgagagaggttagggtggttgcttgcccctacaggatttgtcctttgggggcccacattgatcatcagggcggaatagtgactgctatgacaatcaattatggagtacttcttggctttgtgccctctgatgatgctgaggttgtactccagtctggtcaatttaaaggcattactcgattcagagttgatgacttgcaaaagcctattgagaaccgaggaaacataacttgggaaagctatgcaagaggtgcagtttatgccctgcaaaatagtggatatgatctcagaaagggtataataggttatatttctggagtgaatggacttgacagttcagggcttagttcgtctgcagctgttggcatcgcctatttgctggctttagaaaatgtaaatgatctggttttatcaccagttgataacattcagttggacaagtccattgaaaatagatatttgggtcttgaaaatggcattctagatccatcagccattttattgtctcgatatggctacctcaccttcatggattgcaagactgcctcaccttcctacgtctacttctcggaactaagtaaaagccagcaacctcaaggtcggccgccattcaagattttgttggcattttcaggtttgcaacataacctacccaagtcgcgtgggtataatatgcgagtcttcgagtgcaaagaggctgcacgtgctcttttatgtgcgtcaggctctgaagatgcaccaatactccgtaaagttgatccaggtgtatatgaggcccaaaagtgtatattagatgaaaatcttgccaagagagctgagcactatttctctgaaatgaagcgagttgttaagggaagagaggcatgggctcgtggagacctacaagaattgggacagctgatctctgcatctggccgcagctccatagtcaactacgaatgcgggagcaaagagatgatacagctgtacgagatcctcctgaaggcgccaggggtcctcggcgcgcggttcagcggcgctggcttcagaggctgctgcctcgccatcgtcgaaagcgaccgtgccgaggaggcggcggcgtacgttggcgccgagtacgagaggtcccagccagagctggtgagcaagatccccgcggatcgtcgcgtgctggtctgcgagcccggggactccgcgcaggtcatcttgcagtcatgagcgtcctgttagtcgggactttgtgaaggtgagaacacgtgcaaaattcgtacgtcctcgtccatctggaactccaccccctaaattctactccctccgtcccataatataggacgttttttgacactagtgtagcgtcaaaaaacatcttacattatgggatgaagggagtagacatttagtccaagataagactagcgttgttgtgtatgaactgtactcagtcgagctcccagatagctcatctgtgtatgtgtggaaccatttgattcattcatttccacgtaagcaataatcagtaatgcaaaggttctctttc

SEQ ID NO: 12275 - protein, 473 aa, Triticum aestivum
  misc_feature (1)..(473): Ceres Seq. ID no. 13663346
KRNKHAHATSRRPAHTAAAPLAHGHHLLGCERRAARSAAGGGMVAPAGGGSPSRWPSDEELDIVRKNVVEISGRDAREVRVVACPYRICPLGAHIDHQGGIVTAMTINYGVLLGFVPSDDAEVVLQSGQFKGITRFRVDDLQKPIENRGNITWESYARGAVYALQNSGYDLRKGIIGYISGVNGLDSSGLSSSAAVGIAYLLALENVNDLVLSPVDNIQLDKSIENRYLGLENGILDPSAILLSRYGYLTFMDCKTASPSYVYFSELSKSQQPQGRPPFKILLAFSGLQHNLPKSRGYNMRVFECKEAARALLCASGSEDAPILRKVDPGVYEAQKCILDENLAKRAEHYFSEMKRVVKGREAWARGDLQELGQLISASGRSSIVNYECGSKEMIQLYEILLKAPGVLGARFSGAGFRGCCLAIVESDRAEEAAAYVGAEYERSQPELVSKIPADRRVLVCEPGDSAQVILQS

SEQ ID NO: 12276 - protein, 431 aa, Triticum aestivum
  misc_feature (1)..(431): Ceres Seq. ID no. 13663347
MVAPAGGGSPSRWPSDEELDIVRKNVVEISGRDAREVRVVACPYRICPLGAHIDHQGGIVTAMTINYGVLLGFVPSDDAEVVLQSGQFKGITRFRVDDLQKPIENRGNITWESYARGAVYALQNSGYDLRKGIIGYISGVNGLDSSGLSSSAAVGIAYLLALENVNDLVLSPVDNIQLDKSIENRYLGLENGILDPSAILLSRYGYLTFMDCKTASPSYVYFSELSKSQQPQGRPPFKILLAFSGLQHNLPKSRGYNMRVFECKEAARALLCASGSEDAPILRKVDPGVYEAQKCILDENLAKRAEHYFSEMKRVVKGREAWARGDLQELGQLISASGRSSIVNYECGSKEMIQLYEILLKAPGVLGARFSGAGFRGCCLAIVESDRAEEAAAYVGAEYERSQPELVSKIPADRRVLVCEPGDSAQVILQS

SEQ ID NO: 12277 - protein, 369 aa, Triticum aestivum
  misc_feature (1)..(369): Ceres Seq. ID no. 13663348
MTINYGVLLGFVPSDDAEVVLQSGQFKGITRFRVDDLQKPIENRGNITWESYARGAVYALQNSGYDLRKGIIGYISGVNGLDSSGLSSSAAVGIAYLLALENVNDLVLSPVDNIQLDKSIENRYLGLENGILDPSAILLSRYGYLTFMDCKTASPSYVYFSELSKSQQPQGRPPFKILLAFSGLQHNLPKSRGYNMRVFECKEAARALLCASGSEDAPILRKVDPGVYEAQKCILDENLAKRAEHYFSEMKRVVKGREAWARGDLQELGQLISASGRSSIVNYECGSKEMIQLYEILLKAPGVLGARFSGAGFRGCCLAIVESDRAEEAAAYVGAEYERSQPELVSKIPADRRVLVCEPGDSAQVILQS

SEQ ID NO: 12278 - DNA, 1162 bp, Triticum aestivum
  misc_feature (1)..(1162): Ceres Seq. ID no. 13663517
aacatcctaatcaaaaactaataaatcccccacccccggatcgacaaagcttcccattcctccgcatcggcaggcagcagcaaaacaacagcccaatcgagggtcactccacaccaccaccactctcttcccccaatcccctcctcctccccgaaaccctagctggaatggagcccaaatccaccacccctccgccgccgggccccgtgctgggcgcgcccgtcggctacccgccggccgccgtctacccggccgccccgccccccggctacccgcacgcgccggccctctacgcgccccagccgccccccgccgccgtcgccgccgcgtcgcagcagaccgccgcgcagcagcagcagcagctgcaggtgttctgggcggagcagtaccgcgagatcgaggccaccaccgacttcaagaaccacaacctgcccctcgcccgcatcaagaagatcatgaaggccgacgaggacgtccgcatgatcgccgccgaggcgcccgtcgtcttcgcccgggcctgcgagatgttcatcctcgagctcacccaccgcggctgggcgcacgccgaggagaacaagcgccgcacgctgcagaagtccgacatcgccgccgccatcgcccgcaccgaggtcttcgacttcctggtggacatcgtgccgcgggacgaggccaaggacgccgaggcggccgtcgccgccgggatgccccaccccgccgccggcatgcccgccgccgacatggggtactactacgtcccgcagcagtaacacctgcagtatgttacagcggatttaagttgcatctaagattgtgctgttgatttagtgctctcctatgtttgtttgttcaccgctgaataatttaagatgttgccattatttgaggggcctcctctatgttacaagtgattcgatccgagaagaacccggctaggttcttctgatcgaggcagtccgtatgatgctcatgcatgtctaactgannanaaaaaaaaaaaaaaaaaaaaaaaaaaaaaaaaaaaaaaaaaaaaaaaaaaaaaaaaaaaaaaaaaaaaaaataaaaaaaaaaaaaaaaaggttaatcaaaaccgccaaccccaaggggggccccggaaccaaattcccccaaaaaaaagccaaaaaacgcgcgccaacggcccgcc

SEQ ID NO: 12279 - protein, 254 aa, Triticum aestivum
  misc_feature (1)..(254): Ceres Seq. ID no. 13663518
HPNQKLINPPPPDRQSFPFLRIGRQQQNNSPIEGHSTPPPLSSPNPLLLPETLAGMEPKSTTPPPPGPVLGAPVGYPPAAVYPAAPPPGYPHAPALYAPQPPPAAVAAASQQTAAQQQQQLQVFWAEQYREIEATTDFKNHNLPLARIKKIMKADEDVRMIAAEAPVVFARACEMFILELTHRGWAHAEENKRRTLQKSDIAAAIARTEVFDFLVDIVPRDEAKDAEAAVAAGMPHPAAGMPAADMGYYYVPQQ

SEQ ID NO: 12280 - protein, 199 aa, Triticum aestivum
  misc_feature (1)..(199): Ceres Seq. ID no. 13663519
MEPKSTTPPPPGPVLGAPVGYPPAAVYPAAPPPGYPHAPALYAPQPPPAAVAAASQQTAAQQQQQLQVFWAEQYREIEATTDFKNHNLPLARIKKIMKADEDVRMIAAEAPVVFARACEMFILELTHRGWAHAEENKRRTLQKSDIAAAIARTEVFDFLVDIVPRDEAKDAEAAVAAGMPHPAAGMPAADMGYYYVPQQ

SEQ ID NO: 12281 - DNA, 775 bp, Triticum aestivum
  misc_feature (1)..(775): Ceres Seq. ID no. 13663631
aatatgcagcaccagtagtatatagcagtaaaaaatactttgtacactcgtggcatcgccatcgatttgtcttgaactctcgatgagcaacaatcaatgggacatcaagatagtgctacgccgcgccgcatcgccgtccgcgctggccggccggcaacggagctgcgacgaagaccggcgaggcggagcggcaacgcgcgacggcggccggccatcagtattcagtaggggcgcatgccgacgtagttgccgggcgggtcgtagttgcaggtgatgaaggtgccgcggccgccgtagcactcgaccatggcgcaccccacgcgggtgctgccgcgccacacgatctgcgtgtagtgcccgcacatgccgccgctgcagcggttgctccagtagtcgtaccggggccgctccgccagccacgcccccacggcctgcgcgggcgcccagccggtgccgctgccccagaagaggttctcgccgtagggccccgacgagtgcaccagcgcgcagtccccgcgccgcgactcggcgtacgaccgcgcgtacgccgccacccgctcgtcccacctcagcgccggcagccccatcgccgcccgcgccgcgttctgctggaacaggaactgcgccctgtagtccccgccgccgccgcgggggtagccggcgtccaccacgacgacgaggaacgccgcattgcacagcgcgacggcgaggagggcgatggccagctgggctcgagtacaagtggaggaggccatgggaggtgggtggtgatgct

SEQ ID NO: 12282 - protein, 63 aa, Triticum aestivum
  misc_feature (1)..(63): Ceres Seq. ID no. 13663632
MSNNQWDIKIVLRRAASPSALAGRQRSCDEDRRGGAATRDGGRPSVFSRGACRRSCRAGRSCR

SEQ ID NO: 12283 - protein, 43 aa, Triticum aestivum
  misc_feature (1)..(43): Ceres Seq. ID no. 13663633
MGHQDSATPRRIAVRAGRPATELRRRPARRSGNARRRPAISIQ

SEQ ID NO: 12284 - DNA, 1319 bp, Triticum aestivum
  misc_feature (1)..(1319): Ceres Seq. ID no. 13663665
aatcccgtgtgcgtcccgctgttcgcttctcccgcatcccgatagcaccagcaagcaaaacccccctcccctctccatccagttccccctccccctcccccgvccgccgtcccatggcgtctctcctccgcacggccgccgcgctcgcgcccccaccgtcgtccgcccgggagacgcggcggccgtcgtgcgccgcctccctcgcctgctcccggcgcgcgccggcgagtccgctgcgcgctccgcctctgcccgggccatggcgattggggcccgatgaggccgcgcgtacggccactcagtttctctgccgatacatgagaagagatgggcatgaaggtgatgggagaacgcaaggacaagacgaacctagtatgtttgsgccagatgatgacgatggtgcaaagattcctactcaggtggaaactcttgttagaggcactgcaatagttgatgctccagaatacaagccgctcccagatctcgattaccttcaggaattgctggctattcagcagcaaggaccccgatcaataggtttctttggtacccgcaacatggggtatatgcatcaacaacttattgagatcttgagttatgccatggtcataacaaaaaatcatatattcacatctggtgcttctgggactaacgcagctgttattaggggtgctttgagagctgagaagccagaattgcttaccgtaattttgcctcaaagtctaaagaagcaacctcctgaaagccaagagctattatccaaagtacaaaacttgattgagaaacctcagtatgaccatttaccactaattgaggctagcaggttatgcaacatggacatcatctcgaaggtccaacaggtgatatgctttgcgtttcatgacagcaggctgctgatggagacctgccaggaggcaaagaacatgcggaagatcgtaacgctcttctacttggattagctagcacctcggggcgcttctcccctttttgtccgtaggccggtgaacgggatgctgtcattcctgtatacactaaagctctggagtaggttcaggtttggggcataacagtgcgtcttcgggcattttgcccattattcaaattcttggtagaaaccaaataagcttgtcgatatgtctagtctgtcagtaaagaaaataattcaagttcttattactagtaatttcaaaggctacagtattgaaaaaactgtttccactctcaatcaaaaagaaaaaggaaaaactgtttccgaaaaaaaaaaaaaaaaaagcttaatcgataccgtcgaccntcgaaggggggggcccgggtaccca

SEQ ID NO: 12285 - protein, 318 aa, Triticum aestivum
  misc_feature (1)..(318): Ceres Seq. ID no. 15220250
  misc_feature (34)..(34): Xaa is any aa, unknown or other
  misc_feature (127)..(127): Xaa is any aa, unknown or other
SRVRPAVRFSRIPIAPASKTPLPSPSSSPSPSPXRRPMASLLRTAAALAPPPSSARETRRPSCAASLACSRRAPASPLRAPPLPGPWRLGPDEAARTATQFLCRYMRRDGHEGDGRTQGQDEPSMFXPDDDDGAKIPTQVETLVRGTAIVDAPEYKPLPDLDYLQELLAIQQQGPRSIGFFGTRNMGYMHQQLIEILSYAMVITKNHIFTSGASGTNAAVIRGALRAEKPELLTVILPQSLKKQPPESQELLSKVQNLIEKPQYDHLPLIEASRLCNMDIISKVQQVICFAFHDSRLLMETCQEAKNMRKIVTLFYLD

SEQ ID NO: 12286 - protein, 281 aa, Triticum aestivum
  misc_feature (1)..(281): Ceres Seq. ID no. 15220251
  misc_feature (90)..(90): Xaa is any aa, unknown or other
MASLLRTAAALAPPPSSARETRRPSCAASLACSRRAPASPLRAPPLPGPWRLGPDEAARTATQFLCRYMRRDGHEGDGRTQGQDEPSMFXPDDDDGAKIPTQVETLVRGTAIVDAPEYKPLPDLDYLQELLAIQQQGPRSIGFFGTRNMGYMHQQLIEILSYAMVITKNHIFTSGASGTNAAVIRGALRAEKPELLTVILPQSLKKQPPESQELLSKVQNLIEKPQYDHLPLIEASRLCNMDIISKVQQVICFAFHDSRLLMETCQEAKNMRKIVTLFYLD

SEQ ID NO: 12287 - protein, 213 aa, Triticum aestivum
  misc_feature (1)..(213): Ceres Seq. ID no. 15220252
  misc_feature (22)..(22): Xaa is any aa, unknown or other
MRRDGHEGDGRTQGQDEPSMFXPDDDDGAKIPTQVETLVRGTAIVDAPEYKPLPDLDYLQELLAIQQQGPRSIGFFGTRNMGYMHQQLIEILSYAMVITKNHIFTSGASGTNAAVIRGALRAEKPELLTVILPQSLKKQPPESQELLSKVQNLIEKPQYDHLPLIEASRLCNMDIISKVQQVICFAFHDSRLLMETCQEAKNMRKIVTLFYLD

SEQ ID NO: 12288 - DNA, 1901 bp, Triticum aestivum
  misc_feature (1)..(1901): Ceres Seq. ID no. 13663734
cattacctagaacatcctaatcgaaaaaaagcctctcttcccctcaccccccacagatcgatccctcccggacagaaacgcagcaaggccgactaccttccaccgccgcttcgacactagggttcagccgttacatcgtcggcggggcttggcccgccgccgccggagatgggcgtcgcggagattgcgaagaaggtcgacgccctcaaggccgagctcgccgccaagtcgtcccgcatcgccgacctggaggcccgggtctcgctcctcgaagccgagaacgcgcgcttgaggaaggccatgtccgagggagttgcgatgaaccgtagagccaaaaagggtccaacctttggtcgattggaggagggtctcggcggaaacaagcaaaagtcagccgacatcgcgggcgggcatctgatgaatgatgtcatagaggtcagcgacggcgaggaagarggsgatggctgtggatgtcaacagcggggaggagggcgttcctccggtcccgactcctagcaagtgtgcggtgcgggtggtgaccggcaagaggggtgttgcagaggagattaaggacgccgatggaggtggtgggcgagaccatgggagcgttcgctgtgatggcaatgtgattctggacgacgatgatgttttgatcacgccacgaggcaagaagcgcacagcgacacgggtaatcagtgacagtgagagtgaggatgaagatgagaatggtcaagggcatggagatggtgaggtgggtgttagaagcagcaggaaatgtttgttgcgtggagtcagtgacagtgcgagtgaggatggcagtgagggtgttcgtgtggttaatcaaaaacctgtttcacctctagttacgacaggggtcgagagtgaggatgacgatggtgaattacatgagatggaggggcgttctactccggcaacaaggcgcttcgctcggttggctgaaggtcaatcaaagagaatgcgacctacacgtcggaaacttgagttttttgaacccaagaatcatgaagagagcgaggatgattcagaagaggatgataatatggaaaattttatagtagatgattcagattgttcagaaaattctgctgattctgttgaagaatcctctgctggaccagaagagtctgacgacgaggaaacttataaagagcttatggataggatacgcggcaaaaggaatgccaagaataaggattggaagattgagccagagatgctatcagcatttgatgaataccctgaacttcgcctgaaagctgtttgtgccctctatcgaaagcagacccaggaagaacaggcaggaaaagctattatcatgcacaacaaaaaaggatttaaccagatagacgcccgaaggggttctaacatagcgcagtttcttctggatggtgatgctgctgggccgcttaagaagactgcacaagacttggaaaattacgatcggtatgctcttgagttctgtcacaagatggctttacgttactcgaagcagttgtttgcaatatatcagaataaggagtacccctactttccatgactctggtgtcagttatcacttacttcatatgttgacctttctgtgacccttgtacctccccaatcagtcagtcagagtcttttgtatatatgggtttagttttgtgtcttaagtaatctgtagttagggcatgctaaagttagtttatcactaggatgcacgctgttaagtgaagcacgtgtctgacagggtctatgttgtttagctgaactgcttgtgctccctgtaatatccatgcatagtaaatctatctctatccttgaaatgttacccaaggagttgttcaaaaaaaaaaaaaaaaaagcttatcgataccgtcgacctcgagggggggcccggtacc

SEQ ID NO: 12289 - protein, 365 aa, Triticum aestivum
  misc_feature (1)..(365): Ceres Seq. ID no. 15220724
MAVDVNSGEEGVPPVPTPSKCAVRVVTGKRGVAEEIKDADGGGGRDHGSVRCDGNVILDDDDVLITPRGKKRTATRVISDSESEDEDENGQGHGDGEVGVRSSRKCLLRGVSDSASEDGSEGVRVVNQKPVSPLVTTGVESEDDDGELHEMEGRSTPATRRFARLAEGQSKRMRPTRRKLEFFEPKNHEESEDDSEEDDNMENFIVDDSDCSENSADSVEESSAGPEESDDEETYKELMDRIRGKRNAKNKDWKIEPEMLSAFDEYPELRLKAVCALYRKQTQEEQAGKAIIMHNKKGFNQIDARRGSNIAQFLLDGDAAGPLKKTAQDLENYDRYALEFCHKMALRYSKQLFAIYQNKEYPYFP

SEQ ID NO: 12290 - protein, 215 aa, Triticum aestivum
  misc_feature (1)..(215): Ceres Seq. ID no. 15220725
MEGRSTPATRRFARLAEGQSKRMRPTRRKLEFFEPKNHEESEDDSEEDDNMENFIVDDSDCSENSADSVEESSAGPEESDDEETYKELMDRIRGKRNAKNKDWKIEPEMLSAFDEYPELRLKAVCALYRKQTQEEQAGKAIIMHNKKGFNQIDARRGSNIAQFLLDGDAAGPLKKTAQDLENYDRYALEFCHKMALRYSKQLFAIYQNKEYPYFP

SEQ ID NO: 12291 - protein, 193 aa, Triticum aestivum
  misc_feature (1)..(193): Ceres Seq. ID no. 15220726
MRPTRRKLEFFEPKNHEESEDDSEEDDNMENFIVDDSDCSENSADSVEESSAGPEESDDEETYKELMDRIRGKRNAKNKDWKIEPEMLSAFDEYPELRLKAVCALYRKQTQEEQAGKAIIMHNKKGFNQIDARRGSNIAQFLLDGDAAGPLKKTAQDLENYDRYALEFCHKMALRYSKQLFAIYQNKEYPYFP

SEQ ID NO: 12292 - DNA, 1020 bp, Triticum aestivum
  misc_feature (1)..(1020): Ceres Seq. ID no. 13663783
aagaataccccacttaaactttcttatgtatatcaatgtgccggctgtgattctttccatcttcaatcccttgggaggactgttactaagaataatagcttgaagcatgcgcctggtattggacctgttgttcctcaagaatgcagcgactgtgaaaagaaatttaatgtgggtgggccaatatggtctgctcctattcatgatcaagattgggtactttctacgctgacagatgttaggcaaatgaaggatagatatcccgcatacaacaaaattacttcagttctaactactgtatcagaggaattgcatgacattccattattttttagtctccacaacatatctgggactgtgaagtgcacatcaccatctgcagttatgttccggtcagcggttataaatgcaggatatcagatctcaagcagtcactgtaatccgcttgggctgaagtctgatgccccctgggatgttatttgggacatcatgcgctgctgggtgaaaaaccatccaatcaaggaacagccgcgtgactctccgggcactgcaatcctttctaaatctccacagctagaagcaaatttctctagagcagttgctgccctcagcaaggctcaggttaagaaggtgaatcggttccttccaaacccagaaagtcactggggtccgaaggtcagagcaggtcggagaattactagcaagcatatctctctgttaggcgcagaggctctcaatggagctatcagccaccaagatggaaatggagcggtgacagataagccagcttctgatactggagcaactgtcacgaatgaagaagagaatgagccttcaaccaaacgccagaaaactggcgatggtgaacaggccagcgaaccttgatcgacatggtcgtctaaacttttgttcgttaatcttgatatcactagttgtttctttcttgtgacccaacagattattgatattacctacggtgacatgttttgggcagtgaattttgatcaggcgatctatttttcc

SEQ ID NO: 12293 - protein, 293 aa, Triticum aestivum
  misc_feature (1)..(293): Ceres Seq. ID no. 13663784
KNTPLKLSYVYQCAGCDSFHLQSLGRTVTKNNSLKHAPGIGPVVPQECSDCEKKFNVGGPIWSAPIHDQDWVLSTLTDVRQMKDRYPAYNKITSVLTTVSEELHDIPLFFSLHNISGTVKCTSPSAVMFRSAVINAGYQISSSHCNPLGLKSDAPWDVIWDIMRCWVKNHPIKEQPRDSPGTAILSKSPQLEANFSRAVAALSKAQVKKVNRFLPNPESHWGPKVRAGRRITSKHISLLGAEALNGAISHQDGNGAVTDKPASDTGATVTNEEENEPSTKRQKTGDGEQASEP

SEQ ID NO: 12294 - protein, 212 aa, Triticum aestivum
  misc_feature (1)..(212): Ceres Seq. ID no. 13663785
MKDRYPAYNKITSVLTTVSEELHDIPLFFSLHNISGTVKCTSPSAVMFRSAVINAGYQISSSHCNPLGLKSDAPWDVIWDIMRCWVKNHPIKEQPRDSPGTAILSKSPQLEANFSRAVAALSKAQVKKVNRFLPNPESHWGPKVRAGRRITSKHISLLGAEALNGAISHQDGNGAVTDKPASDTGATVTNEEENEPSTKRQKTGDGEQASEP

SEQ ID NO: 12295 - protein, 166 aa, Triticum aestivum
  misc_feature (1)..(166): Ceres Seq. ID no. 13663786
MFRSAVINAGYQISSSHCNPLGLKSDAPWDVIWDIMRCWVKNHPIKEQPRDSPGTAILSKSPQLEANFSRAVAALSKAQVKKVNRFLPNPESHWGPKVRAGRRITSKHISLLGAEALNGAISHQDGNGAVTDKPASDTGATVTNEEENEPSTKRQKTGDGEQASEP

SEQ ID NO: 12296 - DNA, 1229 bp, Triticum aestivum
  misc_feature (1)..(1229): Ceres Seq. ID no. 13663874
tgaacccgtctcttactttacctccttggaggaaaacccaactggagcccctcctttttctgccttcggcttgggtcctatattataaaccaaagggaggaaggacagctagctagctgtatcagagagccccatacctagtcgatcgtctgctctcttctgcctagctaggtttaccctccttatctgcgtgtttggcagagttccgggctgagactaagaagaggtcgagatggggaggggaaggattgagatcaagaggatcgagaacaccactagccggcaggtgaccttctgcaagcgccggaacgggctcctcaaaaaggcctacgagctctccgtcctgtgcgacgccgaggtggcgctcatcgtcttctccagccgcggccgcctctacgagtactccaacaacagtgtcaaggctacaattgacaggtacaagaaggcacatgcttgtggctcaacctctggggtacctctcatagaagtcaatgctcagcaatactaccagcaagaagctgcaaagctgcgccaccagatccagatgctgcaaagcactaacaagcacttggttggtgattctgttgggaacctgtcactcaaggagctgaagcaactcgaaagccggcttgagaaaggcattgcgaagatcagggccaggaagaatgagctcctatcttctgagatcaactacatggtcaaaagggagatagagcttcagagtgacagcattgatctcagaaccaagattgcggaggaggagcagcggttgcagcaggtgactatcgccaggccctcggtggcgccggagctgaaccctttcaccgcactggacatgaagtgcttcttccctgccaacctcttcgaggcggcggtgcatgcgcacgcgcaggcacaggctcaggctcaggctcaggcctcgcttcagctgaacctaggctaccagcagcttgctccaccgggcgccggcgatgtggctcatcagttctagtcaacctgcaggagctcttgcttgactacacacactgcaataaaactggaaagtcgtcggcagtgttatcagtactcaactgttccggtcaaaccgtctggctaagatatatgtgtgctaagttttattgtctcaagtacctctaaatttgccgctggtgtagaaccaaatttctgagataaaacctattgattaataattatttttttccttttcttttttgatgaaaaggaggtcg

SEQ ID NO: 12297 - protein, 252 aa, Triticum aestivum
  misc_feature (1)..(252): Ceres Seq. ID no. 13663875
MGRGRIEIKRIENTTSRQVTFCKRRNGLLKKAYELSVLCDAEVALIVFSSRGRLYEYSNNSVKATIDRYKKAHACGSTSGVPLIEVNAQQYYQQEAAKLRHQIQMLQSTNKHLVGDSVGNLSLKELKQLESRLEKGIAKIRARKNELLSSEINYMVKREIELQSDSIDLRTKIAEEEQRLQQVTIARPSVAPELNPFTALDMKCFFPANLFEAAVHAHAQAQAQAQAQASLQLNLGYQQLAPPGAGDVAHQF

SEQ ID NO: 12298 - protein, 148 aa, Triticum aestivum
  misc_feature (1)..(148): Ceres Seq. ID no. 13663876
MLQSTNKHLVGDSVGNLSLKELKQLESRLEKGIAKIRARKNELLSSEINYMVKREIELQSDSIDLRTKIAEEEQRLQQVTIARPSVAPELNPFTALDMKCFFPANLFEAAVHAHAQAQAQAQAQASLQLNLGYQQLAPPGAGDVAHQF

SEQ ID NO: 12299 - DNA, 1283 bp, Triticum aestivum
  misc_feature (1)..(1283): Ceres Seq. ID no. 13663895
atagcaaaggactctatccttctccccttgcgcctccggtgttccaaattccaaattccaaaacccacccccgaggcgaggaaaagcaccgcaccctcctcgcgatacaaaaggcgcagagagaaagtgaggagcggcccccgtaccgcatcccaccaccccggcccgaacccctgcacgccgcaaccgcccgcccgcccgcctgcctgcccggccgcgatgatccagctcctcttcaccttgctgggcgcggaggcgggcgtggcggccgtcctgctcttcaagacgccgctgcggaagctggcgatgctcgcgctcgaccgcctcaagcgcggccgggcccccgtcatggtgcgcaccgtcgccgccaccgtcctcgtcgtcctcgcctccagcctccacagcatggccaagatccacggccacgccggcgccggcgagctcgacgcgcccggcgcgctcagccccaccgaccaggtcctcctcgcccgccacctcctcgaggcctccctcatgggatatattttattccttgctctcgtcattgaccggctacacagctacatcagagagatgcgagggctgaagaagaacctggaggctgtgtcgaagcagaacaagaccttagaagaagcaaaatctggaaggtccgacgagagcaagccacaccacaacgacattgcttcgctgaacgaggagatcaagaagctgaagcggcaactgaaagaaaaggcggaggaggccaaggatgcagaggccaaagcactagctgcccagacgcagtctgaaggtcttgcgcgcaaatatgaccgcctgctggaggacaacaagcatctccatgaccagctgcagtcaggagacatcccgctgtcgcgttcggatggcaagaagaatgcctaagttgtggttggtcctcatcaagctagtcggaaactcctgcaagcctgaagacagttgcgagatgaaaatgacgtcggttactgataatcagccatcggagtagtaccatctttacataaatgttctggtactgtgtaccagaacgcaaaaatatcactcaacctcttacagccaggttagccgagactatgcgaagatgctcgcctgtaaacatctgatggtgttcgactgaatgttcttagtctgatcaagtcgtagttagaacatgagaggtattcatatctcgacaaatctggctgctggttgtcttcgccatcgacttacttgtccaaacatagagaagccgtcattgaactctggttaccctttcataaatttcggct

SEQ ID NO: 12300 - protein, 299 aa, Triticum aestivum
  misc_feature (1)..(299): Ceres Seq. ID no. 15220263
IAKDSILLPLRLRCSKFQIPKPTPEARKSTAPSSRYKRRREKVRSGPRTASHHPGPNPCTPQPPARPPACPAAMIQLLFTLLGAEAGVAAVLLFKTPLRKLAMLALDRLKRGRAPVMVRTVAATVLVVLASSLHSMAKIHGHAGAGELDAPGALSPTDQVLLARHLLEASLMGYILFLALVIDRLHSYIREMRGLKKNLEAVSKQNKTLEEAKSGRSDESKPHHNDIASLNEEIKKLKRQLKEKAEEAKDAEAKALAAQTQSEGLARKYDRLLEDNKHLHDQLQSGDIPLSRSDGKKNA

SEQ ID NO: 12301 - protein, 226 aa, Triticum aestivum
  misc_feature (1)..(226): Ceres Seq. ID no. 15220264
MIQLLFTLLGAEAGVAAVLLFKTPLRKLAMLALDRLKRGRAPVMVRTVAATVLVVLASSLHSMAKIHGHAGAGELDAPGALSPTDQVLLARHLLEASLMGYILFLALVIDRLHSYIREMRGLKKNLEAVSKQNKTLEEAKSGRSDESKPHHNDIASLNEEIKKLKRQLKEKAEEAKDAEAKALAAQTQSEGLARKYDRLLEDNKHLHDQLQSGDIPLSRSDGKKNA

SEQ ID NO: 12302 - protein, 197 aa, Triticum aestivum
  misc_feature (1)..(197): Ceres Seq. ID no. 15220265
MLALDRLKRGRAPVMVRTVAATVLVVLASSLHSMAKIHGHAGAGELDAPGALSPTDQVLLARHLLEASLMGYILFLALVIDRLHSYIREMRGLKKNLEAVSKQNKTLEEAKSGRSDESKPHHNDIASLNEEIKKLKRQLKEKAEEAKDAEAKALAAQTQSEGLARKYDRLLEDNKHLHDQLQSGDIPLSRSDGKKNA

SEQ ID NO: 12303 - DNA, 1389 bp, Triticum aestivum
  misc_feature (1)..(1389): Ceres Seq. ID no. 13663942
atacttctggctagtcaaactgtgatccctcgctcctccgcaccgccgccgccgctgcgatgtccaccgccgccgccgccgccggccgaggtctcaaatccgtctcccgcgccgccttctcctggaagccgacgggccgggcgcagcagacgctcgcggcggcggtgagcaggtcgggcgtgggactccactcgggcgcgcgcgccaccgccaggttgctccctgcgcgcgccggcgaggggaggtacttcgtcgtggaggaggcgagggtggcggcggaggcggggaatgccgagccacagtctccgctctgcaccacgctgcggagcgggagcggcggcgcgcgggtgcgcacggtggagcacctgctctcggccatggaggcgttcggtgtcgacaactgccgcgtcgaggtcagcggcggcgatgagatccctttgcttgatggatcagcgcaagagtgggtggaggccattcggggtgcaggtctgtgtgcggccgaggatatcggtggacagaagttggagaaactggcacccaagatcgacgagcctgtttacctgcgtaaggacgattgctttgtagctgcattcccttcctcgcaaatccacatcacctatggaattgattttccaaaggcgccagcgattggttgtcaatggttcaatactttcctggatgctgatatatactcaagcaagatagctcctgcaagaactttctgtatttttgaagaggttgaaaaaatgcgtgatgccgggcttataaaaggaggatcactggaaaatgctatggtttgcagtatgtctggtggttggcttaacccaccacttcgttttgatgatgaaccttgccgccacaagattttagatcttataggtgacttctcacttcttgcacggaatggcagccagggttttccaattgctcatgtagttgcctacaaggctggccatgccctgcacaccagtttcctacaccatttatcgggggagaccagtgtggaccaaggaacgcttgcttggtgatcttgaagcgtgtgcatgtggagcgggtactgttcatatgttggtgatagtgatgctcgacaggaagacggcagatttcagcatataccgtactaataaccatctgatggccctcgccctcactctgacagtcggaccggttgtactgtacatctcctccatctttggcaagtgatttctttagttcacgagccatatacagtatcattatcacatgctttggggagattgatccgaagaattatgtttgtacaccatgtgttatagttgtacctgaacacgtttcagtaaaaaaaaaaaaaaaaaagcttatcgataccgtcgactgtttaaacacaataaagttggaacgggagggggg

SEQ ID NO: 12304 - protein, 322 aa, Triticum aestivum
  misc_feature (1)..(322): Ceres Seq. ID no. 13663943
MSTAAAAAGRGLKSVSRAAFSWKPTGRAQQTLAAAVSRSGVGLHSGARATARLLPARAGEGRYFVVEEARVAAEAGNAEPQSPLCTTLRSGSGGARVRTVEHLLSAMEAFGVDNCRVEVSGGDEIPLLDGSAQEWVEAIRGAGLCAAEDIGGQKLEKLAPKIDEPVYLRKDDCFVAAFPSSQIHITYGIDFPKAPAIGCQWFNTFLDADIYSSKIAPARTFCIFEEVEKMRDAGLIKGGSLENAMVCSMSGGWLNPPLRFDDEPCRHKILDLIGDFSLLARNGSQGFPIAHVVAYKAGHALHTSFLHHLSGETSVDQGTLAW

SEQ ID NO: 12305 - protein, 216 aa, Triticum aestivum
  misc_feature (1)..(216): Ceres Seq. ID no. 13663944
MEAFGVDNCRVEVSGGDEIPLLDGSAQEWVEAIRGAGLCAAEDIGGQKLEKLAPKIDEPVYLRKDDCFVAAFPSSQIHITYGIDFPKAPAIGCQWFNTFLDADIYSSKIAPARTFCIFEEVEKMRDAGLIKGGSLENAMVCSMSGGWLNPPLRFDDEPCRHKILDLIGDFSLLARNGSQGFPIAHVVAYKAGHALHTSFLHHLSGETSVDQGTLAW

SEQ ID NO: 12306 - DNA, 1962 bp, Triticum aestivum
  misc_feature (1)..(1962): Ceres Seq. ID no. 13664013
catagcttcattccgtctcgatctctgccttctcctgagagactcgtatcagtcggctgcccaccatcgccggtccaagaagccgcctgctcgtcggctactccgccgccccactcgcccatccacccacctcccttccccggattcaggaccggatcggccttcccctctgtagatggacatcacaatcaattccttgacgtacaaaggttcgattccagatgcaattaatcaatcaagaagggagaaaaaactctttgtaatttacatatcaggtcaagatgaaacctcaagtagtttggaacagtctacattggttgatgaacatgtggctgcagtgataagcagatgttgcatattcttgcaactaaaacaaggcaatgttgacgcgcttcaattttcagctatctatccacagaagtctgtcccaagtatatctgtcgttggactgaatggtgctatgctatggaatcatgaggggtatattagcccagaagagcttaaggaaagcattgataaagcttgggctgcacttcaactgcaggagacagcggcaaccctgttagctgcatcacttgcttcaagaatgtctgaacctgcgaatactgcttcgacaactatgcctggtgaagatggttcatctacttcagaaaatcattccaattcatcaggtcaatcctcagagtcttctgcagtccgtgggtttgctaattctactgctttggtagcacaaccacctagtagcacaagccatgctgaacttctcaagacaagtaaaatcccaaaatcagattcagctccatgcaacataaccgctgaggaaaagctagattcagcatgtcaggctctgttgccagattttccagcaagctcaaatgtggacagttccacagatccaaatcagacaggcagtacaccttcgccaaaaaggaagaatatggtggatgggaatagccctaaagttccctccaagccagcttctagcataccaactaggagtactccacagttgcctgtggaacaagataaggcaactactagcagagctattgaagtgaccacagattctgcaaagacagatgatattcagctggccattcgtatgcctgatggacctagtctgcagattaaactgacaaaagaagatgttttaaggaaggtgaagacttttgtggatgaaaaccaagatagtgggattggatcatataatcttgcaatgctttatcctagaaaagtgttcacggaacaagatctggaaaccacattgtatgagctgggtattgaaacccgccaggcccttgttgtcgttccgaatcgtcaatctgttaaagtggtaaggcaccaatcgtcattgccatccagtgatctggatcgcactggggctacagacaggtcgggtggttggggttttctgggggcagcgttatcatacgtgaatccattgtcctacttgagaggaaatcccaccccatcaaatcctgatcgactgggaaatgaaggctcgcagcagtacagaccgaactctgaatcccaacctcttcgtagtgatggaagtcaacaaacagctactcatagctctggaaataccttgagaaggcggccccgacagttcggtggcaacattcacactctaagcagtgaagaacaagatccatctgataatagaaatgtcttctggaatgggaattctacagagtttggaggtgatgaaaagaaataggggatgaccggactgcatcgaagttagatgatacttgaaccatttaatggggaaataaatatgttgggaacgaactgaggtgttaaactacagtgcttatacatatgtttggaacaaattgaggtgttaaattacagtgcttatacataacaagtaatatggcacgtgcaaccctagaatttactttgttcaccccaggaatgacctttgttatttccgtacgagcatatataatttgatgt

SEQ ID NO: 12307 - protein, 514 aa, Triticum aestivum
  misc_feature (1)..(514): Ceres Seq. ID no. 13664014
MDITINSLTYKGSIPDAINQSRREKKLFVIYISGQDETSSSLEQSTLVDEHVAAVISRCCIFLQLKQGNVDALQFSAIYPQKSVPSISVVGLNGAMLWNHEGYISPEELKESIDKAWAALQLQETAATLLAASLASRMSEPANTASTTMPGEDGSSTSENHSNSSGQSSESSAVRGFANSTALVAQPPSSTSHAELLKTSKIPKSDSAPCNITAEEKLDSACQALLPDFPASSNVDSSTDPNQTGSTPSPKRKNMVDGNSPKVPSKPASSIPTRSTPQLPVEQDKATTSRAIEVTTDSAKTDDIQLAIRMPDGPSLQIKLTKEDVLRKVKTFVDENQDSGIGSYNLAMLYPRKVFTEQDLETTLYELGIETRQALVVVPNRQSVKVVRHQSSLPSSDLDRTGATDRSGGWGFLGAALSYVNPLSYLRGNPTPSNPDRLGNEGSQQYRPNSESQPLRSDGSQQTATHSSGNTLRRRPRQFGGNIHTLSSEEQDPSDNRNVFWNGNSTEFGGDEKK

SEQ ID NO: 12308 - protein, 419 aa, Triticum aestivum
  misc_feature (1)..(419): Ceres Seq. ID no. 13664015
MLWNHEGYISPEELKESIDKAWAALQLQETAATLLAASLASRMSEPANTASTTMPGEDGSSTSENHSNSSGQSSESSAVRGFANSTALVAQPPSSTSHAELLKTSKIPKSDSAPCNITAEEKLDSACQALLPDFPASSNVDSSTDPNQTGSTPSPKRKNMVDGNSPKVPSKPASSIPTRSTPQLPVEQDKATTSRAIEVTTDSAKTDDIQLAIRMPDGPSLQIKLTKEDVLRKVKTFVDENQDSGIGSYNLAMLYPRKVFTEQDLETTLYELGIETRQALVVVPNRQSVKVVRHQSSLPSSDLDRTGATDRSGGWGFLGAALSYVNPLSYLRGNPTPSNPDRLGNEGSQQYRPNSESQPLRSDGSQQTATHSSGNTLRRRPRQFGGNIHTLSSEEQDPSDNRNVFWNGNSTEFGGDEKK

SEQ ID NO: 12309 - protein, 377 aa, Triticum aestivum
  misc_feature (1)..(377): Ceres Seq. ID no. 13664016
MSEPANTASTTMPGEDGSSTSENHSNSSGQSSESSAVRGFANSTALVAQPPSSTSHAELLKTSKIPKSDSAPCNITAEEKLDSACQALLPDFPASSNVDSSTDPNQTGSTPSPKRKNMVDGNSPKVPSKPASSIPTRSTPQLPVEQDKATTSRAIEVTTDSAKTDDIQLAIRMPDGPSLQIKLTKEDVLRKVKTFVDENQDSGIGSYNLAMLYPRKVFTEQDLETTLYELGIETRQALVVVPNRQSVKVVRHQSSLPSSDLDRTGATDRSGGWGFLGAALSYVNPLSYLRGNPTPSNPDRLGNEGSQQYRPNSESQPLRSDGSQQTATHSSGNTLRRRPRQFGGNIHTLSSEEQDPSDNRNVFWNGNSTEFGGDEKK

SEQ ID NO: 12310 - DNA, 665 bp, Triticum aestivum
  misc_feature (1)..(665): Ceres Seq. ID no. 13664017
agtcgccacactagagctagccagagagaccgaccatggcggacggaggcgtgtgggtgttccggaaggacggggtgatggagctggagagcgcggccgggtcgacgtcgagccggagcgggccggggaacaaggcgctggtgtacgtgccggcgaacgagacgatgcggtcgctgcaggcgctggagcagcgcctcggcgcgcacggctgggagcgctactacgagaaccgcgacgtggtgcagctccaccgccgcgacggcagcctcgacctcatctcgctcccgcgggactttgcgcagctccgctccacccacatgtacgtcgtcgtcgtcaagaaccgaggccacttcaaggtcctcgacctctaacatctactagtagtctgtagtagtagtatactcacgtacgcaaccactgctttcccggtcagttaagcttgcaaccttaagctctgtgtgcatgctaattccctatacggctggtatatcgttgtgagtatcctacccatatatcttttgtactatttgtatggtattatccgagttcgtgcccgtctcgggttctagaggggctttttttccaagaaaaaaaaagtcctagagtgccaagctatcctcgttatgattgaatcttgatcgttttttgggggcttgtttatgttt

SEQ ID NO: 12311 - protein, 129 aa, Triticum aestivum
  misc_feature (1)..(129): Ceres Seq. ID no. 13664018
VATLELARETDHGGRRRVGVPEGRGDGAGERGRVDVEPERAGEQGAGVRAGERDDAVAAGAGAAPRRARLGALLREPRRGAAPPPRRQPRPHLAPAGLCAAPLHPHVRRRRQEPRPLQGPRPLTSTSSL

SEQ ID NO: 12312 - protein, 111 aa, Triticum aestivum
  misc_feature (1)..(111): Ceres Seq. ID no. 13664019
MADGGVWVFRKDGVMELESAAGSTSSRSGPGNKALVYVPANETMRSLQALEQRLGAHGWERYYENRDVVQLHRRDGSLDLISLPRDFAQLRSTHMYVVVVKNRGHFKVLDL

SEQ ID NO: 12313 - protein, 97 aa, Triticum aestivum
  misc_feature (1)..(97): Ceres Seq. ID no. 13664020
MELESAAGSTSSRSGPGNKALVYVPANETMRSLQALEQRLGAHGWERYYENRDVVQLHRRDGSLDLISLPRDFAQLRSTHMYVVVVKNRGHFKVLDL

SEQ ID NO: 12314 - DNA, 1888 bp, Triticum aestivum
  misc_feature (1)..(1888): Ceres Seq. ID no. 13664089
attccctctcgcctcctcccccctctcccatggcggcgccgtcggcagccatgcgcaagaagctgcagcgcaaattccggctgcgtggcttcaccctcaaagttgacgccctcgaggaggcggccgccttcctcgcccgcttccccgacgccgaggacgaggccctcgacctcctcctcgacgagctcgacaaagagccgcgcatactggaagattagccctccatggagaagctggagataaagccgccctttacagggatagatatcaagtgctgcttcagaggctcgctcgtgataaatatttctccaagccagcttttgagtctgttatggctgaaaatgaaagttgtgagattacttccatacagtccttaattgggtgtactgggcggagatggatcatgggggtcatatcgcagttggaggaacgccagttctacttggaggatcttactggagcagtgccaattgacttggcgaatgcaaaaatcacttcaggtttctttgttgaaaacacagtgattgtagcagaaggagaattactttcaagtggcattttccaggtcaatacctgtgggtttcctcccttagaggacagagaaacatcactttcactgcttatggggcttgatttctttggtggaggtgtcataccaactgaagaagcactaagattgtcatcactagaaaataaggctgtgaatgacatgtttgtcattctttcagatgtttggctcgacagttatgagactatggagaagttgggtgttgttcttgatggctatgaaagtgtggaagtagttccttctctctttgttctaatgggaaatttctgctcccggccctgcaatctggcattcaattcgttcgaagaactcagtttggaaagcttggtgagatgatcgcatctcgaactaggttaaaggaacatagtcgttttttattcatccctggtcctgatgatgcaggaccttctaaagctctcccaaggtgtgcgctcccaaagtatctaattgaggaacttcagaagcacatcccaaatgctatatttgtaagcaacccctgcagggttaagttttatacacaagaaatcgtgtttttccggcaagatctcctttacaggatgcggcggtcatgcttgattccaccaacaacggaagaaacaagtgacccatttgaacatctagtagcaactatcacccatcagagtcatctgtgtccattgcctcttacagtgcaacctatcatatggaactacgatcattgcctacggctatatccaactcctgacatgatagtattggctgacaagagtgagcagaaggccttcaaatatacaggaatcacttgcttcaatcctggttcttttgcgaacgacagcacctttgcagcataccgtccttgcactaaggaggttgagctttctgcattagaaagctaatattgaaggtgagacaaactgaagctgtaatcagtaacaaaccgaaccttcgatgagctgcctatcactcctgtacatcagccatcaggactggtgtttatgactttagccatataaactaatgagtccgtttcatggaagcgaatttgcaagcatgacaaagcaatgatatccatggaattggtgctgtttctcaagcaaatctgatgctgacatctcaactttgtatcacacatttatagcttcagatagttgtggaccgtagtgtttgttacttgttagggtcttttccccacctggccatctgtcctctgtgcagtgtttgtgtaacatgatctcaggatgctttccctaaagtcacagaatggtgctcagtcctgtaatatgtactgtttatgtttgccattgttgtaaaccatgctaacaaagctgtggtttttagttc

SEQ ID NO: 12315 - protein, 190 aa, Triticum aestivum
  misc_feature (1)..(190): Ceres Seq. ID no. 15220276
MAENESCEITSIQSLIGCTGRRWIMGVISQLEERQFYLEDLTGAVPIDLANAKITSGFFVENTVIVAEGELLSSGIFQVNTCGFPPLEDRETSLSLLMGLDFFGGGVIPTEEALRLSSLENKAVNDMFVILSDVWLDSYETMEKLGVVLDGYESVEVVPSLFVLMGNFCSRPCNLAFNSFEELSLESLVR

SEQ ID NO: 12316 - protein, 180 aa, Triticum aestivum
  misc_feature (1)..(180): Ceres Seq. ID no. 15220277
MIASRTRLKEHSRFLFIPGPDDAGPSKALPRCALPKYLIEELQKHIPNAIFVSNPCRVKFYTQEIVFFRQDLLYRMRRSCLIPPTTEETSDPFEHLVATITHQSHLCPLPLTVQPIIWNYDHCLRLYPTPDMIVLADKSEQKAFKYTGITCFNPGSFANDSTFAAYRPCTKEVELSALES

SEQ ID NO: 12317 - protein, 166 aa, Triticum aestivum
  misc_feature (1)..(166): Ceres Seq. ID no. 15220278
MGVISQLEERQFYLEDLTGAVPIDLANAKITSGFFVENTVIVAEGELLSSGIFQVNTCGFPPLEDRETSLSLLMGLDFFGGGVIPTEEALRLSSLENKAVNDMFVILSDVWLDSYETMEKLGVVLDGYESVEVVPSLFVLMGNFCSRPCNLAFNSFEELSLESLVR

SEQ ID NO: 12318 - DNA, 1351 bp, Triticum aestivum
  misc_feature (1)..(1351): Ceres Seq. ID no. 13664096
acctagaacatcctaatcgaaaattatgaacaatgcactgccaacagacaacctggaaacagcttcgtcagcgacttcattatggccttcacaaacagatggacttctgcatcaaggtttcgccacttctaacttcaaccagcaccagatgttcaaagatgaacttcctgatgtagaaattcaaggtgtggatccaagtaacagtgccctctttgggatgaacaatgatggcccgttagggtttcctatggaaacagaaggcttgttggaaaatgcacttgattctgtgaagtatcagaatcatttctcaactgatgatgagaacaactaccagatgcaaaaggatgcccgtcaagagatatcaacctccatggtttcacagtcatttggtcaatcagatatggcttttaattccatcgattctgcaattaatgatggtgccttaatgaacagaagttcttggcctcctgctgctccaccacagaggatgcctacattcaccaaggtgtacaagcgtggagctgtaggccggtccattgacatcggtaggttctctggatatggagaactgaatcaagctttggcccgcatgtttggtatagaggggcaacttgaagaccgacagagaataggttggaagctagtctacacagatcatgaggatgacgtcctacttctcggcgatgacccatgggaggagtttgtgaattgcgtcaagtgcattaggatcctgtcccctcaagaagtgcagaagatgagtctggatggtgatttagggagcaatgttctgcccaaccaggcttgcagcagctcagatggagggaatacttggaagcctcgttacgagcagaactccgggaacccttccatcggcccctatgaccaattcgaatgacatgacttagaggcgcattcacatagttgtcatgttaacatcttggttagttgtattcactatttgtcttcaccattatggattcatgtgtactacagccatcatcaaagctgcaaaagaaatgcagtgaagaatgtagtttagatgtgtcagcttatagctgtaagggaaaatgctcctcagattaggttttcttttggatatatatgtagctttatcagttgaaatgagtagtagggatgagaactgaaaactttcccagagttgttagagacctgagacacttaggcaaatctgaagatagtatgttcttgggaagaacatttgtactggactattgttgggttgtgtgtagcccttgttaaggtcaccatccccaaatagaaactgctaggtttactaaaaaagatggaactgcgatatgaaatttggttcaatctactgtttggtcttatc

SEQ ID NO: 12319 - protein, 289 aa, Triticum aestivum
  misc_feature (1)..(289): Ceres Seq. ID no. 15220279
MNNALPTDNLETASSATSLWPSQTDGLLHQGFATSNFNQHQMFKDELPDVEIQGVDPSNSALFGMNNDGPLGFPMETEGLLENALDSVKYQNHFSTDDENNYQMQKDARQEISTSMVSQSFGQSDMAFNSIDSAINDGALMNRSSWPPAAPPQRMPTFTKVYKRGAVGRSIDIGRFSGYGELNQALARMFGIEGQLEDRQRIGWKLVYTDHEDDVLLLGDDPWEEFVNCVKCIRILSPQEVQKMSLDGDLGSNVLPNQACSSSDGGNTWKPRYEQNSGNPSIGPYDQFE

SEQ ID NO: 12320 - protein, 248 aa, Triticum aestivum
  misc_feature (1)..(248): Ceres Seq. ID no. 15220280
MFKDELPDVEIQGVDPSNSALFGMNNDGPLGFPMETEGLLENALDSVKYQNHFSTDDENNYQMQKDARQEISTSMVSQSFGQSDMAFNSIDSAINDGALMNRSSWPPAAPPQRMPTFTKVYKRGAVGRSIDIGRFSGYGELNQALARMFGIEGQLEDRQRIGWKLVYTDHEDDVLLLGDDPWEEFVNCVKCIRILSPQEVQKMSLDGDLGSNVLPNQACSSSDGGNTWKPRYEQNSGNPSIGPYDQFE

SEQ ID NO: 12321 - protein, 225 aa, Triticum aestivum
  misc_feature (1)..(225): Ceres Seq. ID no. 15220281
MNNDGPLGFPMETEGLLENALDSVKYQNHFSTDDENNYQMQKDARQEISTSMVSQSFGQSDMAFNSIDSAINDGALMNRSSWPPAAPPQRMPTFTKVYKRGAVGRSIDIGRFSGYGELNQALARMFGIEGQLEDRQRIGWKLVYTDHEDDVLLLGDDPWEEFVNCVKCIRILSPQEVQKMSLDGDLGSNVLPNQACSSSDGGNTWKPRYEQNSGNPSIGPYDQFE

SEQ ID NO: 12322 - DNA, 590 bp, Triticum aestivum
  misc_feature (1)..(590): Ceres Seq. ID no. 13664097
gaggccaaggccacacacctgcaataccagtgcttgccaaaaaccgctcagctgcttgctgacaagtgataagcttctcggtccattaatcggtcgacccgcgtctggtgaagatggggagggcgaactgctcggttcctctcctggtgttgctggccttcctctcctgcttcttcctcgcacacgcggcggtggccggggccggcggcaaccgcaagatgttcctgccgagggagggagcggcagccgccgccgtgtccgacgatggtgggcaggcgatgccgacgacggcggaggaggtggcggtcggaggagagatgcatctgctgctgagcgacgacgaggagatgttggccaggagggtggacctgcagacagaggactacccggggtccggggccaacggccgccatgatccacgaaacccgcattaagagttattatgccgtgctgcatgtacgataagtgcatgtaattaaccgcatgtttagttacccccacaatcatgcataattaagcatatatatcatcaccacgttgctaaacatcatgatcttaatttaatttgctagtgtatgcatctttggttg

SEQ ID NO: 12323 - protein, 137 aa, Triticum aestivum
  misc_feature (1)..(137): Ceres Seq. ID no. 13664098
RPRPHTCNTSACQKPLSCLLTSDKLLGPLIGRPASGEDGEGELLGSSPGVAGLPLLLLPRTRGGGRGRRQPQDVPAEGGSGSRRRVRRWWAGDADDGGGGGGRRRDASAAERRRGDVGQEGGPADRGLPGVRGQRPP

SEQ ID NO: 12324 - protein, 106 aa, Triticum aestivum
  misc_feature (1)..(106): Ceres Seq. ID no. 13664099
MGRANCSVPLLVLLAFLSCFFLAHAAVAGAGGNRKMFLPREGAAAAAVSDDGGQAMPTTAEEVAVGGEMHLLLSDDEEMLARRVDLQTEDYPGSGANGRHDPRNPH

SEQ ID NO: 12325 - protein, 71 aa, Triticum aestivum
  misc_feature (1)..(71): Ceres Seq. ID no. 13664100
MFLPREGAAAAAVSDDGGQAMPTTAEEVAVGGEMHLLLSDDEEMLARRVDLQTEDYPGSGANGRHDPRNPH

SEQ ID NO: 12326 - DNA, 604 bp, Triticum aestivum
  misc_feature (1)..(604): Ceres Seq. ID no. 13664129
aagatttttgtcatgttacttcaatataggttgaaaaactaaagttctaggagtacctgtaatgtaccattgttgtgattaatcatggccatctattatgctatttgtacaagatggagctcagtagaggagttcactcattccaaaccttaaatgcacatttcatacttgtgcatctagaacttaataatggagaactaagcaatggtttcataattccagcacaaggatatatgccggtttgctggtactgttcctaatgcgacaacaacaggcgatatcgatagcatggccatgtatgctggccagagtgttgggctaatcaccgagattgtaccagcaagggaagttgtcaagaggctagtcgctgaagcacagcgtgtcattggagaaaagctttctggtttccccaaatcatcagagtagtgctggtgaagtccttggtaattaaactgttaaggtatctaatggtgtacgctgcgtgttatttgtaggcaatagccaatgaaaataaatgggttttccaaggtattccctttttaccacagttttgtacttgtatgtgttgtttgtaagtatatattcaataaaggtaaatgatttc

SEQ ID NO: 12327 - protein, 48 aa, Triticum aestivum
  misc_feature (1)..(48): Ceres Seq. ID no. 15220730
MELSRGVHSFQTLNAHFILVHLELNNGELSNGFIIPAQGYMPVCWYCS

SEQ ID NO: 12328 - protein, 45 aa, Triticum aestivum
  misc_feature (1)..(45): Ceres Seq. ID no. 15220731
MAMYAGQSVGLITEIVPAREVVKRLVAEAQRVIGEKLSGFPKSSE

SEQ ID NO: 12329 - protein, 43 aa, Triticum aestivum
  misc_feature (1)..(43): Ceres Seq. ID no. 15220732
MYAGQSVGLITEIVPAREVVKRLVAEAQRVIGEKLSGFPKSSE

SEQ ID NO: 12330 - DNA, 970 bp, Triticum aestivum
  misc_feature (1)..(970): Ceres Seq. ID no. 13664189
aaaagaggcatgctcccttctcgcttcctgctcctcccgcactgccccaccgcgccggccccgactccgactccgacaccccccggcggcgcgcgctcgccgagctcggtcgcactgcggttcggatcccccggaggcgtgcggcttcgtcgcgggcgagggtcggcggcggtcgcgatggcatccgacgggcgcgtggagcggatcgcgtccagcatccgcgccatccccaacttccccaagccagggattttgtttcaggacatcacaaccttgcttctcgatccgcaggcattccgtgacaccactgacctctttgtcgagcggtacaaggacaaagacataactgtagttgctggtgttgaagccagaggattcatttttggtcctcccattgcattagccataggtgcaaagtttgttccaataaggaagccgaaaaaattacctggtgaggtgatatcggaagaatattctctggaatatggcactgacaaaatcgaaatgcacgtaggagctgtgcagcccaatgaccgagtccttattgtggatgatctaattgccacagggggaaccctttgtgccgctgccaaacttattgagcgtgttggagcaaaggtggttgagtgtgcctgtgttattgaactgccagagctgaagggccgggacaagttgggggacatgccagtttttgtcctagtgcaggcagacgaatcagtatgaaacaagttgtgactcttgagttgttccaatgatgttccccttctggaactatactggaagcagcaaagatatccgttacaatcttagctagttcctatctggagctgctcaataaaagtttcatttttaaatttgtccttctggaactgtttgggaatggagacttgattgttgttccctgtaatacgtggcttatttctgtcaaaaacagtgcaaattattcatgtcaatgaaggatgatagtctg

SEQ ID NO: 12331 - protein, 240 aa, Triticum aestivum
  misc_feature (1)..(240): Ceres Seq. ID no. 15220289
KRGMLPSRFLLLPHCPTAPAPTPTPTPPGGARSPSSVALRFGSPGGVRLRRGRGSAAVAMASDGRVERIASSIRAIPNFPKPGILFQDITTLLLDPQAFRDTTDLFVERYKDKDITVVAGVEARGFIFGPPIALAIGAKFVPIRKPKKLPGEVISEEYSLEYGTDKIEMHVGAVQPNDRVLIVDDLIATGGTLCAAAKLIERVGAKVVECACVIELPELKGRDKLGDMPVFVLVQADESV

SEQ ID NO: 12332 - protein, 237 aa, Triticum aestivum
  misc_feature (1)..(237): Ceres Seq. ID no. 15220290
MLPSRFLLLPHCPTAPAPTPTPTPPGGARSPSSVALRFGSPGGVRLRRGRGSAAVAMASDGRVERIASSIRAIPNFPKPGILFQDITTLLLDPQAFRDTTDLFVERYKDKDITVVAGVEARGFIFGPPIALAIGAKFVPIRKPKKLPGEVISEEYSLEYGTDKIEMHVGAVQPNDRVLIVDDLIATGGTLCAAAKLIERVGAKVVECACVIELPELKGRDKLGDMPVFVLVQADESV

SEQ ID NO: 12333 - protein, 181 aa, Triticum aestivum
  misc_feature (1)..(181): Ceres Seq. ID no. 15220291
MASDGRVERIASSIRAIPNFPKPGILFQDITTLLLDPQAFRDTTDLFVERYKDKDITVVAGVEARGFIFGPPIALAIGAKFVPIRKPKKLPGEVISEEYSLEYGTDKIEMHVGAVQPNDRVLIVDDLIATGGTLCAAAKLIERVGAKVVECACVIELPELKGRDKLGDMPVFVLVQADESV

SEQ ID NO: 12334 - DNA, 933 bp, Triticum aestivum
  misc_feature (1)..(933): Ceres Seq. ID no. 13664213
aaacacagacgagaatcctctctcacagtctcttttcgtctcccatacacacactttctctctctatacccattcttcgtcttctacctcggcgacaccactagtagtcactcgcagagagaagtcgtcgaaaggagaacatcaaaaaagattttcggtgagaaggatcgagtgagagattcttcatcggctttagttgtctacacgtctgtgctcatgagccgacggcgactactgttatcggcgacaatactctcgtatttgctccacggaatggctctcgtctctgtcgtagcctccggcgtggaggaggttagagataacgtggatttgaccaaaacgaacgacgttagctacaacctctacgcatcggaagatgctacgtctctctcatgagacgagagtagagccggataggatcggagagaagtgcaagaagtcagacattgtggtgaaccaggcagcgaccgaacctatgcccaacggaatacccggttacaccgtggagatcacgaaccagtgcatgtctggatgcaacatctcgaggatccacgtcagctgcggttggttcagctccgttaagttggttaacccgagggttttcaagcgtattcactatgatgactgtctcgtcaacaacgggaagcctttgccttatggctctacgctctctttccactacgccaacactttcccttaccgtctcgctgtcgcattcgttacctgctcttgagaccggatcttttcctttcttatataggataagatgatagtagaaacatggcgggaggaaaattaagatacaggaagtatgattgatattaatcatattcataccacactcatcctcttttgggttattttcttctctttaggatgttaaatgtttttgagcaacagtgatatatatataaaagaatctatcaacctccc

SEQ ID NO: 12335 - protein, 131 aa, Triticum aestivum
  misc_feature (1)..(131): Ceres Seq. ID no. 15220292
KHRRESSLTVSFRLPYTHFLSLYPFFVFYLGDTTSSHSQREVVERRTSKKIFGEKDRVRDSSSALVVYTSVLMSRRRLLLSATILSYLLHGMALVSVVASGVEEVRDNVDLTKTNDVSYNLYASEDATSLS

SEQ ID NO: 12336 - protein, 118 aa, Triticum aestivum
  misc_feature (1)..(118): Ceres Seq. ID no. 15220293
MLRLSHETRVEPDRIGEKCKKSDIVVNQAATEPMPNGIPGYTVEITNQCMSGCNISRIHVSCGWFSSVKLVNPRVFKRIHYDDCLVNNGKPLPYGSTLSFHYANTFPYRLAVAFVTCS

SEQ ID NO: 12337 - protein, 85 aa, Triticum aestivum
  misc_feature (1)..(85): Ceres Seq. ID no. 15220294
MPNGIPGYTVEITNQCMSGCNISRIHVSCGWFSSVKLVNPRVFKRIHYDDCLVNNGKPLPYGSTLSFHYANTFPYRLAVAFVTCS

SEQ ID NO: 12338 - protein, 59 aa, Triticum aestivum
  misc_feature (1)..(59): Ceres Seq. ID no. 15220295
MSRRRLLLSATILSYLLHGMALVSVVASGVEEVRDNVDLTKTNDVSYNLYASEDATSLS

SEQ ID NO: 12339 - DNA, 1296 bp, Triticum aestivum
  misc_feature (1)..(1296): Ceres Seq. ID no. 13664216
agaacatcctaatcgaaaaagtcgtctcccgccaccgcgtcgcccagcaccttcttaaccaacaccaagccaagtaggcaacccagagtcgagtcctcgggaccccgagctcttgcggatgggttgcctgcggcgccggccggagccggcggccatcgacatcacctgggtgtcgtgccggggcgtcaggtcgtcgctcccgttccacacgccgtgcctctacgcctccgtctccgtcacgccgtcgtctgccggcaagaacgtccgccgccaccgcgtcaagacccccaccgaccgcgccggcggcgagaaccccgagtgggacgagcgcctgcggctccgccttcccgacgacgcctcgctggcgtcagagcaggaagccgcggggaaaaagaaggacgggcacgttgaccacgacgacagcgtccttctcgtgcggttcgagctcaaggccgaggtggccgtcctcggggacgtgctcgccgcgtcggccgtcgtgccgctctccgacctcgtcgccgacggcaggacgcgccgcgtgtcctaccagcttgccgcgtccgcggacggcaggcarmcrcaayvdcgtyatctccttctcgtacgccttccaccacggaagcaccatcgacgacgaccaggaggaccgcagcagcgacggcgagccggtatcgcccgctagcccggcccctcccccgccgccgccgcctgagtcgacggtgtcgtcctccgggatgtacccggtgatggagtgggggccactggagcacctcgcggtttacccaccggtgaacgccgacacggtcacgtgctcaagctcaccggagccgattgcggtctacccaccgttgcaggagacatcgagccgtggaatttacccgatggtgggggagccggatagcagtttgtaccccacagtagactttgctccggtgagctgttacccgccgatgacggcgccgtactactacggtggtggttccgggtgtccggcagctcctgcatgggacgggcgatgtttgtacggttgaaacctcggtttccaccctgattttccagcgtttcgttggacggtgtgccggtggcttgtacttttttccgtaaaattcacgtggtgatgccgccatactaggcatccttggccggcgcagcagtgatgccgggattgtgctgtgcgttattggtggtattcgatatgttcgagccgataaaattcgtatgtatatttgtgaaatttgtgtatgttgtcacatgtgcttgataaattaaaggcacctttgatttgaaggttctttt

SEQ ID NO: 12340 - protein, 187 aa, Triticum aestivum
  misc_feature (1)..(187): Ceres Seq. ID no. 15220296
  misc_feature (153)..(153): Xaa is any aa, unknown or other
  misc_feature (154)..(154): Xaa is any aa, unknown or other
  misc_feature (156)..(156): Xaa is any aa, unknown or other
  misc_feature (158)..(158): Xaa is any aa, unknown or other
MGCLRRRPEPAAIDITWVSCRGVRSSLPFHTPCLYASVSVTPSSAGKNVRRHRVKTPTDRAGGENPEWDERLRLRLPDDASLASEQEAAGKKKDGHVDHDDSVLLVRFELKAEVAVLGDVLAASAVVPLSDLVADGRTRRVSYQLAASADGRXXQXRXLLLVRLPPRKHHRRRPGGPQQRRRAGIAR

SEQ ID NO: 12341 - protein, 98 aa, Triticum aestivum
  misc_feature (1)..(98): Ceres Seq. ID no. 15220297
MYPVMEWGPLEHLAVYPPVNADTVTCSSSPEPIAVYPPLQETSSRGIYPMVGEPDSSLYPTVDFAPVSCYPPMTAPYYYGGGSGCPAAPAWDGRCLYG

SEQ ID NO: 12342 - protein, 94 aa, Triticum aestivum
  misc_feature (1)..(94): Ceres Seq. ID no. 15220298
MEWGPLEHLAVYPPVNADTVTCSSSPEPIAVYPPLQETSSRGIYPMVGEPDSSLYPTVDFAPVSCYPPMTAPYYYGGGSGCPAAPAWDGRCLYG

SEQ ID NO: 12343 - DNA, 1180 bp, Triticum aestivum
  misc_feature (1)..(1180): Ceres Seq. ID no. 13664220
accaaccaagcaaccgagccaaacaggctcaccttccaacagtagtatagctgccgaagcaaatcaacatggcgagtggcacgagggatctcggcgtggcgcttgctgtcctgctcctgctgttcatgttcggggcctccgccgctgccgcggtcgtccccagcatcgacgccacgcggacccgccacctgccgctgccgcctggactgctgcgcggcccggagagcgtcgccttcgacgccaaaggcaacggcccatacagcggcgtctccgacggccgcgtcctcaagtggaacggcgacaggctcggctggacgacgtacacttacagccctggatacagcagcgaggcgtgcacggcgtccgtccgccgccccgagaccgtgaccgagagccgctgcggccgtccgctgggcctacggtttcacctcaagtctggctacttgtacatagccgacgcctacaaggggctcatgagggtcgcgccaggaggtggggaggcgacggtgcttgtgacggaggccgatggcgctcctctccgtttcaccaacggcgtggacgtcgaccaggtgaccggtgaagtctacttcaccgacagctctatgaaatatcaaaggtcacaacacgagatggtaacaagaaccggggactcgacaggccgcctaatgagatatgatccacgcacaggaaaagtgattgtgctaaaggccggcatcacttaccccaatggtctcgccatcagcgttgaccggacacacctcgtcatctcatcgaccgggccgtgcaagttgttgaggtactggaccaaaggtcccaagacaggcacgatcgaactgttaactgatctaccgggctatcctgataatgtgagcccggataagagaggaggatactgggtggcattacatcatgagaagacagagctcccctttgacgttgatagccatctacttgccttgaggatcaatgctgatggaaaaataatcgaggagatgagaggacccaaaggcatgaggccgacagaggtggtggaacggacaggcggtagactatttgtgggatccgtcgagctttcttatgtggccgtggccacccgcaaatagagattaatttaagttctgtaaaggatttgcattgagcatgctctttttttcaatgtcatgttctgcttttctttccc

SEQ ID NO: 12344 - protein, 344 aa, Triticum aestivum
  misc_feature (1)..(344): Ceres Seq. ID no. 15220299
MASGTRDLGVALAVLLLLFMFGASAAAAVVPSIDATRTRHLPLPPGLLRGPESVAFDAKGNGPYSGVSDGRVLKWNGDRLGWTTYTYSPGYSSEACTASVRRPETVTESRCGRPLGLRFHLKSGYLYIADAYKGLMRVAPGGGEATVLVTEADGAPLRFTNGVDVDQVTGEVYFTDSSMKYQRSQHEMVTRTGDSTGRLMRYDPRTGKVIVLKAGITYPNGLAISVDRTHLVISSTGPCKLLRYWTKGPKTGTIELLTDLPGYPDNVSPDKRGGYWVALHHEKTELPFDVDSHLLALRINADGKIIEEMRGPKGMRPTEVVERTGGRLFVGSVELSYVAVATRK

SEQ ID NO: 12345 - protein, 325 aa, Triticum aestivum
  misc_feature (1)..(325): Ceres Seq. ID no. 15220300
MFGASAAAAVVPSIDATRTRHLPLPPGLLRGPESVAFDAKGNGPYSGVSDGRVLKWNGDRLGWTTYTYSPGYSSEACTASVRRPETVTESRCGRPLGLRFHLKSGYLYIADAYKGLMRVAPGGGEATVLVTEADGAPLRFTNGVDVDQVTGEVYFTDSSMKYQRSQHEMVTRTGDSTGRLMRYDPRTGKVIVLKAGITYPNGLAISVDRTHLVISSTGPCKLLRYWTKGPKTGTIELLTDLPGYPDNVSPDKRGGYWVALHHEKTELPFDVDSHLLALRINADGKIIEEMRGPKGMRPTEVVERTGGRLFVGSVELSYVAVATRK

SEQ ID NO: 12346 - protein, 209 aa, Triticum aestivum
  misc_feature (1)..(209): Ceres Seq. ID no. 15220301
MRVAPGGGEATVLVTEADGAPLRFTNGVDVDQVTGEVYFTDSSMKYQRSQHEMVTRTGDSTGRLMRYDPRTGKVIVLKAGITYPNGLAISVDRTHLVISSTGPCKLLRYWTKGPKTGTIELLTDLPGYPDNVSPDKRGGYWVALHHEKTELPFDVDSHLLALRINADGKIIEEMRGPKGMRPTEVVERTGGRLFVGSVELSYVAVATRK

SEQ ID NO: 12347 - DNA, 420 bp, Triticum aestivum
  misc_feature (1)..(420): Ceres Seq. ID no. 13664306
atttttctccaagagaaacgtaaatttgcagttcctttgtcactagttttcgatgctgtagaattgaagagtgagagagagagagatagatcgttgaagacgcagcggtgatcgaaacagaggagagatctggaaatggaaggtggaggatccaacgttagatctagctactacaacgtcctcggtattcgcaaagacgcctctgtttccgatgtccgggctgcttaccgtaagctcgccatgaaatggcatccggatagatacgcgaggactcctgacgtcgccggagaagccaaacgtcgatttcagcaaatccaagaagcctattctgttctgaatgacgagaataagcgctcgatgtatgacgctggactatacgatccccatgaagatgacgacgacgacttctgcgacttcatg

SEQ ID NO: 12348 - protein, 95 aa, Triticum aestivum
  misc_feature (1)..(95): Ceres Seq. ID no. 13664307
MEGGGSNVRSSYYNVLGIRKDASVSDVRAAYRKLAMKWHPDRYARTPDVAGEAKRRFQQIQEAYSVLNDENKRSMYDAGLYDPHEDDDDDFCDFM

SEQ ID NO: 12349 - protein, 60 aa, Triticum aestivum
  misc_feature (1)..(60): Ceres Seq. ID no. 13664308
MKWHPDRYARTPDVAGEAKRRFQQIQEAYSVLNDENKRSMYDAGLYDPHEDDDDDFCDFM

SEQ ID NO: 12350 - DNA, 955 bp, Triticum aestivum
  misc_feature (1)..(955): Ceres Seq. ID no. 13664314
accgctccagtcccgccaggatctgccgccccacaccgtgcccagctccgccgcccccgcgccccccctctcagccgctcgacgctcgccggagcggcggatctccgacgcgtcgctccctcccgcaggcaacagacggcatctaggcagaacctcccaccattccaccggaatcggagaacctagtcgcggcgcctcaacctcgcctgaactcaccgtcgatggcggccgctgcggggtcgtacggcaagctcgacaagtcattcaagcttgccgctcgctccatactcaccgccttctcccgcgaggatcttaacaatgctttcccatcgttcacggacgccgaaagggagcgcctgtaccaaatgttcatctatgtgatcaagtctttgcatggcaatatagtggaggagttccgaaatctctgcgatgaaatagaaattgctactgcccttgacaaggtagatcagtttgccgaagaacaaactctggacgtattatcttcagacaagactagcattgaagacatcaaagaaaggatatcaaaggagaagaaggatgaaattgaacttttaaaaggtttactagagaagactcaagaaaggaacaatgccatgaaggcccgaatcgaacccttgaagcaaggggaggatttcaatgacacaagagatgttctcacgaagctgaaggaatggaattctgcatgtcagagctgcaatgaccattgagcttctctggttactcgatgtagtcaagagacatctgctgtgtagctttgtgtgttcgtagagtggaggtcgagtcaggggtcatgctcccccatgaaccaatggtgctaaccaattgtagcgtgatttcgtttcttcgttgcaaggcatagctgttgcgtttctgtattttcgtcgcctcatgtttcctgcacccatagttgatgcttgctttagtgatcatcctg

SEQ ID NO: 12351 - protein, 168 aa, Triticum aestivum
  misc_feature (1)..(168): Ceres Seq. ID no. 13664315
MAAAAGSYGKLDKSFKLAARSILTAFSREDLNNAFPSFTDAERERLYQMFIYVIKSLHGNIVEEFRNLCDEIEIATALDKVDQFAEEQTLDVLSSDKTSIEDIKERISKEKKDEIELLKGLLEKTQERNNAMKARIEPLKQGEDFNDTRDVLTKLKEWNSACQSCNDH

SEQ ID NO: 12352 - protein, 120 aa, Triticum aestivum
  misc_feature (1)..(120): Ceres Seq. ID no. 13664316
MFIYVIKSLHGNIVEEFRNLCDEIEIATALDKVDQFAEEQTLDVLSSDKTSIEDIKERISKEKKDEIELLKGLLEKTQERNNAMKARIEPLKQGEDFNDTRDVLTKLKEWNSACQSCNDH

SEQ ID NO: 12353 - protein, 104 aa, Triticum aestivum
  misc_feature (1)..(104): Ceres Seq. ID no. 13664317
PLQSRQDLPPHTVPSSAAPAPPLSAARRSPERRISDASLPPAGNRRHLGRTSHHSTGIGEPSRGASTSPELTVDGGRCGVVRQARQVIQACRSLHTHRLLPRGS

SEQ ID NO: 12354 - DNA, 1780 bp, Triticum aestivum
  misc_feature (1)..(1780): Ceres Seq. ID no. 13664362
gctaatcctaattctagtccaaagttcccgtcgctgcgttcaggcagccgccggcgaccagtgaatgcttccgcatcccgtcgcgcaaaaggtagctgagacgagtgtccagccgccagcgagcctaccctacccgagctcacccacatcggcagccgccaccgccgccgccgcgttgctgcgcgcagaggaggagcgccatgatttgattctctgaatctttccccacgccgggcgatacttcctatgcgccaccgccgcccgcggatcacacagcagcggcagtagcgcgagggaggcagtcagaggccgaaagatttggatcgatggagatccgcgcccgcgcgcccggcaagatcatcctcgccggcgagcacgccgtcgtccacggctcctccgccgtcgccgccgccatcgacctctacacgcagtcctccctccacctgcccccgccaggggatggcggcgccggcggggaggtggaggtcgacctgacggactcgggcctcgccttctcctggccatgctcgcgcctcctcgaggcgctgggggagacctgccgcaaggcggagctgcaggccccgaggccctgctccccggaggagctggcctccattkycaggctcgtggagctgcacgagatacccgaggccaagatctggctctccgcaggcctctccgcgttcctctacctctacacttccatcctggggtgtaggcctgggaaggtcgtggtgagctcgggtctgccgatgggcgcggggcttggttcgtcggccgcgttctccgtgtcgttgtcgggcgcgctgctgacggcggcaggagtggtttgcgctgagggcgccgtcgacggaacagagtggcggttgttggggaaggatcatcttgagctggttaacacgtgggcgttccagggggaaaagattattcatggcaagccttctggcattgacaacgctgtcagcacttttgggagcatgatcaaattcaagaagggagaattgacaaacctcaaatctggcaatccagtcaaaatgctcattactgatacaagggttggtaggaacaccaaggctctggttgctggtgtgtctgaaagagcatctaggcatcccgatgctatggcttccgtcttccatgcagtgaacaccattagtgaagagctttccagcattgttgagttagctgccactgatgagatagccatgacctcaaaggaagaaaagctagcagaactcatggagatgaaccaaggtttgctccagtgcatgggagtcagccattcctctatagaaaccgtgctgcgctcgacattgaagtataacttggtctcgaagctcaccggagctggtggtggaggctgtgttttgacgttgataccaactctattgtccaagttagttttggagaaggtcaccacggagctagaatcgcatggtttccgctgcttcaaagtcgaggtcggtggacaaggtcttcagattcaccaaggataagataatgctcgctcctctttcaatggagatgttgtacactatttttaggtttgcttgaccttctgagacgaaagtattctttctattctgtgcctagcagaccacttactgtatcaatcaataagcgagtttgtcagtcgcatgattgttgttgtatcagatcaataaaccctgttccatagtcgggcgtggttggaaggaatatttgaggtgccatgttgcatctgatctgatgtatcattgttatcaaagttgagttcattgggttgggtcatttttcttgt

SEQ ID NO: 12355 - protein, 389 aa, Triticum aestivum
  misc_feature (1)..(389): Ceres Seq. ID no. 15220316
  misc_feature (98)..(98): Xaa is any aa, unknown or other
MEIRARAPGKIILAGEHAVVHGSSAVAAAIDLYTQSSLHLPPPGDGGAGGEVEVDLTDSGLAFSWPCSRLLEALGETCRKAELQAPRPCSPEELASIXRLVELHEIPEAKIWLSAGLSAFLYLYTSILGCRPGKVVVSSGLPMGAGLGSSAAFSVSLSGALLTAAGVVCAEGAVDGTEWRLLGKDHLELVNTWAFQGEKIIHGKPSGIDNAVSTFGSMIKFKKGELTNLKSGNPVKMLITDTRVGRNTKALVAGVSERASRHPDAMASVFHAVNTISEELSSIVELAATDEIAMTSKEEKLAELMEMNQGLLQCMGVSHSSIETVLRSTLKYNLVSKLTGAGGGGCVLTLIPTLLSKLVLEKVTTELESHGFRCFKVEVGGQGLQIHQG

SEQ ID NO: 12356 - protein, 247 aa, Triticum aestivum
  misc_feature (1)..(247): Ceres Seq. ID no. 15220317
MGAGLGSSAAFSVSLSGALLTAAGVVCAEGAVDGTEWRLLGKDHLELVNTWAFQGEKIIHGKPSGIDNAVSTFGSMIKFKKGELTNLKSGNPVKMLITDTRVGRNTKALVAGVSERASRHPDAMASVFHAVNTISEELSSIVELAATDEIAMTSKEEKLAELMEMNQGLLQCMGVSHSSIETVLRSTLKYNLVSKLTGAGGGGCVLTLIPTLLSKLVLEKVTTELESHGFRCFKVEVGGQGLQIHQG

SEQ ID NO: 12357 - DNA, 911 bp, Triticum aestivum
  misc_feature (1)..(911): Ceres Seq. ID no. 13664381
atactaactcacacacaaattactagacatcctcgttctctgtgcagttccaacaatcctagtgatggcgtgtgcaagccatgtcatgattttccttgtgttctcaaatttagccatagccatggccacccttcctcctcccttgtatgaccctaacctagggaagtgtaagaatagttgtgaggaagagctcaatctatctttgtacctacaccaagttgtgacaggaccagcccacaaccaagaagtaattctcagccctggctttcctaacatgtttggtatgatagccgtcgttgactggaccatatacgccgtccctgattccacttcaagtatcattgctcgggcaaagggaatgactatccaggctacccaaagcgaggtcaatggtgttgcctggtttcttcctttcagcatggtctttcaggattccaggtttggcggttctacgctgcaagtgatgggagcaattactggtgcagtagatggtgagtgggctattgtgggtgggactggcaaattgtccacggcacgtggtactattaagttcatagcagtccaggcacagagcaccccaacctttgaggtctacagaaggattgatatccatgcattctacacacccgcaccggccgtttaagatatgaagaatacacatgcagcactccgactggaaaggcgagccagcaatctcgcataaataaaatatgtgttttccattatgactagtagtactacctcgttgtaatatgtggtcaagtcgtctttactttcaaaaaatgcaggagtttgtggcatatcattgaaaatcttagacataaatccacaaggcctttgtccttttttgtaaaattggactgtatgatttaatttggaatattacaatcttaatatattatgtgaaaagg

SEQ ID NO: 12358 - protein, 192 aa, Triticum aestivum
  misc_feature (1)..(192): Ceres Seq. ID no. 13664382
MACASHVMIFLVFSNLAIAMATLPPPLYDPNLGKCKNSCEEELNLSLYLHQVVTGPAHNQEVILSPGFPNMFGMIAVVDWTIYAVPDSTSSIIARAKGMTIQATQSEVNGVAWFLPFSMVFQDSRFGGSTLQVMGAITGAVDGEWAIVGGTGKLSTARGTIKFIAVQAQSTPTFEVYRRIDIHAFYTPAPAV

SEQ ID NO: 12359 - protein, 185 aa, Triticum aestivum
  misc_feature (1)..(185): Ceres Seq. ID no. 13664383
MIFLVFSNLAIAMATLPPPLYDPNLGKCKNSCEEELNLSLYLHQVVTGPAHNQEVILSPGFPNMFGMIAVVDWTIYAVPDSTSSIIARAKGMTIQATQSEVNGVAWFLPFSMVFQDSRFGGSTLQVMGAITGAVDGEWAIVGGTGKLSTARGTIKFIAVQAQSTPTFEVYRRIDIHAFYTPAPAV

SEQ ID NO: 12360 - protein, 173 aa, Triticum aestivum
  misc_feature (1)..(173): Ceres Seq. ID no. 13664384
MATLPPPLYDPNLGKCKNSCEEELNLSLYLHQVVTGPAHNQEVILSPGFPNMFGMIAVVDWTIYAVPDSTSSIIARAKGMTIQATQSEVNGVAWFLPFSMVFQDSRFGGSTLQVMGAITGAVDGEWAIVGGTGKLSTARGTIKFIAVQAQSTPTFEVYRRIDIHAFYTPAPAV

SEQ ID NO: 12361 - DNA, 1551 bp, Triticum aestivum
  misc_feature (1)..(1551): Ceres Seq. ID no. 13664395
gcagatttgtttgccatcttttggggttttcttgatgagttcttggttggtatgagtggagtggtttgcgattctctttttcctgcttggaggaaggattaggttcttccatttcttgctgggtccgtgctcttgtgtgggcgtctagcttcttccatttcttgttgcattcctgctgatctctgtgggtgccagagatgagcgtaccgcacctgttccggtgtccgatcagcctggacatcttcacggacccggtgacgctctgcacggggcagacgtacgaccgtcaatgcatcgagcggtggctcgctgacggccaccgcacctgccccgtcacaatgcaggccctcggcgacgccgacaccaccgtgctcgtgcccaaccgcaccctgcgccacctcatcgagcgctggctctccgccgccaccgaccacagcctcccggagtcggcggacgacgatccatcgcttgcggcgctcaagcggtgcctccagtccgacgccacctccgccgccgccaagatcggcgcgctcaagaaggtcttggcgctggcgtccgagtccgacgtcggccgcgcgtgcatgctgcagctggggttcctctgcgtgctcctgccgctcgtcttccacgccgcgccgaccgcgccagcgcagcgccacgcggaggcggaggagctcgcgctgcagtgcgcgctcagcctcatgccgtcgaacgccgccgcgccgcagctggactgcctcaacatgctcaagaaggaggacaacctggcgtccttcgtccggctgctggggcgaggcagcggccgggccaaggcaggcctgtgccgcctcctggagaccgtcgccacggccgcggcgacgcgggacctggcgctcgtcgtggccgcctcgccgcgcgtgtggcaggcgctcctgccgctcctgcagcagcacgccggcccggcccccgacgcgcgcgcctcggaggctgcagtgcgcgcgatcgctgcggtctgcgcggccgagccggcgcgtggcagtgccatccaccacggcgcggtcggcgcgctcttcaggcacctgtcgtggtgggcgtacggcaagggcggcggggccgtgtccagcgcgctggcggcggtggaggcgctggcggagacggaggccggccggagggcggtggcgcgcgcgcccggcgcaacgcggattctcgtgaggcacgtgttcatgatgtcatcgagcaacgacgggagcgagcacgcggcggcggcgctgctagccgtgtgcagggagtcgcgggcggcgcggagcgaggcggtgggcgccggggtggtgacgcagctgctgctgctgcttcagagccagtgcggcgccagggctaaggccaaggcgagggcgctgctgaagctgctcaaatccaggtgaactagagctgagtactcattagagttagcgaggatttagatgttcttgtaagctgtaagtttctgcgtcaagaatgtctgccaatgacatggtattcaattccgggcaatttatgtagtaactctgggggattaaattgcccgggcgtttt

SEQ ID NO: 12362 - protein, 400 aa, Triticum aestivum
  misc_feature (1)..(400): Ceres Seq. ID no. 13664396
MSVPHLFRCPISLDIFTDPVTLCTGQTYDRQCIERWLADGHRTCPVTMQALGDADTTVLVPNRTLRHLIERWLSAATDHSLPESADDDPSLAALKRCLQSDATSAAAKIGALKKVLALASESDVGRACMLQLGFLCVLLPLVFHAAPTAPAQRHAEAEELALQCALSLMPSNAAAPQLDCLNMLKKEDNLASFVRLLGRGSGRAKAGLCRLLETVATAAATRDLALVVAASPRVWQALLPLLQQHAGPAPDARASEAAVRAIAAVCAAEPARGSAIHHGAVGALFRHLSWWAYGKGGGAVSSALAAVEALAETEAGRRAVARAPGATRILVRHVFMMSSSNDGSEHAAAALLAVCRESRAARSEAVGAGVVTQLLLLLQSQCGARAKAKARALLKLLKSR

SEQ ID NO: 12363 - protein, 353 aa, Triticum aestivum
  misc_feature (1)..(353): Ceres Seq. ID no. 13664397
MQALGDADTTVLVPNRTLRHLIERWLSAATDHSLPESADDDPSLAALKRCLQSDATSAAAKIGALKKVLALASESDVGRACMLQLGFLCVLLPLVFHAAPTAPAQRHAEAEELALQCALSLMPSNAAAPQLDCLNMLKKEDNLASFVRLLGRGSGRAKAGLCRLLETVATAAATRDLALVVAASPRVWQALLPLLQQHAGPAPDARASEAAVRAIAAVCAAEPARGSAIHHGAVGALFRHLSWWAYGKGGGAVSSALAAVEALAETEAGRRAVARAPGATRILVRHVFMMSSSNDGSEHAAAALLAVCRESRAARSEAVGAGVVTQLLLLLQSQCGARAKAKARALLKLLKSR

SEQ ID NO: 12364 - protein, 272 aa, Triticum aestivum
  misc_feature (1)..(272): Ceres Seq. ID no. 13664398
MLQLGFLCVLLPLVFHAAPTAPAQRHAEAEELALQCALSLMPSNAAAPQLDCLNMLKKEDNLASFVRLLGRGSGRAKAGLCRLLETVATAAATRDLALVVAASPRVWQALLPLLQQHAGPAPDARASEAAVRAIAAVCAAEPARGSAIHHGAVGALFRHLSWWAYGKGGGAVSSALAAVEALAETEAGRRAVARAPGATRILVRHVFMMSSSNDGSEHAAAALLAVCRESRAARSEAVGAGVVTQLLLLLQSQCGARAKAKARALLKLLKSR

SEQ ID NO: 12365 - DNA, 1792 bp, Triticum aestivum
  misc_feature (1)..(1792): Ceres Seq. ID no. 13664425
cgcacgagaccattacctagaacatcctaatcgaaaaaaggaaaccactccctcccaaggaaaccactccctccctcagccgccgccgccttcccactgcccacgagccagcgtcatccccagctccgccccccacggccgacgactccaccctccgagtccacgatgtcttctggagatgggattgatggagatggaaagtctgaagagacgcatagcaaagatattagacgcatcaagtgtgaattttgcactgttgttaggtccaagatgtatctcatacgagctcacatggttgctcagcaccaggatgagttggactcatcagaaatctacaactcaaatggtgaaaaggttgttcatggggttggacactcatgtgaagagtgcggagcttgtttccggaagccagctcatctgaagcagcacatgcaaagtcattccaaagagggtttagataatagatacttaacagcgtgaagcattggatcccattacagaactccaaaatgcatggaggcacattttaatcttggttggactagtagcaggttgggatgacctcctgtgaagctccaacaagattgcctccttcacgcttattcaggagagatccttcgcctgcccacttgaagactgccccttcagctatataagaagagatcacttgaaccggcatatgcttacacatgagggcaagttgtttacatgccctctagaaggttgtggcaagaggttcagcatcaaggcaaatattcaaagacatgttaaggaaatgcatgaggaagaacacgaatgcaaaatggatgacactaaaagcaaccaacaggttatttgccaggaggagggctgtaaaaaggctttcaagtatccttcacagctgaagaaacacgaggagtcacatgccaaattggactatgtggaagtagtctgctgtgagcctggctgcttgaagacattcacaaatgccaagtgcctgagggctcataaccagtcttgccatctatatactcagtgtgatatttgtggggagaaacacctgaggaagaacattaaaaggcatctacgagctcaccacaaagtgcactctactgaaaggttgaaatgcagttttgatggctgtgaatgctccttttccaataaatccaatctaaacatgcatatgaaggcatgccacgaccaagtcagacctttcgagtgtcgggtcgcggggtgtggcaagacattcccctacaagcatgtcagggacaatcacgagaagtcgagttgtcatgtatacgtagagggcgactatgaggagatggacgagcagctgcgctcgcgcccaagagggggccgaaagagggcggctgtgacggtcgagacgctgactcgcaagagggtcaccatccccagcgaggcctcgtcgctggaagatggggcggagtacatgcgctggatgctctcggmcggggatgsttygaaccmcagccgagttgtttaarcacaataaagttggaactggaggskgkctcttagtatcttgttgcagtccgttttggaggttgtcaaatgtataggggtctgtacggtgttgctgctcaagttgcagtgtggtttagtggaaatcacgtttgcgtgcgagtatggagagttatgatttagtaagtatatatagttctaagtaagtgaagcagtcgtgttatatatgcgtagtagtagtgtggccacatgagtcgtcgtaatagctaataaccatgtggaaaatgcggaatacgtgtttaaacacaataaagttggaactggagggggg

SEQ ID NO: 12366 - protein, 267 aa, Triticum aestivum
  misc_feature (1)..(267): Ceres Seq. ID no. 15220324
  misc_feature (257)..(257): Xaa is any aa, unknown or other
  misc_feature (260)..(260): Xaa is any aa, unknown or other
  misc_feature (261)..(261): Xaa is any aa, unknown or other
  misc_feature (263)..(263): Xaa is any aa, unknown or other
MLTHEGKLFTCPLEGCGKRFSIKANIQRHVKEMHEEEHECKMDDTKSNQQVICQEEGCKKAFKYPSQLKKHEESHAKLDYVEVVCCEPGCLKTFTNAKCLRAHNQSCHLYTQCDICGEKHLRKNIKRHLRAHHKVHSTERLKCSFDGCECSFSNKSNLNMHMKACHDQVRPFECRVAGCGKTFPYKHVRDNHEKSSCHVYVEGDYEEMDEQLRSRPRGGRKRAAVTVETLTRKRVTIPSEASSLEDGAEYMRWMLSXGDXXNXSRVV

SEQ ID NO: 12367 - protein, 235 aa, Triticum aestivum
  misc_feature (1)..(235): Ceres Seq. ID no. 15220325
  misc_feature (225)..(225): Xaa is any aa, unknown or other
  misc_feature (228)..(228): Xaa is any aa, unknown or other
  misc_feature (229)..(229): Xaa is any aa, unknown or other
  misc_feature (231)..(231): Xaa is any aa, unknown or other
MHEEEHECKMDDTKSNQQVICQEEGCKKAFKYPSQLKKHEESHAKLDYVEVVCCEPGCLKTFTNAKCLRAHNQSCHLYTQCDICGEKHLRKNIKRHLRAHHKVHSTERLKCSFDGCECSFSNKSNLNMHMKACHDQVRPFECRVAGCGKTFPYKHVRDNHEKSSCHVYVEGDYEEMDEQLRSRPRGGRKRAAVTVETLTRKRVTIPSEASSLEDGAEYMRWMLSXGDXXNXSRVV

SEQ ID NO: 12368 - protein, 226 aa, Triticum aestivum
  misc_feature (1)..(226): Ceres Seq. ID no. 15220326
  misc_feature (216)..(216): Xaa is any aa, unknown or other
  misc_feature (219)..(219): Xaa is any aa, unknown or other
  misc_feature (220)..(220): Xaa is any aa, unknown or other
  misc_feature (222)..(222): Xaa is any aa, unknown or other
MDDTKSNQQVICQEEGCKKAFKYPSQLKKHEESHAKLDYVEVVCCEPGCLKTFTNAKCLRAHNQSCHLYTQCDICGEKHLRKNIKRHLRAHHKVHSTERLKCSFDGCECSFSNKSNLNMHMKACHDQVRPFECRVAGCGKTFPYKHVRDNHEKSSCHVYVEGDYEEMDEQLRSRPRGGRKRAAVTVETLTRKRVTIPSEASSLEDGAEYMRWMLSXGDXXNXSRVV

SEQ ID NO: 12369 - DNA, 1688 bp, Triticum aestivum
  misc_feature (1)..(1688): Ceres Seq. ID no. 14301471
agcaatttggcctagactagagtttatctcttgcatttccccgcgcgtagcagcaagcacaagaggagagatcgcgcatttatttacagagctgttgggagaatccaggaggaagtcgaagtactccggtccggccaagaagggggagacagagcgggggaggacgccggggcgccgagtttggggagaggaggagatggagacggacagcccgcggagcccggaggcggagatcgggcaccgggtggaggacctgtgggaggtggcgcagccgcagctgtccccgtcggagaagctcaactcctgcttcgaggacatccccgtcgccgccttcccgcgcacccacccctcgcaagtgatcgagataccttcggatgccagccttgctgatactgttgagacattgtccaagaataaaattttgagtgcacccataagaaacgtcgatgctccagaggatgctacttggatagacaaatacatcggtattgtggaatttgctggtattgcaatgtggttgcttcatcagtctgatgcttcaggtaatggaacagctggttctgcagttggatcacctgtggtcaatctagcatctaggttaggctctttcacattcagaagaacgtcatctggcagggtagaaaccactactgattcagaatcagatgaagctgcatcagtgggtggaagcttttttgaaacccttacttcctctgagttctacaagaacacaaaggttggcgatatctcaggaagcttccgatgggcgccatttcttgccctgcagacatctgacacattcctcactatgctgcttcttctatccaagtacaggatgaagagcctccccgtggtagatatgggggggaatcagattgagaatatcattacacaatcttccgttgtgcacatgcttgcagagtgtgttggactatcttggtttgaaagctggggaactaagaaactctgtgaactgggtcttcctctgatgaagccatacagacttgttaaggtaaatgaagaccagccagtcctaaaagccttccaactaatgagggaaaagggggttggtggtgtgcctgttatggacacaaatggaacaaaagcaattggtaacattagcatcagagatgtccaatatcttcttagtgcccccaagatatacaaacaatacaggacaatctcagccaaggatttccttaccgcggtccggcaccatctccaggagcagcacgaagcgtcgccgttgctgcacgacgtgatcacatgcaaaagagacgacgtgatcaaggaaatcatactgaagctggactcgaccaagatccacaggatctacgtggtcgacgacaagggggataccgagggggtgatcacgctgagggacataatctccaagctggtgcacgagccacggcattactttggggatttcttcgacggcgtcgtccccctacccgcaaacagtaccgtatgacaaaactctgtgatagtatgtacaaaaaatgtacattatctttttgctcattccccatcttcttcttaagttgtggttgctgttgctgttgctgtggagagacctctgtggggagtactaatgaagaaccaatggggtggatgacagtgtgcgttgaataatctgagaattgcctgagctttgcgatgagaatgatgatgcctttcttctttcg

SEQ ID NO: 12370 - protein, 490 aa, Triticum aestivum
  misc_feature (1)..(490): Ceres Seq. ID no. 14301472
AIWPRLEFISCISPRVAASTRGEIAHLFTELLGESRRKSKYSGPAKKGETERGRTPGRRVWGEEEMETDSPRSPEAEIGHRVEDLWEVAQPQLSPSEKLNSCFEDIPVAAFPRTHPSQVIEIPSDASLADTVETLSKNKILSAPIRNVDAPEDATWIDKYIGIVEFAGIAMWLLHQSDASGNGTAGSAVGSPVVNLASRLGSFTFRRTSSGRVETTTDSESDEAASVGGSFFETLTSSEFYKNTKVGDISGSFRWAPFLALQTSDTFLTMLLLLSKYRMKSLPVVDMGGNQIENIITQSSVVHMLAECVGLSWFESWGTKKLCELGLPLMKPYRLVKVNEDQPVLKAFQLMREKGVGGVPVMDTNGTKAIGNISIRDVQYLLSAPKIYKQYRTISAKDFLTAVRHHLQEQHEASPLLHDVITCKRDDVIKEIILKLDSTKIHRIYVVDDKGDTEGVITLRDIISKLVHEPRHYFGDFFDGVVPLPANSTV

SEQ ID NO: 12371 - protein, 425 aa, Triticum aestivum
  misc_feature (1)..(425): Ceres Seq. ID no. 14301473
METDSPRSPEAEIGHRVEDLWEVAQPQLSPSEKLNSCFEDIPVAAFPRTHPSQVIEIPSDASLADTVETLSKNKILSAPIRNVDAPEDATWIDKYIGIVEFAGIAMWLLHQSDASGNGTAGSAVGSPVVNLASRLGSFTFRRTSSGRVETTTDSESDEAASVGGSFFETLTSSEFYKNTKVGDISGSFRWAPFLALQTSDTFLTMLLLLSKYRMKSLPVVDMGGNQIENIITQSSVVHMLAECVGLSWFESWGTKKLCELGLPLMKPYRLVKVNEDQPVLKAFQLMREKGVGGVPVMDTNGTKAIGNISIRDVQYLLSAPKIYKQYRTISAKDFLTAVRHHLQEQHEASPLLHDVITCKRDDVIKEIILKLDSTKIHRIYVVDDKGDTEGVITLRDIISKLVHEPRHYFGDFFDGVVPLPANSTV

SEQ ID NO: 12372 - protein, 320 aa, Triticum aestivum
  misc_feature (1)..(320): Ceres Seq. ID no. 14301474
MWLLHQSDASGNGTAGSAVGSPVVNLASRLGSFTFRRTSSGRVETTTDSESDEAASVGGSFFETLTSSEFYKNTKVGDISGSFRWAPFLALQTSDTFLTMLLLLSKYRMKSLPVVDMGGNQIENIITQSSVVHMLAECVGLSWFESWGTKKLCELGLPLMKPYRLVKVNEDQPVLKAFQLMREKGVGGVPVMDTNGTKAIGNISIRDVQYLLSAPKIYKQYRTISAKDFLTAVRHHLQEQHEASPLLHDVITCKRDDVIKEIILKLDSTKIHRIYVVDDKGDTEGVITLRDIISKLVHEPRHYFGDFFDGVVPLPANSTV

SEQ ID NO: 12373 - DNA, 1356 bp, Triticum aestivum
  misc_feature (1)..(1356): Ceres Seq. ID no. 14301482
tttttctccccccaccttccgcgtcccccctctccacctagcaagctccggccgtccgcccgcgcccgtcccgtccgtccacgagcgagccggccgggcgccgccgccgacgccgatgaagaagccgggcaagctcgcgctgccctcccaggactccaccatcggcaagttcctgacgcagagcgggaccttcaaggacggcgacctgctcgtcaacaaggacggcctccgcatcgtcccgcagagcgaggaaggcgaggctcctcctatcaagcctttggataataatcatcagttgagcatagacgatctagattcaatcaaagtgatcgggaaaggtaatagcgggaccgtgcaattggtgcgccacaaatggactggccagttttttgctctcaaggttatacagctcaatattcaggagagcatacgcaagcagatggcccaggagttgaaaataagcttgtttacacagtgccagtatgttgtcacgtgctatcagtgtttctatgtcaatggtgttatttctattgctttggagtacatggatggtggctctctcgctgatttcctcaaggctgttagaaccgttccagaggcctacctggctgcaatttgtaagcaggtgttgaaaggactgatgtacttgcatcatgagaagcgcgttatacaccgagatctgaaaccatcgaatatattgataaatcataggggtgaagtaaagatatcagattttggtgttagtgccatcatttctagttcttctgcacagcgagatacatttactggcacatttaactacatggcgcctgaaagaatcagtgggcagaaacatggtcatctgagtgatatctggagcttgggcctagttatgctggaatgtgccactggcaatttcccatatcctcctcgtgaaagcttttatgaacttcttgaagctgttgtcgaccaaccatcaccttctgcaccatcagaccagttttcaccagagttctgttcattcatttctgcttgtatccaaaaaaatgctgcagataggtcatctgcccaaaccctatcagctcatccattcctgagcatgtacgacgacctgaatatcgatctgtctgactacttcacgactgcaggatcaccgcttgccaccttcaagcaaatcgcgttgtgagacgacaaatgctcaaccatgtgtcatgagctggagctaactgaagcaagtgaatggagttatttttcttttcctgttattcatgaactgggctttgatgatatctttgaaccaaatatgatacaattggcttcataattatacaaatacaagtctgtaaagcatcagcgagcatcgaagttttgcctgtc

SEQ ID NO: 12374 - protein, 387 aa, Triticum aestivum
  misc_feature (1)..(387): Ceres Seq. ID no. 14301483
FSPPTFRVPPLHLASSGRPPAPVPSVHERAGRAPPPTPMKKPGKLALPSQDSTIGKFLTQSGTFKDGDLLVNKDGLRIVPQSEEGEAPPIKPLDNNHQLSIDDLDSIKVIGKGNSGTVQLVRHKWTGQFFALKVIQLNIQESIRKQMAQELKISLFTQCQYVVTCYQCFYVNGVISIALEYMDGGSLADFLKAVRTVPEAYLAAICKQVLKGLMYLHHEKRVIHRDLKPSNILINHRGEVKISDFGVSAIISSSSAQRDTFTGTFNYMAPERISGQKHGHLSDIWSLGLVMLECATGNFPYPPRESFYELLEAVVDQPSPSAPSDQFSPEFCSFISACIQKNAADRSSAQTLSAHPFLSMYDDLNIDLSDYFTTAGSPLATFKQIAL

SEQ ID NO: 12375 - protein, 349 aa, Triticum aestivum
  misc_feature (1)..(349): Ceres Seq. ID no. 14301484
MKKPGKLALPSQDSTIGKFLTQSGTFKDGDLLVNKDGLRIVPQSEEGEAPPIKPLDNNHQLSIDDLDSIKVIGKGNSGTVQLVRHKWTGQFFALKVIQLNIQESIRKQMAQELKISLFTQCQYVVTCYQCFYVNGVISIALEYMDGGSLADFLKAVRTVPEAYLAAICKQVLKGLMYLHHEKRVIHRDLKPSNILINHRGEVKISDFGVSAIISSSSAQRDTFTGTFNYMAPERISGQKHGHLSDIWSLGLVMLECATGNFPYPPRESFYELLEAVVDQPSPSAPSDQFSPEFCSFISACIQKNAADRSSAQTLSAHPFLSMYDDLNIDLSDYFTTAGSPLATFKQIAL

SEQ ID NO: 12376 - protein, 241 aa, Triticum aestivum
  misc_feature (1)..(241): Ceres Seq. ID no. 14301485
MAQELKISLFTQCQYVVTCYQCFYVNGVISIALEYMDGGSLADFLKAVRTVPEAYLAAICKQVLKGLMYLHHEKRVIHRDLKPSNILINHRGEVKISDFGVSAIISSSSAQRDTFTGTFNYMAPERISGQKHGHLSDIWSLGLVMLECATGNFPYPPRESFYELLEAVVDQPSPSAPSDQFSPEFCSFISACIQKNAADRSSAQTLSAHPFLSMYDDLNIDLSDYFTTAGSPLATFKQIAL

SEQ ID NO: 12377 - DNA, 2050 bp, Triticum aestivum
  misc_feature (1)..(2050): Ceres Seq. ID no. 14301486
aatttccaaggagaatgcaggagcatgttctttccttcggcgatctcagagttgcatttcccagcaggcatcctgacatagtttgaaactccatcacctctcggcaagcaacaacggatacgatccagcacgggagctggtgctgttcaccgcccccagctacctacctgctgccgacctttatctctgcagaagatcgatggaaacccaggaaggcgatgcgcataggtccgaatccgatgctcacaaagtgaaagggagaggtggattcgtagccctgccgttcatcatagcaaatgaaatgttggagaaagttgcggggttcgggctcaacaccaacatgatcatgtacctcaccaagcagtaccacctgagcaacgtcaccgccggagcgacgctcttcgtgtgggctgcggcggcaaatttcgcgcccattcccggcgcgctcatagccgacatgtacacaggccgattcatggccatctcgctaggctccatcgcgtgcctaacaggggtcgttttcctatggctgagcgccatgatacccggagcacggccaccgccgtgcggcgtcggccttgccggggagcagtgcgcgcccccggggccgaggcaccttgcgtggctgatcgccggcttcacgttcctgtccatcggcgccggcggcatccggccgtgctccatggccttcggcgcggaccagttctcccggcaccccaaggagaggaggtcgaggatcctgcaggcctacttcaacgcctactacgcgtccatcggggtggccttcacggtcgccgtcaccgtgatcgtctacgtgcaggacaacgtcgggtggaaggccgggttcgccgttccgatgggcctcatgatgctctccgcggtgagcttcctcctgggctcccgcctctacgtcaaggagaaggggtccaagcaaatgttcgccgggataggcgccgccctcgtggcggcgatcaggaactacagggtgcagctgccggcgaagacggaggacggcgtgtaccatcatctcaaggactgcaagctcactgtccccacagacaggttgaggttcctgaacaaggcctgcatcatcagcaacaacgggggcgtggacttacccggcactggcgcggcggcctcagagcgtgatggcaacgttggcggcaggaggctgtgcacggtggaccaggtggagcagctcaagtcggccgtccggatcctgccgatctggtcgtccaccgtgttcctggcgcaggccatgagccagaactacgccgtgctgcaggccaacgagatggaccggcgcatcggcgtgggccagttccgcgtgccgggctgctccctcaccatgttcaacatggtgaccatgtcgctgtggtcgggcagctacgacaggtggatcgcgccggcgctgcgacgggtgacgggcgacccgcgggggctcaccatgaagcagcgcgtcggcgtgggcctgctgctggccaccgcggcgatggccgtgtccggcgcggtggagggcgcgcggcgcaggctggagctggccggcggcggcggcgccggcatgtcggcgttctggctggtgccgcagttcgcgctcatggggctggcggaggcgttcggcgtgatcggggagctcgagttcttctacacggagctgcccaagagcatggccagcttcagcatggcgctgctctacatggccatgggggtgggcaacctggtcaacagcctgatcgtcaaggtggtggacgacgcgagcaggcgcggggggaggacgagctggctctccagcgatctcaacgcgggccactacgactactactactggctgctcgccggtttgggcgccgtcaacttcgtgtacttcctctggtgcgcctggaagtacggcgaggaggggaagaacgtggagtgggaggagggtgaaggtgagagggaacggccgatggcctagttttgtaatgctgagctcgggtgtcacaatgaggccatttttaacgtgagtctgaactcagagggcaaaaaccgcaggttgcggggttggttctcc

SEQ ID NO: 12378 - protein, 584 aa, Triticum aestivum
  misc_feature (1)..(584): Ceres Seq. ID no. 14301487
METQEGDAHRSESDAHKVKGRGGFVALPFIIANEMLEKVAGFGLNTNMIMYLTKQYHLSNVTAGATLFVWAAAANFAPIPGALIADMYTGRFMAISLGSIACLTGVVFLWLSAMIPGARPPPCGVGLAGEQCAPPGPRHLAWLIAGFTFLSIGAGGIRPCSMAFGADQFSRHPKERRSRILQAYFNAYYASIGVAFTVAVTVIVYVQDNVGWKAGFAVPMGLMMLSAVSFLLGSRLYVKEKGSKQMFAGIGAALVAAIRNYRVQLPAKTEDGVYHHLKDCKLTVPTDRLRFLNKACIISNNGGVDLPGTGAAASERDGNVGGRRLCTVDQVEQLKSAVRILPIWSSTVFLAQAMSQNYAVLQANEMDRRIGVGQFRVPGCSLTMFNMVTMSLWSGSYDRWIAPALRRVTGDPRGLTMKQRVGVGLLLATAAMAVSGAVEGARRRLELAGGGGAGMSAFWLVPQFALMGLAEAFGVIGELEFFYTELPKSMASFSMALLYMAMGVGNLVNSLIVKVVDDASRRGGRTSWLSSDLNAGHYDYYYWLLAGLGAVNFVYFLWCAWKYGEEGKNVEWEEGEGERERPMA

SEQ ID NO: 12379 - protein, 550 aa, Triticum aestivum
  misc_feature (1)..(550): Ceres Seq. ID no. 14301488
MLEKVAGFGLNTNMIMYLTKQYHLSNVTAGATLFVWAAAANFAPIPGALIADMYTGRFMAISLGSIACLTGVVFLWLSAMIPGARPPPCGVGLAGEQCAPPGPRHLAWLIAGFTFLSIGAGGIRPCSMAFGADQFSRHPKERRSRILQAYFNAYYASIGVAFTVAVTVIVYVQDNVGWKAGFAVPMGLMMLSAVSFLLGSRLYVKEKGSKQMFAGIGAALVAAIRNYRVQLPAKTEDGVYHHLKDCKLTVPTDRLRFLNKACIISNNGGVDLPGTGAAASERDGNVGGRRLCTVDQVEQLKSAVRILPIWSSTVFLAQAMSQNYAVLQANEMDRRIGVGQFRVPGCSLTMFNMVTMSLWSGSYDRWIAPALRRVTGDPRGLTMKQRVGVGLLLATAAMAVSGAVEGARRRLELAGGGGAGMSAFWLVPQFALMGLAEAFGVIGELEFFYTELPKSMASFSMALLYMAMGVGNLVNSLIVKVVDDASRRGGRTSWLSSDLNAGHYDYYYWLLAGLGAVNFVYFLWCAWKYGEEGKNVEWEEGEGERERPMA

SEQ ID NO: 12380 - protein, 537 aa, Triticum aestivum
  misc_feature (1)..(537): Ceres Seq. ID no. 14301489
MIMYLTKQYHLSNVTAGATLFVWAAAANFAPIPGALIADMYTGRFMAISLGSIACLTGVVFLWLSAMIPGARPPPCGVGLAGEQCAPPGPRHLAWLIAGFTFLSIGAGGIRPCSMAFGADQFSRHPKERRSRILQAYFNAYYASIGVAFTVAVTVIVYVQDNVGWKAGFAVPMGLMMLSAVSFLLGSRLYVKEKGSKQMFAGIGAALVAAIRNYRVQLPAKTEDGVYHHLKDCKLTVPTDRLRFLNKACIISNNGGVDLPGTGAAASERDGNVGGRRLCTVDQVEQLKSAVRILPIWSSTVFLAQAMSQNYAVLQANEMDRRIGVGQFRVPGCSLTMFNMVTMSLWSGSYDRWIAPALRRVTGDPRGLTMKQRVGVGLLLATAAMAVSGAVEGARRRLELAGGGGAGMSAFWLVPQFALMGLAEAFGVIGELEFFYTELPKSMASFSMALLYMAMGVGNLVNSLIVKVVDDASRRGGRTSWLSSDLNAGHYDYYYWLLAGLGAVNFVYFLWCAWKYGEEGKNVEWEEGEGERERPMA

SEQ ID NO: 12381 - DNA, 1948 bp, Triticum aestivum
  misc_feature (1)..(1948): Ceres Seq. ID no. 14301490
atctctccctccttccccctctctctctctctctctctctgacgactctgacgacttgctagctagctcctccggctcaacggaagctagcgatcgccatagcctctgcgactgctgcacccgcacttgaacaagaagaagcagcagcagaagcagaattattagaggcgcaaaggcttgcgtgcggtctcaaggaaccccgaaaaaggccgagaagaaaagaagataaaaggtagttgagtagtcttgcacgcgtccatgggttgcggcttatcgacgccggacaacgacggcgggggcggcgcgcggaggaagcaggggagcgtgggggacgtcgtcgtcttcctcccggggctccgggcgcccatgggcgtggacttgtcccaggcgctcgcggggcgcctggacaagggcgccgtggagaggctgtcggccctgagagcgcgcgtcgtcgacatggcaatgcaagaatcggcggtggccctgaagcccaggcggaaggccgccgcacggcaaggatctagcactgccaatctcttgcaggcgctggaagactacttgccacttctgctaggattggtgaaagaaggtggtgagttgaggcacagcgtgcagtttgtgtggactaaccaagaggacaaggccgaggagacggccatggcggatgcatggtacgaggtgctgtccgtgctgcatttgatggccatggtctgcttgctgcaggccaactccctgctccttccaagggcttacggcgatggttacgggccacaggtctctgaagagagcagacgtgccactgtcgacgttttcttgaaagcatctggctacttggactgcgcaattcgacaagtgctcccacagataccatcagaactaaggagacaacttccagtagacctggctgaaggcaacctcaaagctcttagcctgcaagctctcggtcagggtgttgacatgcagcttgggctggcaatcgatagcccaaaggccacactagctgtaaaaaggcgcttagcttgtgagatggtcaaatattggcaccaggttcaggagagcattccagatcttcctgtgtccgacggatgggggaaaaaacatctactatttgtcaaatggaagtacgtcgaagcgaagtctgcagcatactacttccatggtttgattcttgacgaaggaaacagtgagaaatctcacggaatggcaatagcagcattggaagcttcggaggaatttctgaaagaaagcaaaagggcctctgaagttttccatgcaactcctccaacatctaggagccccactccatttggaacagctaagtatctgtttgacaagatcccgaaagaggcttcaagcaaggtccggatcaaccaggacctatataccccagaaagggtcattggagcaccacccccgttgccggatttctcgttggcactaacacctgaagactatgatcttcctccattagacccactttggaacaaagaagacggccaccagtaagtgtacattcagcattcagcaagagtgtcttctgatgggaaggctctggcgctactgagaaagcaacgaccaggattctgccatgcggaggccggacacgacgcaaaggaagtgtacaaagatatgttccgacaaaaaaaatttgatgtcggcaaactggaagcaaattttagaaaggcctgaagatatctgaagagcatttttacagttaaatcttctctgacaatggaaacacattgtcaaaagcttgctttccaacaattcctgtaaaaattatatttccaatgagcgccatggttcctttttcttaggattttctgaacatggcttagttttggggccattctgagcctattaatgtggtaaatttgccaaacatgatcctgatcttcattcaatgcttgagacagaagcagcaacgatgaaatttaaactactcaac

SEQ ID NO: 12382 - protein, 415 aa, Triticum aestivum
  misc_feature (1)..(415): Ceres Seq. ID no. 14301491
MGCGLSTPDNDGGGGARRKQGSVGDVVVFLPGLRAPMGVDLSQALAGRLDKGAVERLSALRARVVDMAMQESAVALKPRRKAAARQGSSTANLLQALEDYLPLLLGLVKEGGELRHSVQFVWTNQEDKAEETAMADAWYEVLSVLHLMAMVCLLQANSLLLPRAYGDGYGPQVSEESRRATVDVFLKASGYLDCAIRQVLPQIPSELRRQLPVDLAEGNLKALSLQALGQGVDMQLGLAIDSPKATLAVKRRLACEMVKYWHQVQESIPDLPVSDGWGKKHLLFVKWKYVEAKSAAYYFHGLILDEGNSEKSHGMAIAALEASEEFLKESKRASEVFHATPPTSRSPTPFGTAKYLFDKIPKEASSKVRINQDLYTPERVIGAPPPLPDFSLALTPEDYDLPPLDPLWNKEDGHQ

SEQ ID NO: 12383 - protein, 379 aa, Triticum aestivum
  misc_feature (1)..(379): Ceres Seq. ID no. 14301492
MGVDLSQALAGRLDKGAVERLSALRARVVDMAMQESAVALKPRRKAAARQGSSTANLLQALEDYLPLLLGLVKEGGELRHSVQFVWTNQEDKAEETAMADAWYEVLSVLHLMAMVCLLQANSLLLPRAYGDGYGPQVSEESRRATVDVFLKASGYLDCAIRQVLPQIPSELRRQLPVDLAEGNLKALSLQALGQGVDMQLGLAIDSPKATLAVKRRLACEMVKYWHQVQESIPDLPVSDGWGKKHLLFVKWKYVEAKSAAYYFHGLILDEGNSEKSHGMAIAALEASEEFLKESKRASEVFHATPPTSRSPTPFGTAKYLFDKIPKEASSKVRINQDLYTPERVIGAPPPLPDFSLALTPEDYDLPPLDPLWNKEDGHQ

SEQ ID NO: 12384 - protein, 349 aa, Triticum aestivum
  misc_feature (1)..(349): Ceres Seq. ID no. 14301493
MAMQESAVALKPRRKAAARQGSSTANLLQALEDYLPLLLGLVKEGGELRHSVQFVWTNQEDKAEETAMADAWYEVLSVLHLMAMVCLLQANSLLLPRAYGDGYGPQVSEESRRATVDVFLKASGYLDCAIRQVLPQIPSELRRQLPVDLAEGNLKALSLQALGQGVDMQLGLAIDSPKATLAVKRRLACEMVKYWHQVQESIPDLPVSDGWGKKHLLFVKWKYVEAKSAAYYFHGLILDEGNSEKSHGMAIAALEASEEFLKESKRASEVFHATPPTSRSPTPFGTAKYLFDKIPKEASSKVRINQDLYTPERVIGAPPPLPDFSLALTPEDYDLPPLDPLWNKEDGHQ

SEQ ID NO: 12385 - DNA, 1155 bp, Triticum aestivum
  misc_feature (1)..(1155): Ceres Seq. ID no. 14301506
gtcactctcctctcctctgactcgtactctgcacagcttccccccacagaaaacaatcatggttaaaggtccaggactctacaccgaaatcggcaaaaaggccagagatcttctctacaaggactaccaaggagaccagaagctcagcgtcaccacttactcttccaccggcgttgcaatcaccaccactggaacaaacaagggagacttgtttgttggtgatgtaactacccaagtcaagaacaagaacttcactgccgatatcaaagtcgccactgattcttctctgctgaccacctttacctatgatgaggctacccctggattgaaggcaatcgtcagcgccaaggtgcctgatcagaaatctggcaaggttgagctccagtatctgcacgactatgctggtatctgcaccagtgttggtttgacagctagccccattgtcaatttctccggcgtggttggaaacaacgtcttggctcttggtaccgatgtgtccttcaacacccagtctggtgatttcaagcatttcaacgctggtttcagcttcaccaaggacgatctgattgctgcccttactctgaatgacaaaggtgacaaactgaatgcatcgtactaccacattgtgaacccgttgagcaacacagtggttggagctgaggttacccacagcttcacgactcaaaagaacgccattaccgttggtgctcagcatgctcttgacccattgacgacattgaaggcacgcgtgaacaatgatggtgtagctaacgcgctgatccagcaccagtggcgtccaaagtcgttcatcaccgtttctggagaggttaactccagggcgattgagaagggtgccaaggttgggtttgctcttgctctcaagccttgagaaagaatcaagaatccaaatgtgcccttgaggaggggtagcttagtttttttttcatcttctcggtcttctaatcttttggactaatctctctgcctggttttgctttaaaaatctttcatttgttgttttgttttaatcggtgttgggatttgtagaaaataagaaaaaaaaactattaaaaggatcgtcttgaagatgaaccgtacgaatctctttcctaattatttgtctcaatgctctgctaaaacactctgttcaattcg

SEQ ID NO: 12386 - protein, 295 aa, Triticum aestivum
  misc_feature (1)..(295): Ceres Seq. ID no. 14301507
SLSSPLTRTLHSFPPQKTIMVKGPGLYTEIGKKARDLLYKDYQGDQKLSVTTYSSTGVAITTTGTNKGDLFVGDVTTQVKNKNFTADIKVATDSSLLTTFTYDEATPGLKAIVSAKVPDQKSGKVELQYLHDYAGICTSVGLTASPIVNFSGVVGNNVLALGTDVSFNTQSGDFKHFNAGFSFTKDDLIAALTLNDKGDKLNASYYHIVNPLSNTVVGAEVTHSFTTQKNAITVGAQHALDPLTTLKARVNNDGVANALIQHQWRPKSFITVSGEVNSRAIEKGAKVGFALALKP

SEQ ID NO: 12387 - protein, 276 aa, Triticum aestivum
  misc_feature (1)..(276): Ceres Seq. ID no. 14301508
MVKGPGLYTEIGKKARDLLYKDYQGDQKLSVTTYSSTGVAITTTGTNKGDLFVGDVTTQVKNKNFTADIKVATDSSLLTTFTYDEATPGLKAIVSAKVPDQKSGKVELQYLHDYAGICTSVGLTASPIVNFSGVVGNNVLALGTDVSFNTQSGDFKHFNAGFSFTKDDLIAALTLNDKGDKLNASYYHIVNPLSNTVVGAEVTHSFTTQKNAITVGAQHALDPLTTLKARVNNDGVANALIQHQWRPKSFITVSGEVNSRAIEKGAKVGFALALKP

SEQ ID NO: 12388 - DNA, 1135 bp, Triticum aestivum
  misc_feature (1)..(1135): Ceres Seq. ID no. 14301534
atggcagtttgatctcatctcctcctcctcctcctccaccgccgcacgccacccccatccccatccccaccggagccgactgcggcggagcggagcgcaccggagatcttccttctttccttgtcggtaaggttctgtggccatgtctgacagcgagaaagaggtgccagtggaagtggaagaaggcgccacccgcggggccgactgggaggtcgtcacgctcaccgcgtccacctacgccgccgcgcccagcgggccagaaggagcagcagagggcaagaggctcggcgacggcaacgacggccgcgcctcgtccaccacgctgctcatgtcggaccacttcgtgttcccacccagcgagcacgagaacctgcccatagagaccgccctgctcgacccgcctcaggagagcaccagcgtggacgacgccggcttcaagaacgtcggtgggggctacgatgatgggtccgagacggtcaagtactatgacgaggggaagagcctgtcggtgcatgatgccgagatgatgatgggtgacgtggctgagttccacgcccaagatgacggacgcggttacgttgtccatgatgatgatgatgactcccaggacaagtctgatgcgcctctggacagcagcagcagcaagggccgtggctctggtgccccctgccagtgctggttgaagaagcacatgtcatgcctgtatgaccaggccaaggagaccaatcatctctggggtgcggttgtcgtggctgccctggttggccttgtcatcttgtggcgcaaagacaagttgcacatgagctgccttaaatggcgctctcgctcggcagtcagttaatgatccaatccgaattcctggactggtgggtctgtttgtggtcttcttcgtcgatacaatctctgacgagtcttcgcagatcgccctggaagtcattataaccaagaagaagatggccatgccaatatgattcgtgacaatgacgaaaggggtctctagttgtaataatatcaagtttgacagggtattttcttgttgccaggcttgtgagatgccaaagtttcttattgctcttgtacccatagtcgtcgtacctttgcactgtttaatacgaacggcgcgccctttcaagct

SEQ ID NO: 12389 - protein, 232 aa, Triticum aestivum
  misc_feature (1)..(232): Ceres Seq. ID no. 14301535
MSDSEKEVPVEVEEGATRGADWEVVTLTASTYAAAPSGPEGAAEGKRLGDGNDGRASSTTLLMSDHFVFPPSEHENLPIETALLDPPQESTSVDDAGFKNVGGGYDDGSETVKYYDEGKSLSVHDAEMMMGDVAEFHAQDDGRGYVVHDDDDDSQDKSDAPLDSSSSKGRGSGAPCQCWLKKHMSCLYDQAKETNHLWGAVVVAALVGLVILWRKDKLHMSCLKWRSRSAVS

SEQ ID NO: 12390 - protein, 170 aa, Triticum aestivum
  misc_feature (1)..(170): Ceres Seq. ID no. 14301536
MSDHFVFPPSEHENLPIETALLDPPQESTSVDDAGFKNVGGGYDDGSETVKYYDEGKSLSVHDAEMMMGDVAEFHAQDDGRGYVVHDDDDDSQDKSDAPLDSSSSKGRGSGAPCQCWLKKHMSCLYDQAKETNHLWGAVVVAALVGLVILWRKDKLHMSCLKWRSRSAVS

SEQ ID NO: 12391 - protein, 125 aa, Triticum aestivum
  misc_feature (1)..(125): Ceres Seq. ID no. 14301537
GSLISSPPPPPPPPHATPIPIPTGADCGGAERTGDLPSFLVGKVLWPCLTARKRCQWKWKKAPPAGPTGRSSRSPRPPTPPRPAGQKEQQRARGSATATTAAPRPPRCSCRTTSCSHPASTRTCP

SEQ ID NO: 12392 - DNA, 1410 bp, Triticum aestivum
  misc_feature (1)..(1410): Ceres Seq. ID no. 14301538
ctcgatcttcttgtttcagcctccacacacttggccatctcgcaagccgtgacagggcgatcaatggcgcccctacgtccgcgcctggccgccctgctcgctctgtgcgcgtgcgccatggctccgccggcggccgccgccaacgtgtcgatcacgacgtgccggtccttctgcggcaacatcacggtggactacccgttcgcgctccacgccgggtgcggccacgcggggttccgcgacctgctctactgcatcgaccgcacgctcatgctgcacctcccctcgggctcctaccgcgtcctcgacatcgactacgcctaccgcggcctcaccctgcacgacccggccatgtccgactgccgcgccatcgaccgctccccgggcggccgcggcaacgggttcgtcgtcgagccgtggcgcgcgccgttcctggccccggacccggacaacgtgttcctcctcctcggctgccgcgccagctcgccgctcttccagggcttccccgaccgccacctgccgtgccggaacgtgtccgggatggggtgcggcgactactacggctgccccgcgtgggacgactacgggcgccggccgtcgggggcggcgtacgggtcggccgtgccgcccgagtgctgcgcggtctcgtagggcgccatccgggccgtgaacgtgagccggctccagtgcgaggggtacagcagcgcgtacagcctcgcgccggtgcgcgcggagggggccggcggctgggcgtacggcatccgggtggcgtgggcgctgccggaggcgaaccgggggttctgcggcgcgtgccgcgccacgggcggggtgtgcggccacgacgtggagagccgcggcgacctgtgcctctgcggtgactggaactcgacttccaactgcgactcctcggcggacgccgcgccgtcaagcaccgccacgcctggcatcgccattgccgctcttctcttggcccttctcgcctcaggattgtcgtccgggtcaatagcgaacatgtgagggacagagggagtgtgcctgtgaaggcgtcatgtttcatccaacagtggccactgacgagctgttcgtgccgccatgattacctccgccgtctggtgtaccgctgcaatacttttgtgtagacaaaaactagtgcgactgaaatgtttgtctgcggcataaatctttgattaggaaatcagtgtcatattacattcgaagtatacctacaaaacatatgcgagtcagaactggggtatattgtgagcttgctcgattcatcatgcttattcgatttgatgtggctccgtttgcatttgtgagtgatgcgttgcggtcctcgcggaggcatgaaaatatgtttgaatatgtttcgcccgtattaacgtataaatgcattacctagtttttttttcg

SEQ ID NO: 12393 - protein, 290 aa, Triticum aestivum
  misc_feature (1)..(290): Ceres Seq. ID no. 14301539
RSSCFSLHTLGHLASRDRAINGAPTSAPGRPARSVRVRHGSAGGRRQRVDHDVPVLLRQHHGGLPVRAPRRVRPRGVPRPALLHRPHAHAAPPLGLLPRPRHRLRLPRPHPARPGHVRLPRHRPLPGRPRQRVRRRAVARAVPGPGPGQRVPPPRLPRQLAALPGLPRPPPAVPERVRDGVRRLLRLPRVGRLRAPAVGGGVRVGRAARVLRGLVGRHPGREREPAPVRGVQQRVQPRAGARGGGRRLGVRHPGGVGAAGGEPGVLRRVPRHGRGVRPRRGEPRRPVPLR

SEQ ID NO: 12394 - protein, 215 aa, Triticum aestivum
  misc_feature (1)..(215): Ceres Seq. ID no. 14301540
LDLLVSASTHLAISQAVTGRSMAPLRPRLAALLALCACAMAPPAAAANVSITTCRSFCGNITVDYPFALHAGCGHAGFRDLLYCIDRTLMLHLPSGSYRVLDIDYAYRGLTLHDPAMSDCRAIDRSPGGRGNGFVVEPWRAPFLAPDPDNVFLLLGCRASSPLFQGFPDRHLPCRNVSGMGCGDYYGCPAWDDYGRRPSGAAYGSAVPPECCAVS

SEQ ID NO: 12395 - protein, 194 aa, Triticum aestivum
  misc_feature (1)..(194): Ceres Seq. ID no. 14301541
MAPLRPRLAALLALCACAMAPPAAAANVSITTCRSFCGNITVDYPFALHAGCGHAGFRDLLYCIDRTLMLHLPSGSYRVLDIDYAYRGLTLHDPAMSDCRAIDRSPGGRGNGFVVEPWRAPFLAPDPDNVFLLLGCRASSPLFQGFPDRHLPCRNVSGMGCGDYYGCPAWDDYGRRPSGAAYGSAVPPECCAVS

SEQ ID NO: 12396 - DNA, 2001 bp, Triticum aestivum
  misc_feature (1)..(2001): Ceres Seq. ID no. 14301550
accgacaggattcgccgccgcgccaccccggagctcccgcccaggctcgccgcctcatcgtccgtcatccgccttgtggccgcgggagcacagacctcgccaaaacatccatccggggtcccggctgccggccaggtcgatcgcctcccctctcctccgaaatcgttccccaccaaaacatctctcgtcgccgccacgctccacgtccaggcaggatgcgctgcctccgccgcgcgggcgcggccgcccacctgctccgctccgcgacgaccggccccgccaagcacgctcgcacggccctcgagcagatgcctccgccgcctgccgccttcccatgtcgcgcgcgcgcccaccacctgctcggaggaatgcgcggccagtggctctgcacggcgacggggtccaccggcgcccccgacctcgccgtggaccagcacttcaccgtggtgcctggcctaggccccgatgtctccgaggtggcggggctcaccggcgcccacgatcttgccgtggaccaggacttcacagtggtgcctggcccaggcctcgatgtctccaaggaggcggagagggtctgccgcgtgctgtccaccgtgccggagccgagggttgcatcagccctcgacgcgctcggggcctctgtgtcgcctcagctcgtggcggaggtgctcaagaacctgagcaacgctggcatcctcgccctcgccttcttccggtgggcggagaggcagcaaggcttcgtgtacacggcggagagcttccacaacctcatcgaagcgctcggcaagatcaagcagttcaggctggtctggagcctggtggaggccatgcggtgccgcggcttgctttccaaggacacgttcaggctcatcgtcaggaggtacgccagggcaaggaaggtcaaggaagctgtcgagacgtttgagaagatggccggcttcgggctcaaagcagacttatcagattacaattggttgatcgacgtgctgagcaaatccaagcaagtcaagaaggcgcaagccatcttcaaggagatgaagaggaacggaaagtttgttcccgatttgaagacctacactgtcctcatggaaggctggggccatgagaaggacttgctgatgcttaagtcggtgtaccaagaaatgctcgatgcaggcctgaagcctgatgtcgtggcatacgggatgctcattagttccttttgcaagtctggcaaatgtgatgaggccatcaaggtgttctgtgagatggaagccaatggttgcatgccaagccctcatgtgtattgcatgcttatcaatgggcttggctcagaggagaggctggatgaggctttgaagtattttgagctttctaaggccagtgggtttcccatggaggtacctacatgtaatgcagttgttggggcttactgcagagcctcaaaattccagcatgccttcaagatggtcgatgagatgagaaagagtggaatcggtccaaattcccggacttatgatattattcttcaccatcttataaagtctcagaagatagaagaggcttataatgtgttccagggaatgggcaaggatggctgtgaacctcagctcaacacatatacaatgatggttagtatgttctgcagtaatgaaagggttgatgtggccttgaaggtgtggaaccaaatgaaggagaagggtgttctgccatgtatgcacatgttttctgcattgatcaacgggttatgctttgagaacaggctggaagaagcttgcgtatatttccaggagatgttggacaaagggatcaggccacctggtcagcttttcagtaatttaaaggaagctcttattgagggaggaagaattagtctggcacaggagatggctttgaagttggatggattacggaaaacacctatgcgtcgttgaggaatcatgcaaataatctgttgcagcagcatatggcttttggctgttagaagctcagtcaaaattgtggtaacaaagaaaacttcag

SEQ ID NO: 12397 - protein, 636 aa, Triticum aestivum
  misc_feature (1)..(636): Ceres Seq. ID no. 14301551
RQDSPPRHPGAPAQARRLIVRHPPCGRGSTDLAKTSIRGPGCRPGRSPPLSSEIVPHQNISRRRHAPRPGRMRCLRRAGAAAHLLRSATTGPAKHARTALEQMPPPPAAFPCRARAHHLLGGMRGQWLCTATGSTGAPDLAVDQHFTVVPGLGPDVSEVAGLTGAHDLAVDQDFTVVPGPGLDVSKEAERVCRVLSTVPEPRVASALDALGASVSPQLVAEVLKNLSNAGILALAFFRWAERQQGFVYTAESFHNLIEALGKIKQFRLVWSLVEAMRCRGLLSKDTFRLIVRRYARARKVKEAVETFEKMAGFGLKADLSDYNWLIDVLSKSKQVKKAQAIFKEMKRNGKFVPDLKTYTVLMEGWGHEKDLLMLKSVYQEMLDAGLKPDVVAYGMLISSFCKSGKCDEAIKVFCEMEANGCMPSPHVYCMLINGLGSEERLDEALKYFELSKASGFPMEVPTCNAVVGAYCRASKFQHAFKMVDEMRKSGIGPNSRTYDIILHHLIKSQKIEEAYNVFQGMGKDGCEPQLNTYTMMVSMFCSNERVDVALKVWNQMKEKGVLPCMHMFSALINGLCFENRLEEACVYFQEMLDKGIRPPGQLFSNLKEALIEGGRISLAQEMALKLDGLRKTPMRR

SEQ ID NO: 12398 - protein, 565 aa, Triticum aestivum
  misc_feature (1)..(565): Ceres Seq. ID no. 14301552
MRCLRRAGAAAHLLRSATTGPAKHARTALEQMPPPPAAFPCRARAHHLLGGMRGQWLCTATGSTGAPDLAVDQHFTVVPGLGPDVSEVAGLTGAHDLAVDQDFTVVPGPGLDVSKEAERVCRVLSTVPEPRVASALDALGASVSPQLVAEVLKNLSNAGILALAFFRWAERQQGFVYTAESFHNLIEALGKIKQFRLVWSLVEAMRCRGLLSKDTFRLIVRRYARARKVKEAVETFEKMAGFGLKADLSDYNWLIDVLSKSKQVKKAQAIFKEMKRNGKFVPDLKTYTVLMEGWGHEKDLLMLKSVYQEMLDAGLKPDVVAYGMLISSFCKSGKCDEAIKVFCEMEANGCMPSPHVYCMLINGLGSEERLDEALKYFELSKASGFPMEVPTCNAVVGAYCRASKFQHAFKMVDEMRKSGIGPNSRTYDIILHHLIKSQKIEEAYNVFQGMGKDGCEPQLNTYTMMVSMFCSNERVDVALKVWNQMKEKGVLPCMHMFSALINGLCFENRLEEACVYFQEMLDKGIRPPGQLFSNLKEALIEGGRISLAQEMALKLDGLRKTPMRR

SEQ ID NO: 12399 - protein, 534 aa, Triticum aestivum
  misc_feature (1)..(534): Ceres Seq. ID no. 14301553
MPPPPAAFPCRARAHHLLGGMRGQWLCTATGSTGAPDLAVDQHFTVVPGLGPDVSEVAGLTGAHDLAVDQDFTVVPGPGLDVSKEAERVCRVLSTVPEPRVASALDALGASVSPQLVAEVLKNLSNAGILALAFFRWAERQQGFVYTAESFHNLIEALGKIKQFRLVWSLVEAMRCRGLLSKDTFRLIVRRYARARKVKEAVETFEKMAGFGLKADLSDYNWLIDVLSKSKQVKKAQAIFKEMKRNGKFVPDLKTYTVLMEGWGHEKDLLMLKSVYQEMLDAGLKPDVVAYGMLISSFCKSGKCDEAIKVFCEMEANGCMPSPHVYCMLINGLGSEERLDEALKYFELSKASGFPMEVPTCNAVVGAYCRASKFQHAFKMVDEMRKSGIGPNSRTYDIILHHLIKSQKIEEAYNVFQGMGKDGCEPQLNTYTMMVSMFCSNERVDVALKVWNQMKEKGVLPCMHMFSALINGLCFENRLEEACVYFQEMLDKGIRPPGQLFSNLKEALIEGGRISLAQEMALKLDGLRKTPMRR

SEQ ID NO: 12400 - DNA, 1804 bp, Triticum aestivum
  misc_feature (1)..(1804): Ceres Seq. ID no. 14301554
ccaaatccagctgaacccacccacgctctacatcacactcatcagtccccactcctcacaggcaaacgccataccatatcacacgggctagccagccatcccatcatggagaaggcgcagaagcgggtggccatcgtcggcgccggcgcgagcggcctggcggcgtgcaagcacgcgctggagcgcggcctccggccggtcgtattcgagtcctcgggcgccatcggcggcgtgtgggtgcgcgcgctggcgtccacgcgcctgcagacgccgcgcacgctctacgagttctccgacttcccctggccgccggaggtcgccgaggtgttcccggaccacgcccaggccgcggcgtacctgcgctcctacgcggagcggttcggcgtgctggaccgcgtccggttcggatgccgcgtgacaggcatggagtacgccggcgtcggcgaggacgaggtccgggcgtgggaccggtgggccggcgatgggtcggcgttcggggatggccgcggccagtggcggctcaccgtgcagcagcagggtgccggcgacgtcgagacatatgttgcggattttgtgatcctgtgcgccgggagattcagcggcatcccgaatatacccacattccctcccgacaaagggccggagaagttcgacggcacggtgatccgctccatggactactccgacatgggcaccgaaaaggccaccgagctcatcaggggcaagctcgtcaccgtcgtcggctaccagaagtccgctatcgacatcgctgcagagtgcgcaaacacaaacggagccaagtatccatgcacaataatatgtcgaacgaagaggtggatcatacccgactactacgcttggggcgttcccattgcattcttctacctcaaccgcttctcggagctcctagtacacaagccaggagaggggctgctccttagcattcttgctaccttcttatcacccttgagatggttgttctcgaagttcgtcgagagctactacagatgggcggtgcccatggataagcacggcatggtgccagaccacagtttcttccaggccatcagctcttgcttggttgcaatattgccagacaagttctatgacatggttgatcaaggaagcattgttctcaagaaagcaaagagcttcagcttctgcaaacaaggtgtgattgtcgaaggtgattccgcgccgataaagagcgacgtggtcatattcgccaccggatacaagggagaccaaaagctaaaggagatgttggcatcatccttgttcagagacattgtgactggcccaccatccagtattattcctctctacaggcaatgcgtgcatcctaggatcccacagctggcgatcatcggctactccgagagcatagcaaacctgcacacattcgacatgcgctccaaatggttggcgcatttccttgacggggtgtttcagttgcctagcataaaatctatggagatggatataaaggaatgggatgaatacatgaagaggtactctcgtgaatacttccgtcgatcttgcgttggagctctccacatctggtacaatgaccagttgtgccaggacatggggtgtgaacccaggaggaagaaagggttctttgcagattggctgttgccatatcttccatcagattacaaggatgtcggtctgaagaagtgacatgagagatctgtcgtgccatcgccgcgcttaaatcaaacagaaacattgccattccagcgattctgtgctgactattgtacaaactaaatgtcatggaataagctcttcggttgaacct

SEQ ID NO: 12401 - protein, 560 aa, Triticum aestivum
  misc_feature (1)..(560): Ceres Seq. ID no. 14301555
PNPAEPTHALHHTHQSPLLTGKRHTISHGLASHPIMEKAQKRVAIVGAGASGLAACKHALERGLRPVVFESSGAIGGVWVRALASTRLQTPRTLYEFSDFPWPPEVAEVFPDHAQAAAYLRSYAERFGVLDRVRFGCRVTGMEYAGVGEDEVRAWDRWAGDGSAFGDGRGQWRLTVQQQGAGDVETYVADFVILCAGRFSGIPNIPTFPPDKGPEKFDGTVIRSMDYSDMGTEKATELIRGKLVTVVGYQKSAIDIAAECANTNGAKYPCTIICRTKRWIIPDYYAWGVPIAFFYLNRFSELLVHKPGEGLLLSILATFLSPLRWLFSKFVESYYRWAVPMDKHGMVPDHSFFQAISSCLVAILPDKFYDMVDQGSIVLKKAKSFSFCKQGVIVEGDSAPIKSDVVIFATGYKGDQKLKEMLASSLFRDIVTGPPSSIIPLYRQCVHPRIPQLAIIGYSESIANLHTFDMRSKWLAHFLDGVFQLPSIKSMEMDIKEWDEYMKRYSREYFRRSCVGALHIWYNDQLCQDMGCEPRRKKGFFADWLLPYLPSDYKDVGLKK

SEQ ID NO: 12402 - protein, 525 aa, Triticum aestivum
  misc_feature (1)..(525): Ceres Seq. ID no. 14301556
MEKAQKRVAIVGAGASGLAACKHALERGLRPVVFESSGAIGGVWVRALASTRLQTPRTLYEFSDFPWPPEVAEVFPDHAQAAAYLRSYAERFGVLDRVRFGCRVTGMEYAGVGEDEVRAWDRWAGDGSAFGDGRGQWRLTVQQQGAGDVETYVADFVILCAGRFSGIPNIPTFPPDKGPEKFDGTVIRSMDYSDMGTEKATELIRGKLVTVVGYQKSAIDIAAECANTNGAKYPCTIICRTKRWIIPDYYAWGVPIAFFYLNRFSELLVHKPGEGLLLSILATFLSPLRWLFSKFVESYYRWAVPMDKHGMVPDHSFFQAISSCLVAILPDKFYDMVDQGSIVLKKAKSFSFCKQGVIVEGDSAPIKSDVVIFATGYKGDQKLKEMLASSLFRDIVTGPPSSIIPLYRQCVHPRIPQLAIIGYSESIANLHTFDMRSKWLAHFLDGVFQLPSIKSMEMDIKEWDEYMKRYSREYFRRSCVGALHIWYNDQLCQDMGCEPRRKKGFFADWLLPYLPSDYKDVGLKK

SEQ ID NO: 12403 - protein, 419 aa, Triticum aestivum
  misc_feature (1)..(419): Ceres Seq. ID no. 14301557
MEYAGVGEDEVRAWDRWAGDGSAFGDGRGQWRLTVQQQGAGDVETYVADFVILCAGRFSGIPNIPTFPPDKGPEKFDGTVIRSMDYSDMGTEKATELIRGKLVTVVGYQKSAIDIAAECANTNGAKYPCTIICRTKRWIIPDYYAWGVPIAFFYLNRFSELLVHKPGEGLLLSILATFLSPLRWLFSKFVESYYRWAVPMDKHGMVPDHSFFQAISSCLVAILPDKFYDMVDQGSIVLKKAKSFSFCKQGVIVEGDSAPIKSDVVIFATGYKGDQKLKEMLASSLFRDIVTGPPSSIIPLYRQCVHPRIPQLAIIGYSESIANLHTFDMRSKWLAHFLDGVFQLPSIKSMEMDIKEWDEYMKRYSREYFRRSCVGALHIWYNDQLCQDMGCEPRRKKGFFADWLLPYLPSDYKDVGLKK

SEQ ID NO: 12404 - DNA, 1725 bp, Triticum aestivum
  misc_feature (1)..(1725): Ceres Seq. ID no. 14301572
aaagcttcacctcccctcaaaaaaaaaagatttaccttcaccggtctctctcgcgccaaccggcggcgctcgtctccctcgccgccgtaagcacggtggcgaagccgaacccaagcgaggtggccaagtagtcggtgagatgctgctagtagagctgctccgctgccagatccaggagtggtacccggcattccgccgccacaccgtccccaccgtcaccatccccctccccgccgccttcctccgctacctcgccggccagcccgcccaccccgtccccgacgcccctcaccaggacgcggaagggcctcccccattcctcctcccgtcgctcgcctccggccgcacccccttcccgccgctccacctcccggaccccgtcgaccacgacgacagctccgacctcttctccgtctgcgacgacgacgacgacgacgagagcccgcccctccccgccttccccgagctggaggccgcggtcgacgcggccatcgccgagctcggcggcgccgcgctccccaagctcaactggagcgcgcccaaggacgccgccttcatgtccgccgacggcaccgtccgctgcacctgcttcgccgaggtcgccatgctgctccgctcctcggactgcgtcgcgcacgacctctcctccgcgcgcccgtcctgccaggacttcgtgtgcgccagggaaggtgttcgacggaatgccggacagggcagtggtgccaaccaggcgggtgctccatcgaatggcggagggagcaccagtggtgctggttctctgagtgatcctcccactgaggatcgcaatgagggaggcaggcaagctgctgccgacagtgatgcttcggaagacgatgttggacaagaaagcggcgatgatagttgggtggacgatgggttccagtactacctcgccctccgcaagtggtacccgggcctgcgccccgaggcagagttccgatgcttcgtgcggggacggaagctggtcggcgtgtcgcagagggacacatctgcttactacccatcgttgcctgggtggagttctgaggtgcagccgaagatcgaggagttcttcgaagaagttgttgagtcgcagtttgcttctcagaattacacatttgatgtgtatgtcagagcagatggccgggtgaagctgattgatttcaatccttggggtggctatacattgccgcttatgtttacatgggaggagcttgaggatgagaagagaggagaggacaagctggagtttagagtggtaatggagcaaggtgcagtgaggccaggattaatgacagcagtgccgtatgatatgacggattggggagaagggagcggctgggatgtttttctgaagaaggctgacaatgaactgaatagacagatggcctcattagctatggattcgtaattgacatctggaacaaagcagcgcttgaggactccagtagttgaacaacttcaaccgtcgcctgtttgtaatgtttcacctgtcaaacgctagaagtaacagccttctttagattgtgatgcaaacctcacggcaatcggccgtttccccccatggcttttgcaatgctagattgctagtatgggagtaccgcatgctgcttcatctcagttttatgatatttacagaaaaatatttgtagtggaagtatatggcccatggctgaaattgcaaactctgaaacatgaatacacattccatatgcctttgctgtt

SEQ ID NO: 12405 - protein, 469 aa, Triticum aestivum
  misc_feature (1)..(469): Ceres Seq. ID no. 14301573
KLHLPSKKKDLPSPVSLAPTGGARLPRRRKHGGEAEPKRGGQVVGEMLLVELLRCQIQEWYPAFRRHTVPTVTIPLPAAFLRYLAGQPAHPVPDAPHQDAEGPPPFLLPSLASGRTPFPPLHLPDPVDHDDSSDLFSVCDDDDDDESPPLPAFPELEAAVDAAIAELGGAALPKLNWSAPKDAAFMSADGTVRCTCFAEVAMLLRSSDCVAHDLSSARPSCQDFVCAREGVRRNAGQGSGANQAGAPSNGGGSTSGAGSLSDPPTEDRNEGGRQAAADSDASEDDVGQESGDDSWVDDGFQYYLALRKWYPGLRPEAEFRCFVRGRKLVGVSQRDTSAYYPSLPGWSSEVQPKIEEFFEEVVESQFASQNYTFDVYVRADGRVKLIDFNPWGGYTLPLMFTWEELEDEKRGEDKLEFRVVMEQGAVRPGLMTAVPYDMTDWGEGSGWDVFLKKADNELNRQMASLAMDS

SEQ ID NO: 12406 - protein, 423 aa, Triticum aestivum
  misc_feature (1)..(423): Ceres Seq. ID no. 14301574
MLLVELLRCQIQEWYPAFRRHTVPTVTIPLPAAFLRYLAGQPAHPVPDAPHQDAEGPPPFLLPSLASGRTPFPPLHLPDPVDHDDSSDLFSVCDDDDDDESPPLPAFPELEAAVDAAIAELGGAALPKLNWSAPKDAAFMSADGTVRCTCFAEVAMLLRSSDCVAHDLSSARPSCQDFVCAREGVRRNAGQGSGANQAGAPSNGGGSTSGAGSLSDPPTEDRNEGGRQAAADSDASEDDVGQESGDDSWVDDGFQYYLALRKWYPGLRPEAEFRCFVRGRKLVGVSQRDTSAYYPSLPGWSSEVQPKIEEFFEEVVESQFASQNYTFDVYVRADGRVKLIDFNPWGGYTLPLMFTWEELEDEKRGEDKLEFRVVMEQGAVRPGLMTAVPYDMTDWGEGSGWDVFLKKADNELNRQMASLAMDS

SEQ ID NO: 12407 - protein, 284 aa, Triticum aestivum
  misc_feature (1)..(284): Ceres Seq. ID no. 14301575
MSADGTVRCTCFAEVAMLLRSSDCVAHDLSSARPSCQDFVCAREGVRRNAGQGSGANQAGAPSNGGGSTSGAGSLSDPPTEDRNEGGRQAAADSDASEDDVGQESGDDSWVDDGFQYYLALRKWYPGLRPEAEFRCFVRGRKLVGVSQRDTSAYYPSLPGWSSEVQPKIEEFFEEVVESQFASQNYTFDVYVRADGRVKLIDFNPWGGYTLPLMFTWEELEDEKRGEDKLEFRVVMEQGAVRPGLMTAVPYDMTDWGEGSGWDVFLKKADNELNRQMASLAMDS

SEQ ID NO: 12408 - DNA, 1792 bp, Triticum aestivum
  misc_feature (1)..(1792): Ceres Seq. ID no. 14301587
acaaaatttctccccccaaatttcctactcgtccgtttcacgctcccacggtctcactctcacctccaaacccaaatccccaaaccctaaccacagcacctacctcctccgccgccgccgccatggcaggagcaggagtcggcggccgcaaggctcgcaactttgcgacctttcgcctattcccccgcgacggtgccgccgaccccaacgaccgcgtcttcgtccgcgtcgacaacaacgcctacaccatccccggcttcggcgacgacgaagacccttccctctcgcccaccgccgccgccgaccaattcccttcctccacctctgggcccctccccgaccacgtccgccagcagatccttgagctcggcctccccgacgatggctacaactaccttctccatctccgcgagctgcggccctccgctgtggcctcctccttcgtacccagccataccgcccgcccagagcaacttcccctggacgtgaaggcctatgatgcaagcaaggtgcgggttgcttctggcaaggtcgaggaagagttggacgaggggaggaccatgtgtaaggtggccgcaaagacggcaccggtgaggcgagttgagaaggccgtcgaccctgacgttgcaaggttgctcgatgagagcgaggatgagggtttggaggaggatttcgtcataatggcaaaccaagccgaaggggatgatatggaggatgaaagtgaggaagaggggggtggtgtgttcagtgatgtggaaaatgatgaggagttcgaggatgaagagggtgagcccaagccgagggtgccacggctgctggatgaacaatttgatctgcttgctttggaagaatatggagctagtgatgatgatgatggagctgttagagatggggaacatgaactcccgtctgaggttatagatgaactgaagttgttccacaatcaaaatgtatgcgttgatgaagaatatagaacaccagcagattttgttcgtggaaaacttgactcaaccaccgccgaggaggtggatgaatctgctaatgtgatccagaagtgtgctgaatatgctgaaaggtatttaaatgaaactgcagaagatgaagaggtcttgcttgtttcggaaagcagtgatgaatctgaagtttgggactgtgagaccattgtttccacatactctaacttggacaatcaccctggcaaaattcaaactccaggaaatcctagaaatcgtcttcccaaagtttttcctggggaaacagctacaacgaaagatatcatcaagcttcatggtaaagagaaacttcctgtagattacctgccacagaggaaaagaaaagttgaaaaggagaagaaagcaaagcccacagaagcttcagatgctgaatattattttgaaaaggttgtagttcagaaggaaacaaaagatgaaaagaaagctagaaagtccgcggtaaaagaagagaagagagaagcccggaaagcaaagaaagagctcaaagaactgtataaatttgaaacacagaaggctcagaaagttgctgctgttacaggaccatcttccatacggctaatataattgtcctgtgtcatatgtaacgtgtttcctacatctgctgaactgttgaagccttgaagacagtagtccagagcaagataggcatgtcatatgtaactgctggtacctgagacatttcatgccttgcttaaggttgtcccattctctggactggaggcagtgaatgattctgcttggcattacctttttactgctgaatgtatgagttttgtgtt

SEQ ID NO: 12409 - protein, 524 aa, Triticum aestivum
  misc_feature (1)..(524): Ceres Seq. ID no. 14301588
KISPPKFPTRPFHAPTVSLSPPNPNPQTLTTAPTSSAAAAMAGAGVGGRKARNFATFRLFPRDGAADPNDRVFVRVDNNAYTIPGFGDDEDPSLSPTAAADQFPSSTSGPLPDHVRQQILELGLPDDGYNYLLHLRELRPSAVASSFVPSHTARPEQLPLDVKAYDASKVRVASGKVEEELDEGRTMCKVAAKTAPVRRVEKAVDPDVARLLDESEDEGLEEDFVIMANQAEGDDMEDESEEEGGGVFSDVENDEEFEDEEGEPKPRVPRLLDEQFDLLALEEYGASDDDDGAVRDGEHELPSEVIDELKLFHNQNVCVDEEYRTPADFVRGKLDSTTAEEVDESANVIQKCAEYAERYLNETAEDEEVLLVSESSDESEVWDCETIVSTYSNLDNHPGKIQTPGNPRNRLPKVFPGETATTKDIIKLHGKEKLPVDYLPQRKRKVEKEKKAKPTEASDAEYYFEKVVVQKETKDEKKARKSAVKEEKREARKAKKELKELYKFETQKAQKVAAVTGPSSIRLI

SEQ ID NO: 12410 - protein, 484 aa, Triticum aestivum
  misc_feature (1)..(484): Ceres Seq. ID no. 14301589
MAGAGVGGRKARNFATFRLFPRDGAADPNDRVFVRVDNNAYTIPGFGDDEDPSLSPTAAADQFPSSTSGPLPDHVRQQILELGLPDDGYNYLLHLRELRPSAVASSFVPSHTARPEQLPLDVKAYDASKVRVASGKVEEELDEGRTMCKVAAKTAPVRRVEKAVDPDVARLLDESEDEGLEEDFVIMANQAEGDDMEDESEEEGGGVFSDVENDEEFEDEEGEPKPRVPRLLDEQFDLLALEEYGASDDDDGAVRDGEHELPSEVIDELKLFHNQNVCVDEEYRTPADFVRGKLDSTTAEEVDESANVIQKCAEYAERYLNETAEDEEVLLVSESSDESEVWDCETIVSTYSNLDNHPGKIQTPGNPRNRLPKVFPGETATTKDIIKLHGKEKLPVDYLPQRKRKVEKEKKAKPTEASDAEYYFEKVVVQKETKDEKKARKSAVKEEKREARKAKKELKELYKFETQKAQKVAAVTGPSSIRLI

SEQ ID NO: 12411 - protein, 338 aa, Triticum aestivum
  misc_feature (1)..(338): Ceres Seq. ID no. 14301590
MCKVAAKTAPVRRVEKAVDPDVARLLDESEDEGLEEDFVIMANQAEGDDMEDESEEEGGGVFSDVENDEEFEDEEGEPKPRVPRLLDEQFDLLALEEYGASDDDDGAVRDGEHELPSEVIDELKLFHNQNVCVDEEYRTPADFVRGKLDSTTAEEVDESANVIQKCAEYAERYLNETAEDEEVLLVSESSDESEVWDCETIVSTYSNLDNHPGKIQTPGNPRNRLPKVFPGETATTKDIIKLHGKEKLPVDYLPQRKRKVEKEKKAKPTEASDAEYYFEKVVVQKETKDEKKARKSAVKEEKREARKAKKELKELYKFETQKAQKVAAVTGPSSIRLI

SEQ ID NO: 12412 - DNA, 1282 bp, Triticum aestivum
  misc_feature (1)..(1282): Ceres Seq. ID no. 14301595
actctctgcaaagaaagttcacgtatgtcacgcgttgatgatattctgagaaactgcatgcagctggtggatttgaggctgaaagatttaagttgtcgccaacctgcttttcatatctttggtcctaactcaaagttaaagagtctgcaattggacaactacaacactgtgggtgtctacctgggtttggtgccttatcttgaaacatttgcttgtcgtggtcagccaactatactacactatggcttggtgcctcggcttaggcatgtgagtttgaacttcttgcaaactggagatgacggcaagaatgattcctctggtagcaacaggacatatcgactaagcaaattctttttaggggcgccgccaccgctagagtgccttgttctgcagttaagagggcgtcaggtaagtagcttttcctgaaatgatctctttcatattggtcatgacattgcatcagtaagacagtactaaattatcacttcatttatgcagatgtggatggaactaaccgccattcccgaccagctcagtcatctcaagaaactattcattgcaaacgtgccaatgaactgggatacattctggattctccacctacttgctgccgcacctgccttggagtcgctccatgttcattttgacaacaactcagagaaggcgggtgccacaggatcaccagatgtgcaagtggaacaccatcagcgctactatcacctgaaagaactcgtggtcatcggcttcggcggggcggcgtggcagacaggctttgtgaagcagatcatccaggcatcgccgatcctggagcgcgtccgcctgctggacgggcacgtcgtggaggacgaagatcgggagctcgtcggcctggacattgtgcgccgccgccgggagtggcacgagtgcgagagatcggaggtgctcgacgaactgacggacgggatcagttcgccgcatctcgagatagttctggaatgactttcggcagaagtgttgctgtgccggcggtggccttccgttctgtagggcttgcagctgtatgccatggcctaatgattatgtgttatgctggctctcaagatagatcaacatgtgtttgtatcgggtatcttgcgctttacttttgctcgattatccaaaggacggatgtagctagctgttgagatgattgattccgtggtgctcatggtgtggcttgactaggcaaaattaccacttgcacgcgcctaaaagatattttcctttcctttctgatagaagcaaaaagatctgcggcatcccc

SEQ ID NO: 12413 - protein, 161 aa, Triticum aestivum
  misc_feature (1)..(161): Ceres Seq. ID no. 14301596
MQMWMELTAIPDQLSHLKKLFIANVPMNWDTFWILHLLAAAPALESLHVHFDNNSEKAGATGSPDVQVEHHQRYYHLKELVVIGFGGAAWQTGFVKQIIQASPILERVRLLDGHVVEDEDRELVGLDIVRRRREWHECERSEVLDELTDGISSPHLEIVLE

SEQ ID NO: 12414 - protein, 159 aa, Triticum aestivum
  misc_feature (1)..(159): Ceres Seq. ID no. 14301597
MWMELTAIPDQLSHLKKLFIANVPMNWDTFWILHLLAAAPALESLHVHFDNNSEKAGATGSPDVQVEHHQRYYHLKELVVIGFGGAAWQTGFVKQIIQASPILERVRLLDGHVVEDEDRELVGLDIVRRRREWHECERSEVLDELTDGISSPHLEIVLE

SEQ ID NO: 12415 - protein, 157 aa, Triticum aestivum
  misc_feature (1)..(157): Ceres Seq. ID no. 14301598
MELTAIPDQLSHLKKLFIANVPMNWDTFWILHLLAAAPALESLHVHFDNNSEKAGATGSPDVQVEHHQRYYHLKELVVIGFGGAAWQTGFVKQIIQASPILERVRLLDGHVVEDEDRELVGLDIVRRRREWHECERSEVLDELTDGISSPHLEIVLE

SEQ ID NO: 12416 - DNA, 1050 bp, Triticum aestivum
  misc_feature (1)..(1050): Ceres Seq. ID no. 14301603
gaaaccattaacaatccccaccatacacacccgcgaggctcaatcatcgcaccactggatcggcaggcaccgcagcaatggcggcagcgaccggaggcggcggcagcagtgaggaggcgctgacgctgctggggttctggacgagcccgttcgcgctgcgggcgcggttcgcgctgaacctcaagggcatcccctacgagtacgtggaggaggacctgttcggcgagcggggcaagagcccgctcctcgtcgcctccaacccggcccacggcgggaaggtgcccgtgctcatccacggcggccgccccgtcgccgagtcgctggtcatcctggagtacatcgacgaggcgttcccggagcgcctcccgcgcctcctgcccccgcccgacgacccgcacggccgcgccgccgcccggttctgggcggcctacgtcgaccagaagctgctcccgacgtgggccccgctctacggcgggaggacggccgaggagcgggcgggcgcggcgagggaggtcgtcgccgtgctggaggcgttcgagggggagctcggggacaggggcttcttcggcggggacggcgtggggctggtggacgtggcgctcggcgggttcctcgggtggctgcgcgcgtcgcaggccatgtgcggcgtgcggaccatcgaccccgccaggacgccgcggctggcggcgtgggcggagcggttcggcgcgctggacggcgtgagggagatcgtgccggacgcggcgccgctggtggagtacaacctcatgaagcgggctcgcctaggcctgccgtatcttccgccgcatcagtcgcagtaaaaaaccgctagtaaattccaaggcgtgtagctggatccatcgcgcgcaaaggaactgaactgaatttgaatctgatcccttaagccggtggattctttagttattctactgcagtagagtaacaagtctgtgttcttgtttggaactctgattttctgcgatggaccgattcaagaaatgtagccacagaactgccttctccaatggaaagaaaaaaagtagtaccatc

SEQ ID NO: 12417 - protein, 247 aa, Triticum aestivum
  misc_feature (1)..(247): Ceres Seq. ID no. 14301604
MAAATGGGGSSEEALTLLGFWTSPFALRARFALNLKGIPYEYVEEDLFGERGKSPLLVASNPAHGGKVPVLIHGGRPVAESLVILEYIDEAFPERLPRLLPPPDDPHGRAAARFWAAYVDQKLLPTWAPLYGGRTAEERAGAAREVVAVLEAFEGELGDRGFFGGDGVGLVDVALGGFLGWLRASQAMCGVRTIDPARTPRLAAWAERFGALDGVREIVPDAAPLVEYNLMKRARLGLPYLPPHQSQ

SEQ ID NO: 12418 - DNA, 640 bp, Triticum aestivum
  misc_feature (1)..(640): Ceres Seq. ID no. 14301605
ctgggtgagctagtcagtagttctccatggcggcggttgcggcgagggcgggcgcggcggcccggcggctgtgccacgcggcggcggcgcagcccccgcgcctgaagaagctcgcgctgcacccgcccaaatcggtagaggttcaatttgcagatggcagtacattccatctgtcagctgagtttctcagagtctacagcccagcagctgacagcaagatcagatcaatagctggcgagaaggttatatttgggcgccgacatgttggaattatgtcagccgaatcaataggaaactatggagtccggatactgtttgatgatttgcacaagactgggatcttcacttgggattacttgcaccatctgggttctaacaaattcagtctgtcacgaaattatatcaaaactttgaggaaacacggtcttagtcgggatcctcagagaagaaaatgatggtaagtatttgtgtgtcttaagcatgtaggtacgacggaactcaaatagggtttgcctgccatgtggatggatggagcttctacatgtgcacacaaaatctcttaattcagataacttattacatagtgtcagaaactgtgtttccatttagaatatgataatattctttacactgagttcac

SEQ ID NO: 12419 - protein, 142 aa, Triticum aestivum
  misc_feature (1)..(142): Ceres Seq. ID no. 14301606
MAAVAARAGAAARRLCHAAAAQPPRLKKLALHPPKSVEVQFADGSTFHLSAEFLRVYSPAADSKIRSIAGEKVIFGRRHVGIMSAESIGNYGVRILFDDLHKTGIFTWDYLHHLGSNKFSLSRNYIKTLRKHGLSRDPQRRK

SEQ ID NO: 12420 - DNA, 1475 bp, Triticum aestivum
  misc_feature (1)..(1475): Ceres Seq. ID no. 14301622
attcttttgttgctgccaccgcaccgctggtcatcgatcacgacttgcgtggcgaccaaagcagcagccaccaacatctgtgcataaatgcacacacgtccgtacttgagttgcctctcagcagccagagaaatagagccctgtgctagagctattgccaggagaagagagctcagctcggtagtgatcatcggcgatatggcgacgaggaggaagacggcgtgcgtcaccggcggcagcgggtacatcgcgtcggcgctggtgaagatgctgctggagaagggatacgccgtcaagaccaccgtcagaaaccccgatgacgcggagaagaacgcgcatctcaaggccttggcagcgctcggctccttggaggtcttccgcgccgatctgaacgaggagggcagcttcgaccacgccgtcgccggctgcgactacgccttcctcgtcgccgctccggtgagcctcatgccagagaaccctgagaaagacgtgatcgagccggccgtccacgggaccctgaacgtgatgaagtcgtgcgtgagagcggggacggtgaagcgagtggtcctcacatcgtcggtggcgggggtgtccagccggccgctggaaggcgacggccatgtccttgacgaggaatcctggtccgacgtggagttcctcagatcaacaaagaccggtccctgggcgtactccgtctcgaaggtgcttgtggagaaggcggcgatggcgttcgcggaggacaagggcatcagcctggtcaccgtgtgcccggccgtcacggtgggcgaggcgccggcggcgaacgacctcaccagcgtcagcatcatcctctccctgctgtccggggatgatgcgtatgccggcgccctggagcacatcgagagggcgacgggctcgatcccgattctgcacatcgaggacctctgccgagcggagatgttcgtggccgaggaggaggccgcgtcggggcggtacatcgtctgcggcctcaaccccaccgccgtcgagattgcccgcttcttggctgccaactacccgcagtacaaggtcaatacagataggttcagagatctccctgagaagccgagagtctgcatttcgtcggcgaagctcgtcaaggaagggtttgagtacaagtacaagaacctggacggaatatatggcagcgtcgtcgagtatggaagggccttgggaatccttccctactaagaagtatgatcgatcttagaatcagacgatgcgcttggaagcaaaataagccttttagtctcctgaagtacacaaatgatgaaatgtgggtgttcagttcatatgaaaaatgtattataaaatgtactgtagtacttgtatggaaagtgatagttgtgtctgatgagagcatgctcagtcatggtgaaaaaagccatagtcgtgcacgtagataaaccgccattaaaatctcccccaacgcagaagaagccttcttgttttcctcc

SEQ ID NO: 12421 - protein, 373 aa, Triticum aestivum
  misc_feature (1)..(373): Ceres Seq. ID no. 14301623
MHTRPYLSCLSAAREIEPCARAIARRRELSSVVIIGDMATRRKTACVTGGSGYIASALVKMLLEKGYAVKTTVRNPDDAEKNAHLKALAALGSLEVFRADLNEEGSFDHAVAGCDYAFLVAAPVSLMPENPEKDVIEPAVHGTLNVMKSCVRAGTVKRVVLTSSVAGVSSRPLEGDGHVLDEESWSDVEFLRSTKTGPWAYSVSKVLVEKAAMAFAEDKGISLVTVCPAVTVGEAPAANDLTSVSIILSLLSGDDAYAGALEHIERATGSIPILHIEDLCRAEMFVAEEEAASGRYIVCGLNPTAVEIARFLAANYPQYKVNTDRFRDLPEKPRVCISSAKLVKEGFEYKYKNLDGIYGSVVEYGRALGILPY

SEQ ID NO: 12422 - protein, 336 aa, Triticum aestivum
  misc_feature (1)..(336): Ceres Seq. ID no. 14301624
MATRRKTACVTGGSGYIASALVKMLLEKGYAVKTTVRNPDDAEKNAHLKALAALGSLEVFRADLNEEGSFDHAVAGCDYAFLVAAPVSLMPENPEKDVIEPAVHGTLNVMKSCVRAGTVKRVVLTSSVAGVSSRPLEGDGHVLDEESWSDVEFLRSTKTGPWAYSVSKVLVEKAAMAFAEDKGISLVTVCPAVTVGEAPAANDLTSVSIILSLLSGDDAYAGALEHIERATGSIPILHIEDLCRAEMFVAEEEAASGRYIVCGLNPTAVEIARFLAANYPQYKVNTDRFRDLPEKPRVCISSAKLVKEGFEYKYKNLDGIYGSVVEYGRALGILPY

SEQ ID NO: 12423 - protein, 313 aa, Triticum aestivum
  misc_feature (1)..(313): Ceres Seq. ID no. 14301625
MLLEKGYAVKTTVRNPDDAEKNAHLKALAALGSLEVFRADLNEEGSFDHAVAGCDYAFLVAAPVSLMPENPEKDVIEPAVHGTLNVMKSCVRAGTVKRVVLTSSVAGVSSRPLEGDGHVLDEESWSDVEFLRSTKTGPWAYSVSKVLVEKAAMAFAEDKGISLVTVCPAVTVGEAPAANDLTSVSIILSLLSGDDAYAGALEHIERATGSIPILHIEDLCRAEMFVAEEEAASGRYIVCGLNPTAVEIARFLAANYPQYKVNTDRFRDLPEKPRVCISSAKLVKEGFEYKYKNLDGIYGSVVEYGRALGILPY

SEQ ID NO: 12424 - DNA, 761 bp, Triticum aestivum
  misc_feature (1)..(761): Ceres Seq. ID no. 14301649
aaaacatagctcctctcctcctgtgcgcgctcaccgctgcacagtatccacccataagagcatataggcgcagtgcaacaggatcatcagtacgggttgcactagcttattaggctagcggctagcgagggagtaggcaggcactgcgcaggagctgatccatggcgagcacggtggagtcgccgacgagctcgtgcgtgtcgtcggacacggaggaggaggccgcggcggtgacgaagccgatggtggtggtggggtgcccgcagtgcctcatgtacgtgatgctgtcgggggcggcggaggagcagcccaggtgcccccggtgcaagagccccgtgctgctgcacttcctccacggcgctgccgccgccgccgccgccagcaccaacaggcagcagcccagcaagagctagccagccaacatgctgctgcttggtcgctgcatgctgcttgctgatcagccgctagcttctcctgccatcgatctccaccatgttctaactcgtgtattctgctgcactatgtagctcttcttttttcccttttcgtcgacgatagtaatttccatgcgagtaactctcaagaagacaagaacgcaaatcttttacagcctggtgcaattggctcggttttactctcgcttagcagtggctgtccttctccaacaacctttagatgtatgcacgtgttctgcaccgtgaaggtcgatgtctgttttaatcccctccttaatttcggtttgaataagatgagatttcacg

SEQ ID NO: 12425 - protein, 83 aa, Triticum aestivum
  misc_feature (1)..(83): Ceres Seq. ID no. 14301650
MASTVESPTSSCVSSDTEEEAAAVTKPMVVVGCPQCLMYVMLSGAAEEQPRCPRCKSPVLLHFLHGAAAAAAASTNRQQPSKS

SEQ ID NO: 12426 - protein, 56 aa, Triticum aestivum
  misc_feature (1)..(56): Ceres Seq. ID no. 14301651
MVVVGCPQCLMYVMLSGAAEEQPRCPRCKSPVLLHFLHGAAAAAAASTNRQQPSKS

SEQ ID NO: 12427 - protein, 46 aa, Triticum aestivum
  misc_feature (1)..(46): Ceres Seq. ID no. 14301652
MYVMLSGAAEEQPRCPRCKSPVLLHFLHGAAAAAAASTNRQQPSKS

SEQ ID NO: 12428 - DNA, 964 bp, Triticum aestivum
  misc_feature (1)..(964): Ceres Seq. ID no. 14301656
atttctttcttgtgatcaatctacctatctatctgcttctgcttcttcttcttcttcttcttaacactgaacgacaatgtggcttgggatctccatctccaagcaaggacaaggacaaggacaaggagcggcggctgtagcagtggtcgccatgctcggcctctgcaccatatccatacccatgtcgatgctgcctctcgccgcacccaccatccaccacgaaggaggcgctcaaggcggaagggggaacccaaacccagccaacgcgctggtggcgctggtgaacgccgaccgggcagccgccaagctacccgccctccgcaccaccaagggcctcggctgcatggcgctgcagtgcatcgcccgctgcctcgccctctcccccgccaccgcctgcgccgccgacggcacgctggcgccgccctgccacccgccggagactgacatcaccgaggtctacgccgccaactgcggggtcgagctgcccacggtcgacgtcgtctccggccgcatcctcggctgcagcagccaaagctccgacggcgtcagcggggacgcgctccacatggccaacgccaccgtggtgcgtggcagggagcacgcgcaggtgggcgccggcgtcgaccgcggcggcttctggtgcctcctcttcagcagcggcagccccaactccagcttccagctggaggccgccggcaggggcatcgcccagcagcacggctgcttcagcgaccccgacgccaccctctcctgcaccacctccgccggccaccaccaaaccagacgactcaccgccggagtcacgtcctttgccttggctgcttccactctgcttttcctcctctagtctagtctagtaatgaataagctagcagagacaccctagaagatactagtattactcggacttgtaactttgctattcaaacagtctgtcagtcagtgatgagtgtgatcatttttc

SEQ ID NO: 12429 - protein, 256 aa, Triticum aestivum
  misc_feature (1)..(256): Ceres Seq. ID no. 14301657
MWLGISISKQGQGQGQGAAAVAVVAMLGLCTISIPMSMLPLAAPTIHHEGGAQGGRGNPNPANALVALVNADRAAAKLPALRTTKGLGCMALQCIARCLALSPATACAADGTLAPPCHPPETDITEVYAANCGVELPTVDVVSGRILGCSSQSSDGVSGDALHMANATVVRGREHAQVGAGVDRGGFWCLLFSSGSPNSSFQLEAAGRGIAQQHGCFSDPDATLSCTTSAGHHQTRRLTAGVTSFALAASTLLFLL

SEQ ID NO: 12430 - protein, 231 aa, Triticum aestivum
  misc_feature (1)..(231): Ceres Seq. ID no. 14301658
MLGLCTISIPMSMLPLAAPTIHHEGGAQGGRGNPNPANALVALVNADRAAAKLPALRTTKGLGCMALQCIARCLALSPATACAADGTLAPPCHPPETDITEVYAANCGVELPTVDVVSGRILGCSSQSSDGVSGDALHMANATVVRGREHAQVGAGVDRGGFWCLLFSSGSPNSSFQLEAAGRGIAQQHGCFSDPDATLSCTTSAGHHQTRRLTAGVTSFALAASTLLFLL

SEQ ID NO: 12431 - protein, 221 aa, Triticum aestivum
  misc_feature (1)..(221): Ceres Seq. ID no. 14301659
MSMLPLAAPTIHHEGGAQGGRGNPNPANALVALVNADRAAAKLPALRTTKGLGCMALQCIARCLALSPATACAADGTLAPPCHPPETDITEVYAANCGVELPTVDVVSGRILGCSSQSSDGVSGDALHMANATVVRGREHAQVGAGVDRGGFWCLLFSSGSPNSSFQLEAAGRGIAQQHGCFSDPDATLSCTTSAGHHQTRRLTAGVTSFALAASTLLFLL

SEQ ID NO: 12432 - DNA, 954 bp, Triticum aestivum
  misc_feature (1)..(954): Ceres Seq. ID no. 14301680
agcattttgagaaaataaaattggacagagaaccatcaacccaaaaattgaggagaagcagcaggtgctccgcctctgccgccgccggtgacccgccgtagcagccgctcgccccgccgcccctgaccctcttcaatctactgttccattccaccccgacccaaaccaaacacacactaaacaccggcgccgacctctcctaggtttcgtcccatctcaccggagatggccggggcagcgtcgtcggtagcgcccgttctcgtcatctgcttgctttctcttgctctcttcctccacaggtgccggagctgtgaggctgtggagagagagaggacgttggcaatgatcaagccggatggtttgtctggcaactacaaggaaaaaatcaaggaggccatcttggggtctggatttgatatcatagaagaggcagttgtccatctggatgcagagagggcatcactcttctatgctgaacatgccgatagaagcttcttcaacagcctagtgaagtacatgacgagtggtccagtttgtgctatggttctggaaagccctgatgccatttcacgctggcgaaatttgatagggccaactgatgcaagaaaggctaaaacttcacaccctgacagcattagagcaatgtgcggcttggactctgagaaaaattgtgtgcatggttcagattcaccgcaatctgcagccagagagatttcgtttttcttcagagatgataaatctgaagcgctggaacatgacgagctgtagacaattggcatgtatcctcaaaaggcagataatttttgaagtttgatttgccccttccagctattagttgatgaaaatgtctgtacatcacatatgttgatctgacatcaaacttctccagttgatagcttcatcccttggttgccaaaggctgtgacggtgaaatcaccacagcgaaattttgtc

SEQ ID NO: 12433 - protein, 180 aa, Triticum aestivum
  misc_feature (1)..(180): Ceres Seq. ID no. 14301681
MAGAASSVAPVLVICLLSLALFLHRCRSCEAVERERTLAMIKPDGLSGNYKEKIKEAILGSGFDIIEEAVVHLDAERASLFYAEHADRSFFNSLVKYMTSGPVCAMVLESPDAISRWRNLIGPTDARKAKTSHPDSIRAMCGLDSEKNCVHGSDSPQSAAREISFFFRDDKSEALEHDEL

SEQ ID NO: 12434 - protein, 141 aa, Triticum aestivum
  misc_feature (1)..(141): Ceres Seq. ID no. 14301682
MIKPDGLSGNYKEKIKEAILGSGFDIIEEAVVHLDAERASLFYAEHADRSFFNSLVKYMTSGPVCAMVLESPDAISRWRNLIGPTDARKAKTSHPDSIRAMCGLDSEKNCVHGSDSPQSAAREISFFFRDDKSEALEHDEL

SEQ ID NO: 12435 - DNA, 595 bp, Triticum aestivum
  misc_feature (1)..(595): Ceres Seq. ID no. 14301686
aatcacaatctcaaacctcaaaccctaaaaaaataaaaaagagctacgtagaaagagacagagagaagaatgggtcgccaaaacgttattgtagtttttggcctcgtgttcttggccgtccttggcctcgccgcagctgcctcctctccgtctccttcagcgtcaccttccaaagctccatctacttccacacctgaggttgaatctccagtgtccgaggacaccattggaaccaccgacgacgatgtagctgcttctcctggtgatgatgacgtagctgtggctggtcctctaggaagtgactcgtcctacggtagcaatggaccttcaggctctgccgattctgctgacagcggcgcggcggctcttggagtttctgcggtcgttgcgggtgttacatccatcgtcggttctttcttgtttttctgaggcgtgtattttcatgagaatatcatttttgagtaaagactatttatatatatggatattgtgatgatcatgttgtaatttgtttctccttggttatgagaaccgatgtccttgaaataagctgaaaataaaactttccttagcaatataaaataaagaattacgg

SEQ ID NO: 12436 - protein, 119 aa, Triticum aestivum
  misc_feature (1)..(119): Ceres Seq. ID no. 14301687
MGRQNVIVVFGLVFLAVLGLAAAASSPSPSASPSKAPSTSTPEVESPVSEDTIGTTDDDVAASPGDDDVAVAGPLGSDSSYGSNGPSGSADSADSGAAALGVSAVVAGVTSIVGSFLFF

SEQ ID NO: 12437 - protein, 64 aa, Triticum aestivum
  misc_feature (1)..(64): Ceres Seq. ID no. 14301688
SQSQTSNPKKIKKSYVERDREKNGSPKRYCSFWPRVLGRPWPRRSCLLSVSFSVTFQSSIYFHT

SEQ ID NO: 12438 - DNA, 1877 bp, Triticum aestivum
  misc_feature (1)..(1877): Ceres Seq. ID no. 14301689
tccaattcgagatagaagcgcgggatcccctccccgcgcgccctattctgtgtggacagatccattgagaggcgcccttgattcctggctgttgtatcatggggttgctagctctgaagatgctcatgtctaggcggcgggatagcaagcatctttgcggccagattcaagcccgtaatagattggttacttcagtggttaaaagaaagatctcttcatgccaacacaataacaatcaaggttgcaagagagtggcattttcaggggcagaccttccagaggacatctggcgccatatacattccctactgccgctgcgagatgctgcccgtgttgcctgcgtatctcatgcatttttacgttcctggaaatgccatcccaacctctccttcactaggaaagcactgggcctgaatagaattccacgtcaaagtgatgtaattgcaagggatctcactatgaaagtcgaccacattctcaaaaaacactcaggcaaaggagttaagaaattcaggatcgaattacacatgccagttgatccctgctatcttaatagctggcttcagattgctgctgaactacgggttgaggaactcgccgttgttctaccttcaacctgcaatgcaaatgactacgatttcccttgtgcactttttgttgatgatgggtgtagaaacgcaatagagcatctctgccttggcggttgtgccttccatcccacagctggatttggttacttgagaaagctgcggctgttttgggtgcatattacggtggatgaattagaatgccttatttccaaatctccagctttggagcacttggcactcaagtattgctatacgatcacttacctgaagatacctagcctgctacagcatctcagctacctgatggtagctgcatgcgctaatctgcagacaatagagtgtaaagctccaaatctctccactttttacttcagtggtcgacaagttgaacttctgtttggatgttcagttcaagtgaagaccatggaaatgcgttgttctactcagtgtaacaccatttataatgcttgtgccaacctgccatccattgtgccaaatattgaaactctcagcatatcttctgttagtgaggtggtcaatataccaatcgtgcctgtaaaattcctccacctcaagtatctgtctatttctcttgaaggaaatggggctttttccccagactatgattacttttctctggtttctttgctggatgcttgtcctgtcttggaaactttcaacttgtttgtgtcacaggatcgcatgaaacacgattcggttcttggagacccgtcgtcacgtcttaggcagatgcctgaataccgccacgacaacattaagaatgtgaggattattgggttttgctctgcgaagagcatggtcgagctggcatgccatattctcgagaatgcaacatcactcgagtgccttactttggacacgatacgtgctttcagtattgacagacacattcacaaaactggtgaatgtggccacataggcaggcatatgatcagagaagcacgtaaggcgctcttggctgtcaaaagatatatcgtgggaatagttccctccacggtcaagttaaatgtcttgcagccttgcaagctatgccatgctttggctgcttagatgtggcaatatcataaatttgtaaattacattgttgactgaacactgttgcatgagttgccacttgcagcaggaatgtccaaacgggtcacttaaacaccagcgtagaagtatagggacaagcaattatggtatttgatatataaaagaagatatcaggaactatttagtattgtagctgttgatatattttcttataaaattcggtcaggattt

SEQ ID NO: 12439 - protein, 520 aa, Triticum aestivum
  misc_feature (1)..(520): Ceres Seq. ID no. 14301690
MGLLALKMLMSRRRDSKHLCGQIQARNRLVTSVVKRKISSCQHNNNQGCKRVAFSGADLPEDIWRHIHSLLPLRDAARVACVSHAFLRSWKCHPNLSFTRKALGLNRIPRQSDVIARDLTMKVDHILKKHSGKGVKKFRIELHMPVDPCYLNSWLQIAAELRVEELAVVLPSTCNANDYDFPCALFVDDGCRNAIEHLCLGGCAFHPTAGFGYLRKLRLFWVHITVDELECLISKSPALEHLALKYCYTITYLKIPSLLQHLSYLMVAACANLQTIECKAPNLSTFYFSGRQVELLFGCSVQVKTMEMRCSTQCNTIYNACANLPSIVPNIETLSISSVSEVVNIPIVPVKFLHLKYLSISLEGNGAFSPDYDYFSLVSLLDACPVLETFNLFVSQDRMKHDSVLGDPSSRLRQMPEYRHDNIKNVRIIGFCSAKSMVELACHILENATSLECLTLDTIRAFSIDRHIHKTGECGHIGRHMIREARKALLAVKRYIVGIVPSTVKLNVLQPCKLCHALAA

SEQ ID NO: 12440 - protein, 513 aa, Triticum aestivum
  misc_feature (1)..(513): Ceres Seq. ID no. 14301691
MLMSRRRDSKHLCGQIQARNRLVTSVVKRKISSCQHNNNQGCKRVAFSGADLPEDIWRHIHSLLPLRDAARVACVSHAFLRSWKCHPNLSFTRKALGLNRIPRQSDVIARDLTMKVDHILKKHSGKGVKKFRIELHMPVDPCYLNSWLQIAAELRVEELAVVLPSTCNANDYDFPCALFVDDGCRNAIEHLCLGGCAFHPTAGFGYLRKLRLFWVHITVDELECLISKSPALEHLALKYCYTITYLKIPSLLQHLSYLMVAACANLQTIECKAPNLSTFYFSGRQVELLFGCSVQVKTMEMRCSTQCNTIYNACANLPSIVPNIETLSISSVSEVVNIPIVPVKFLHLKYLSISLEGNGAFSPDYDYFSLVSLLDACPVLETFNLFVSQDRMKHDSVLGDPSSRLRQMPEYRHDNIKNVRIIGFCSAKSMVELACHILENATSLECLTLDTIRAFSIDRHIHKTGECGHIGRHMIREARKALLAVKRYIVGIVPSTVKLNVLQPCKLCHALAA

SEQ ID NO: 12441 - protein, 511 aa, Triticum aestivum
  misc_feature (1)..(511): Ceres Seq. ID no. 14301692
MSRRRDSKHLCGQIQARNRLVTSVVKRKISSCQHNNNQGCKRVAFSGADLPEDIWRHIHSLLPLRDAARVACVSHAFLRSWKCHPNLSFTRKALGLNRIPRQSDVIARDLTMKVDHILKKHSGKGVKKFRIELHMPVDPCYLNSWLQIAAELRVEELAVVLPSTCNANDYDFPCALFVDDGCRNAIEHLCLGGCAFHPTAGFGYLRKLRLFWVHITVDELECLISKSPALEHLALKYCYTITYLKIPSLLQHLSYLMVAACANLQTIECKAPNLSTFYFSGRQVELLFGCSVQVKTMEMRCSTQCNTIYNACANLPSIVPNIETLSISSVSEVVNIPIVPVKFLHLKYLSISLEGNGAFSPDYDYFSLVSLLDACPVLETFNLFVSQDRMKHDSVLGDPSSRLRQMPEYRHDNIKNVRIIGFCSAKSMVELACHILENATSLECLTLDTIRAFSIDRHIHKTGECGHIGRHMIREARKALLAVKRYIVGIVPSTVKLNVLQPCKLCHALAA

SEQ ID NO: 12442 - DNA, 892 bp, Triticum aestivum
  misc_feature (1)..(892): Ceres Seq. ID no. 14301727
aatcaaaaaaaaaaatcaaccacttcatcatcatcatcgtctcagatttcgaaaaatggcagcgaagatctcccagcttgcgtgtttctcctccaccaaccgccaattccacttccagaaccgatcgtttccaagccttaggttccgtcccgagtcttttgtagttagaagcgttgttgatgggaacagctcggaaacaccagcttctctgagctatgcagctgaggtttcgaaacctttcgttgagaaaacatctacagtggatgaaactactacgggtaaagaggttatcacagagtcggtagaggaacatgttgccacaacacagcctaaaagagcagcgaagattcatgacttctgttttggcattccttatggtggtctggttatgagtggaggattgcttggatttgcgttttcacgaaatcttacaagtttaagtactggggttctctatggtggtggccttctagctcttagtacgttgagcatgaagatttggcgacagggaaagtctagtttcccttatattctaggtcaagcagtgctttcagctgtcgtcttctggaagaacttcacatcttactctatgactaagaagctgtttcctgccgggctatttgctgtcgtcagtgctgccatgttgtgtttctattcgtacgtggtgctctctggaggaaacccacctccaaagaaacttaaaccatctgctactactagtccttcatactgaagaaacttcacataggttagattcaaagatgaagatcttctcttttggtggctcttgtgcgttgcattcctggtgtaattttatacttttgacttttgaggcaacaactgtgacctgttctttccaatgtcgtaattgaaagttttgtttaatggtgac

SEQ ID NO: 12443 - protein, 243 aa, Triticum aestivum
  misc_feature (1)..(243): Ceres Seq. ID no. 14301728
IKKKNQPLHHHHRLRFRKMAAKISQLACFSSTNRQFHFQNRSFPSLRFRPESFVVRSVVDGNSSETPASLSYAAEVSKPFVEKTSTVDETTTGKEVITESVEEHVATTQPKRAAKIHDFCFGIPYGGLVMSGGLLGFAFSRNLTSLSTGVLYGGGLLALSTLSMKIWRQGKSSFPYILGQAVLSAVVFWKNFTSYSMTKKLFPAGLFAVVSAAMLCFYSYVVLSGGNPPPKKLKPSATTSPSY

SEQ ID NO: 12444 - protein, 225 aa, Triticum aestivum
  misc_feature (1)..(225): Ceres Seq. ID no. 14301729
MAAKISQLACFSSTNRQFHFQNRSFPSLRFRPESFVVRSVVDGNSSETPASLSYAAEVSKPFVEKTSTVDETTTGKEVITESVEEHVATTQPKRAAKIHDFCFGIPYGGLVMSGGLLGFAFSRNLTSLSTGVLYGGGLLALSTLSMKIWRQGKSSFPYILGQAVLSAVVFWKNFTSYSMTKKLFPAGLFAVVSAAMLCFYSYVVLSGGNPPPKKLKPSATTSPSY

SEQ ID NO: 12445 - DNA, 740 bp, Triticum aestivum
  misc_feature (1)..(740): Ceres Seq. ID no. 14301734
cattggatctgaaagcatggaggaaatcgatatagcatacaaggaagctgcaggcggcttctcatccacaaggcctgttatagaaatgacaattccttcagtcttagataagaccatctctccaccaggtcagcatgttattaatctgtttgttcagtacacaccctacaaactgtcagaaggcagttggcaggatccggctgttagaaaatcatttgctgagagatgcttttccttgatcgatgagtatgcaccgcactttagctcatcagtgataggctatgacatgctgactccacctgatcttgaaagggagtttggcctaacagggggcaacatctttcatggcgcgatgggcttggattccctcttcctgatgaggcctgctaagggatggtcagattacagaacccctgtgaaggggctgtacctctgcggcagcggtgcgcacccaggcggcggggtgatgggtgccccgggccgcaatgctgctgccgtggttttggatgatctcaaggcaagatagatgcaattaatggaagatggaaatggcagctgacactagggtagcattttcaagcacaaggctgcaaaagcagcaccagtgtgtaatctcttgtacggaaatgcaaaccttgtcgttaagccatctggtagagaccattttgtcatgcatacttacatgataaaaaagatgagacatgagaagcattttctgaatgaattgttgcagctgttcc

SEQ ID NO: 12446 - protein, 174 aa, Triticum aestivum
  misc_feature (1)..(174): Ceres Seq. ID no. 14301735
IGSESMEEIDIAYKEAAGGFSSTRPVIEMTIPSVLDKTISPPGQHVINLFVQYTPYKLSEGSWQDPAVRKSFAERCFSLIDEYAPHFSSSVIGYDMLTPPDLEREFGLTGGNIFHGAMGLDSLFLMRPAKGWSDYRTPVKGLYLCGSGAHPGGGVMGAPGRNAAAVVLDDLKAR

SEQ ID NO: 12447 - protein, 169 aa, Triticum aestivum
  misc_feature (1)..(169): Ceres Seq. ID no. 14301736
MEEIDIAYKEAAGGFSSTRPVIEMTIPSVLDKTISPPGQHVINLFVQYTPYKLSEGSWQDPAVRKSFAERCFSLIDEYAPHFSSSVIGYDMLTPPDLEREFGLTGGNIFHGAMGLDSLFLMRPAKGWSDYRTPVKGLYLCGSGAHPGGGVMGAPGRNAAAVVLDDLKAR

SEQ ID NO: 12448 - protein, 146 aa, Triticum aestivum
  misc_feature (1)..(146): Ceres Seq. ID no. 14301737
MTIPSVLDKTISPPGQHVINLFVQYTPYKLSEGSWQDPAVRKSFAERCFSLIDEYAPHFSSSVIGYDMLTPPDLEREFGLTGGNIFHGAMGLDSLFLMRPAKGWSDYRTPVKGLYLCGSGAHPGGGVMGAPGRNAAAVVLDDLKAR

SEQ ID NO: 12449 - DNA, 711 bp, Triticum aestivum
  misc_feature (1)..(711): Ceres Seq. ID no. 14301738
agttcatctacagacaaaggcattccaacctcccactagcagaagaatttctccagttccagaaacacaagaaactaccatgacgagtgccaagacacttgctcggctggccaagaagtggcagagggtggcggctatgggaaggaagaggctcacctggtcgccatcaacgtccaaagaagaagccggagagtcgtgcagcacgccgtgctcgacagcggccggcaagggccactgcgtcgtgtacactgccgatggtgtaaggttcgaggtgcctcttacgttcctcggaacgaccatcttcagcgagctcttgaggatatcccaagaggagtttggcttcacaggtgttgacggtggcagaatcactctgccctgcgacgcatcggtgatggagtatgccatgtgcttgctcaggagaagcgcctccacagagatggaggccgcgttcctcaacaccatggtgatgccatgccactatcatgtggcgccacatctgggagttggccagcgattcggtgtatgcagctcctgattaccatctgcagagatacaggaaaatagaacaaggaaaacagtttatgtgtagcattttgatcttgctagcaaagaagcaatcaaggaagatggacctagtaagagatattgttctttcaatgtatgcatatactttgttccgaagataaatgatcgatcgcagttttttaaaat

SEQ ID NO: 12450 - protein, 177 aa, Triticum aestivum
  misc_feature (1)..(177): Ceres Seq. ID no. 14301739
VHLQTKAFQPPTSRRISPVPETQETTMTSAKTLARLAKKWQRVAAMGRKRLTWSPSTSKEEAGESCSTPCSTAAGKGHCVVYTADGVRFEVPLTFLGTTIFSELLRISQEEFGFTGVDGGRITLPCDASVMEYAMCLLRRSASTEMEAAFLNTMVMPCHYHVAPHLGVGQRFGVCSS

SEQ ID NO: 12451 - protein, 151 aa, Triticum aestivum
  misc_feature (1)..(151): Ceres Seq. ID no. 14301740
MTSAKTLARLAKKWQRVAAMGRKRLTWSPSTSKEEAGESCSTPCSTAAGKGHCVVYTADGVRFEVPLTFLGTTIFSELLRISQEEFGFTGVDGGRITLPCDASVMEYAMCLLRRSASTEMEAAFLNTMVMPCHYHVAPHLGVGQRFGVCSS

SEQ ID NO: 12452 - protein, 132 aa, Triticum aestivum
  misc_feature (1)..(132): Ceres Seq. ID no. 14301741
MGRKRLTWSPSTSKEEAGESCSTPCSTAAGKGHCVVYTADGVRFEVPLTFLGTTIFSELLRISQEEFGFTGVDGGRITLPCDASVMEYAMCLLRRSASTEMEAAFLNTMVMPCHYHVAPHLGVGQRFGVCSS

SEQ ID NO: 12453 - DNA, 1096 bp, Triticum aestivum
  misc_feature (1)..(1096): Ceres Seq. ID no. 14301761
aacacaaagtcttgcttcagtctgcgcctagtcctagcaggtcgcgaatttcgccggttctattgtttctctaattatcttcgagcagatcactagcaggcaccgacggatttggagcagctctgatctttagcggccatggtcaagaaaggaatccagtatgtcgtggtggatgccttcacggcccagccgttcaagggcaacccggcggcggtgtgcttcctggaggacgacgcggccgcccccgcgggggacgggcggtggatgcagtccgtcgccgtcgagttcaacctctcccagacggccttcttctcccgtgactcgtcctgcgcagccgacgccaccacgccgcggttccacctccgctggttcacccccgtcaccgaggtcgcgctctgcggccacgcaacgctggccaccgcccacttcctcttcacgtctgtcctcgcggagcgccatggcgtggttgagttcgcgaccaagtccggggtcctgaccgccaagaaggttcctgcaccggaggctgaggagcaggggaagctgttcattgagctggacttccccatgagtgattatgtgggttgcgatcccgccgacgagctgccgtccatcccggagacgctcaacggcgcgcccgtcgtcagtgttcacaaatcagtggccaccaacgacttcattgttgaactttcatcaggaaaagaggtcgccgatgtccttcctaacatcgaagaaataagaaagtgtgccggcagaggtgtgattgttacagcaccggcgcctgctggatcgggttatgacttcttcacacgcttcttctgcccaaaatttgggattgatgaggatcccgtatgtggcagtgcacactgtgttttggcaccctactggggtggaaagctggggaagcaaaaactgatagcgtttcaggtatctccaaggagtggggcactatacctggagctggatgttgcgaatcagcgagtgcggattcagggagaagctgttactgtcatggctgggacactcttcgcttagctagcatattgaccatccattgacttgctctatgaacttgggagaaataaatatatttgctgcc

SEQ ID NO: 12454 - protein, 297 aa, Triticum aestivum
  misc_feature (1)..(297): Ceres Seq. ID no. 14301762
MVKKGIQYVVVDAFTAQPFKGNPAAVCFLEDDAAAPAGDGRWMQSVAVEFNLSQTAFFSRDSSCAADATTPRFHLRWFTPVTEVALCGHATLATAHFLFTSVLAERHGVVEFATKSGVLTAKKVPAPEAEEQGKLFIELDFPMSDYVGCDPADELPSIPETLNGAPVVSVHKSVATNDFIVELSSGKEVADVLPNIEEIRKCAGRGVIVTAPAPAGSGYDFFTRFFCPKFGIDEDPVCGSAHCVLAPYWGGKLGKQKLIAFQVSPRSGALYLELDVANQRVRIQGEAVTVMAGTLFA

SEQ ID NO: 12455 - protein, 255 aa, Triticum aestivum
  misc_feature (1)..(255): Ceres Seq. ID no. 14301763
MQSVAVEFNLSQTAFFSRDSSCAADATTPRFHLRWFTPVTEVALCGHATLATAHFLFTSVLAERHGVVEFATKSGVLTAKKVPAPEAEEQGKLFIELDFPMSDYVGCDPADELPSIPETLNGAPVVSVHKSVATNDFIVELSSGKEVADVLPNIEEIRKCAGRGVIVTAPAPAGSGYDFFTRFFCPKFGIDEDPVCGSAHCVLAPYWGGKLGKQKLIAFQVSPRSGALYLELDVANQRVRIQGEAVTVMAGTLFA

SEQ ID NO: 12456 - protein, 155 aa, Triticum aestivum
  misc_feature (1)..(155): Ceres Seq. ID no. 14301764
MSDYVGCDPADELPSIPETLNGAPVVSVHKSVATNDFIVELSSGKEVADVLPNIEEIRKCAGRGVIVTAPAPAGSGYDFFTRFFCPKFGIDEDPVCGSAHCVLAPYWGGKLGKQKLIAFQVSPRSGALYLELDVANQRVRIQGEAVTVMAGTLFA

SEQ ID NO: 12457 - DNA, 1110 bp, Triticum aestivum
  misc_feature (1)..(1110): Ceres Seq. ID no. 14301768
tatattttgttgtccctcaacatggacaaacaaacatcatggtgtacattggagtctgttctcttctaggatctctcaccgttatgagtgtaaaggctctcggaattgcattgaagttaacattctcaggagtgaaccaattattctatcctcagacctgggcttttgctctaattgttgctacctgcgtaagcacccagataaactatctgaacaaggcactggacacctttaatacagcagttgtttcaccaatatattacgtgatgtttacctcgctaacaattatagccagtgtgataatgttcaaggattgggatcggcaaaatccaacccagattgtcacggaaatgtgtggttttgtgaccatcctttctggaacatttctccttcacaagacgaaggacatgaatgacagtactgggccgactttgtctacacgacgctcaaagcatgctagtcagactgcatttgccatcgaggttcttccactgaaatatcaagattgtgtggatgacgagaccttgccattatcacttcccaaggctgataatcactacctaatgcaagagcttcctcttagatacaaagacttgaatatcgcctgatggacattcctttgcccacatgtgctaggaacctcttagcaaagtttgccgtgcacagtttcaggcaggattggttgatgaggaactgaacttggaggttttatctcagctttgctgttggatagaatgaggttatggaaattacaagttgatagtattatccttgacaatttcaccttttataaggagaaacgagggatggtgtcaaacatgtggtcagtcaagggatggttactcgggaatacctaccagttctggaaaacaggatgaagtgtacttacatacagtggcatcatttattatactttttttcttttcatttttagacagtcaagcagttatgctgcaatttgggcttatctgatttctaggaagatgttatataggaaaaacaactcattttttttcttgtacctatatcataaattgctgcccatttaggtgccaattgttatctgtgtaattatcaattcatattttttggtagacaatcggcgagcct

SEQ ID NO: 12458 - protein, 201 aa, Triticum aestivum
  misc_feature (1)..(201): Ceres Seq. ID no. 14301769
YFVVPQHGQTNIMVYIGVCSLLGSLTVMSVKALGIALKLTFSGVNQLFYPQTWAFALIVATCVSTQINYLNKALDTFNTAVVSPIYYVMFTSLTIIASVIMFKDWDRQNPTQIVTEMCGFVTILSGTFLLHKTKDMNDSTGPTLSTRRSKHASQTAFAIEVLPLKYQDCVDDETLPLSLPKADNHYLMQELPLRYKDLNIA

SEQ ID NO: 12459 - protein, 189 aa, Triticum aestivum
  misc_feature (1)..(189): Ceres Seq. ID no. 14301770
MVYIGVCSLLGSLTVMSVKALGIALKLTFSGVNQLFYPQTWAFALIVATCVSTQINYLNKALDTFNTAVVSPIYYVMFTSLTIIASVIMFKDWDRQNPTQIVTEMCGFVTILSGTFLLHKTKDMNDSTGPTLSTRRSKHASQTAFAIEVLPLKYQDCVDDETLPLSLPKADNHYLMQELPLRYKDLNIA

SEQ ID NO: 12460 - protein, 174 aa, Triticum aestivum
  misc_feature (1)..(174): Ceres Seq. ID no. 14301771
MSVKALGIALKLTFSGVNQLFYPQTWAFALIVATCVSTQINYLNKALDTFNTAVVSPIYYVMFTSLTIIASVIMFKDWDRQNPTQIVTEMCGFVTILSGTFLLHKTKDMNDSTGPTLSTRRSKHASQTAFAIEVLPLKYQDCVDDETLPLSLPKADNHYLMQELPLRYKDLNIA

SEQ ID NO: 12461 - DNA, 1237 bp, Triticum aestivum
  misc_feature (1)..(1237): Ceres Seq. ID no. 14301782
gtattctctctttgtgtttacttgctcttaaaaattatctcacctgctgtgttgttatcagcagtatatctacctacctgtatacagccatacacatcaccagaggtttttcactgttgttgctgcacctgaatctgcaatgggtaggtccccagggccaaggagggggagtgccctgcttctgcctctgtttctcacctgcttcttctcaggggcaacgaggcgggcggagtcggcccgggagttcacgctcatcaaccagtgcaagacggaggtgtggccggcggtgacgccgggcgagagcttcgggggcggcgggtatgcgctccgtgcaggcgagtcggtggtgttcaccgcccccgtggggtggtcgggccgcgtgtggggccgcaccggctgcacctttgactcggccggcaacggcacgtgcgagacgggcgggtgcggcacgtcgctgcagtgcgaatcggcgtcgggggccgctccggcgacgctggcggagttcacgctggcggcgactgactactacgacgtgagcctggtggacggcttcaacctccccgtggtggtgaccccgaccccgacgagcgccaactggacaggctgcgccccggcggggtgcgacggtgacctgcgccggggctgcccgtcggagctggccgtgaagggcgacggggggaaggtggtggcttgccggagcgcgtgcgacgtgttcgggaccgaccagtactgctgccgtggtcagtatgccaacccggtggcctgccagccgaccttctactcgaagaagttcaaggcggcatgcccggccgcctacagctacgcctacgacgacccctcctccatcttcacccgcgcccagtcgcccgactacaccatcaccttctgctccagcaacatgaagcaatcggtgtgttcgtaccgcgacagccggcttgtctgcagcggctccggcaggagcacctcctctggtctaatgctgctgctgctgctctccagcttcgtggcattgcaatttgcaaccccagtgtgactgattggttgattaaggcctaatcatccaagagcaagctgacctgaccctcttcttgatatagttctttttggatttgttttctactatgagaaacagagagtaggtgattcatggatcaaatttctgcactgtcagacagtcagtactcagtaccatttgaatgagagttatacagagatagcataagtgaatgtttcgttc

SEQ ID NO: 12462 - protein, 297 aa, Triticum aestivum
  misc_feature (1)..(297): Ceres Seq. ID no. 14301783
MGRSPGPRRGSALLLPLFLTCFFSGATRRAESAREFTLINQCKTEVWPAVTPGESFGGGGYALRAGESVVFTAPVGWSGRVWGRTGCTFDSAGNGTCETGGCGTSLQCESASGAAPATLAEFTLAATDYYDVSLVDGFNLPVVVTPTPTSANWTGCAPAGCDGDLRRGCPSELAVKGDGGKVVACRSACDVFGTDQYCCRGQYANPVACQPTFYSKKFKAACPAAYSYAYDDPSSIFTRAQSPDYTITFCSSNMKQSVCSYRDSRLVCSGSGRSTSSGLMLLLLLSSFVALQFATPV

SEQ ID NO: 12463 - DNA, 687 bp, Triticum aestivum
  misc_feature (1)..(687): Ceres Seq. ID no. 14301796
attcgagacatctccccatgttataaatgccgtcatggaggctattgaggggatgcgagttgctctaggtgcagctgtggttctgaattattgcctccaaggccttttccatccagcaaggaaagtacgtgaagtatattggaagatctataactcgctgtatattggtgcacaagatgcacttgttgcttcttatcccgcactaggcgatgatggagacaatatcttcagccgtccagagctagccatgtttgtgtgatcaatatttacatatcctgctttgtgaagacttcacattttgaggagtatcctatgtccaggttatttctttccaagtgtgatgccgaagagtcttcttttctggatctgcgaccgggcgacgtaagggcagagcagcatgttaatttcgtcgcagctgataatatgtgaaatcaagtcgttagtagtgaagacaataaaatcacagtagcaccaatatcatcttatttatcatgtatatttggttatgatggccagcctctgctgtcaaaactctgttttagcgatgttttgtaacgctgtaaaccatcaagctctgtactatgtgtgctgtggcatgactatgtctagaatacttgcctagcttgcgttgttttgcacctttttgtgttaaacgtggactggtgttcagtttgattgaaccatagc

SEQ ID NO: 12464 - protein, 85 aa, Triticum aestivum
  misc_feature (1)..(85): Ceres Seq. ID no. 14301797
FETSPHVINAVMEAIEGMRVALGAAVVLNYCLQGLFHPARKVREVYWKIYNSLYIGAQDALVASYPALGDDGDNIFSRPELAMFV

SEQ ID NO: 12465 - protein, 74 aa, Triticum aestivum
  misc_feature (1)..(74): Ceres Seq. ID no. 14301798
MEAIEGMRVALGAAVVLNYCLQGLFHPARKVREVYWKIYNSLYIGAQDALVASYPALGDDGDNIFSRPELAMFV

SEQ ID NO: 12466 - protein, 68 aa, Triticum aestivum
  misc_feature (1)..(68): Ceres Seq. ID no. 14301799
MRVALGAAVVLNYCLQGLFHPARKVREVYWKIYNSLYIGAQDALVASYPALGDDGDNIFSRPELAMFV

SEQ ID NO: 12467 - DNA, 630 bp, Triticum aestivum
  misc_feature (1)..(630): Ceres Seq. ID no. 14301814
aaaggtcatcaattcccaagaggcaatagactctgttcaggttcagtccttgcaagcagtgagcagctcccaattggaattgcaacagcagcctttgacggcattcgcttgtccaaatgggaagaacctgatggagccaaaggatgttggctaatgtacaaggtgcatggtggccaaacttgcgagttggagtcatatgatttgatgtcagctaatgatgctcctgagagggatccaatggactgggtccttgaagggagcacagaccaaggttctacctggaatactattgatgctcggagttctgtaatcttcggcagccgtttctgtaggaaatcatttactgttgacaagagatacaaagcaaatgtacttcggtttcggtttctacgtgggagagaatctagtgccaatccaaggtttcaaataggatccatcgatttctacggggaaacacacatggcctgatcgcaggtgttaatttgtgtgtacaaaacccaacaaaaccttgttgaatcatgcacctatcatggccagtactacatgcaaccaataattgtactgattatcttggatgattgtaaattccggttctactctggaagaggttcctttcctttcaaaaaaaac

SEQ ID NO: 12468 - protein, 155 aa, Triticum aestivum
  misc_feature (1)..(155): Ceres Seq. ID no. 14301815
KGHQFPRGNRLCSGSVLASSEQLPIGIATAAFDGIRLSKWEEPDGAKGCWLMYKVHGGQTCELESYDLMSANDAPERDPMDWVLEGSTDQGSTWNTIDARSSVIFGSRFCRKSFTVDKRYKANVLRFRFLRGRESSANPRFQIGSIDFYGETHMA

SEQ ID NO: 12469 - protein, 104 aa, Triticum aestivum
  misc_feature (1)..(104): Ceres Seq. ID no. 14301816
MYKVHGGQTCELESYDLMSANDAPERDPMDWVLEGSTDQGSTWNTIDARSSVIFGSRFCRKSFTVDKRYKANVLRFRFLRGRESSANPRFQIGSIDFYGETHMA

SEQ ID NO: 12470 - protein, 87 aa, Triticum aestivum
  misc_feature (1)..(87): Ceres Seq. ID no. 14301817
MSANDAPERDPMDWVLEGSTDQGSTWNTIDARSSVIFGSRFCRKSFTVDKRYKANVLRFRFLRGRESSANPRFQIGSIDFYGETHMA

SEQ ID NO: 12471 - DNA, 562 bp, Triticum aestivum
  misc_feature (1)..(562): Ceres Seq. ID no. 14301818
caaaatatttgtaggttcgtcgtgggtaatattgagccgatcattcctggagttctgcatattgggatgggacaaccttcctcgcacgctgctcatgtacttcaccaatttcctgtcgtcctcggagggatacttccacacggtgatctgcaactcaaagtactaccagaacaccaccatcaacaatgatctccgtttcatggcgtgggacaacccccctcggacgcaccctctcaacctgacagccgagtacttcgacgcaatggcgaacagcgggctgccatttgcgcactctttcacgcgtgacgatccggtcctggatatgattgacactgagctgttgaggcgagcgcccgaccgcttcacaccaggtggatggtgcctgggtagcccggtgggtggcaaagacccctgtgcctttttcggaaggtcgtttgttctcaggccgattaaaggttcggggaagctagagaagttgttgttgaaacttttggaacctgacaacttcaggcctaaacagtgtatataacgctcctgttacatttagccagttttttttagc

SEQ ID NO: 12472 - protein, 175 aa, Triticum aestivum
  misc_feature (1)..(175): Ceres Seq. ID no. 14301819
KIFVGSSWVILSRSFLEFCILGWDNLPRTLLMYFTNFLSSSEGYFHTVICNSKYYQNTTINNDLRFMAWDNPPRTHPLNLTAEYFDAMANSGLPFAHSFTRDDPVLDMIDTELLRRAPDRFTPGGWCLGSPVGGKDPCAFFGRSFVLRPIKGSGKLEKLLLKLLEPDNFRPKQCI

SEQ ID NO: 12473 - protein, 144 aa, Triticum aestivum
  misc_feature (1)..(144): Ceres Seq. ID no. 14301820
MYFTNFLSSSEGYFHTVICNSKYYQNTTINNDLRFMAWDNPPRTHPLNLTAEYFDAMANSGLPFAHSFTRDDPVLDMIDTELLRRAPDRFTPGGWCLGSPVGGKDPCAFFGRSFVLRPIKGSGKLEKLLLKLLEPDNFRPKQCI

SEQ ID NO: 12474 - protein, 109 aa, Triticum aestivum
  misc_feature (1)..(109): Ceres Seq. ID no. 14301821
MAWDNPPRTHPLNLTAEYFDAMANSGLPFAHSFTRDDPVLDMIDTELLRRAPDRFTPGGWCLGSPVGGKDPCAFFGRSFVLRPIKGSGKLEKLLLKLLEPDNFRPKQCI

SEQ ID NO: 12475 - DNA, 884 bp, Triticum aestivum
  misc_feature (1)..(884): Ceres Seq. ID no. 14301834
catgtcaggatttactgctcgttggaaatactactttatatggtcagtctcagaagctgcaattattatatctggcctgggtttcactggttggtctgattcttctcccccaaaagccaaatgggatcgtgctataaatgttgatattctgggcgtcgagctagctggaagtgcagctcaattgccacttaagtggaatattcaagtgagcacatggctaagatactatgtgtatgagaggttaattcagaaagggaagaagcctgttttccttcagttgttgggtacacagacagtcagtgctatctggcatggactgtatccaggatatatgtttttctttgttcagtcggcgttgatgataaatggttcaaaagtcatatacagatggcaacaagctgtgagcaattcaggcctccgcactatcctgtccttactaaattgtgcatacaccatgatggtgcttaactactcatgcattggcttccaggtactgagcttccaggagaccttagcatcctacaagagtgtgtattatgtcggcacaatcgttcctattctatgcgtcttgctgggctatgtcatcaagcccgcgagacctgtgaagccgaaggctcgcaaggcagaatgaggaacagagcgaattgatctttacatagatgagttacgaagcttcaatgatgattatgtcaagatagttttcagtttacttccatctttgtgaaacaatatcaaaatttagcaaaaaggataatgtggtggctccattgtaattgaccaatcattaaaaacctgttgtttcgtcgggctgatcacccatttgttttaccacacatgcaacacatgattcttggccctaagctgtatgttattcatttaccttc

SEQ ID NO: 12476 - protein, 209 aa, Triticum aestivum
  misc_feature (1)..(209): Ceres Seq. ID no. 14301835
MSGFTARWKYYFIWSVSEAAIIISGLGFTGWSDSSPPKAKWDRAINVDILGVELAGSAAQLPLKWNIQVSTWLRYYVYERLIQKGKKPVFLQLLGTQTVSAIWHGLYPGYMFFFVQSALMINGSKVIYRWQQAVSNSGLRTILSLLNCAYTMMVLNYSCIGFQVLSFQETLASYKSVYYVGTIVPILCVLLGYVIKPARPVKPKARKAE

SEQ ID NO: 12477 - DNA, 2010 bp, Triticum aestivum
  misc_feature (1)..(2010): Ceres Seq. ID no. 14301836
aacttttttcccctcgtcgtccccacttttttttctcccactccgcccccgattctccccaatcccctctcgccgccgccaggaggcagcaccggaatcgcggcgaccgaagatcccctccgacccacgccaaggaatcccgccgatccgctcgcgcctcccggatggccctgcaccagcaccacgcggggtcggcgtccgggtcggcgtcggcgtccagctccagttcggggctgcacctgcccgcctcgcccttcggggacaccacccacaccaagctcttcgtcgggggcctcgcctgggagaccaccagcgagaggctccgccgcttctacgagcgcttcggggacatcctcgaggccgtcgtcatcaccgaccgccactccggccgctccaaaggatacggcttcgtgacgttccgcgatgccgaggcggccaccaaggcctgcgaggaaccgtcgccggtcatcgatggcaggcgggccaactgtaacctggcgtcgctaggtcgcgcccagccttccacacccctcgggcggccacgatcagctggctcctactttggtgttcctgtcccaaggggcatttatgtaggtggttatggtcagcaccgaccccttccgcttgggtactaccagtaccagggatttccggttccacaatacagttactccgcatatggcaccgactacatctatccacagggtacattaaacccatatgttggtcagcaatatgttccagtttacggtgtctcagctgcagcaaatactgctaaccaaccatttagccaattgagcccatccatttctggtgggggcaacggctatccgatgatgcatggttacagtatgccaggaaatcaatttgtgcatctcactgggtcaaacttaattaattcatccccaacaaatcgtcccaccattcaggctccctttttagtagcagcaccggttccctcccatccacacttagttgtaccagcccactcacctcagtttacacaagctagtggttcagactaaagagcaagctgaactatgcacccaacaatttataccttgaggtaactttagtttgcagcaggactaaaagaacagtgctgctgtatttgcagcacttgttcttacctggaaaaaaatcatccttgtattcataaggttgtccttatcatggttgacatatgtacctggagatcatgaactgtcccgatggatggggcggtatcgcaagagcgacggctgctcttatcagtttggcttggttaaaatcctgtcctggtgggggactgtgatcgtcgatgtctagatacagcattattgattctgtatctgacaagtcatggatatatggtggatgctggaatggagtccagcaccctgtaagtttgactaatccaaggggattagtcatgatggcactcttaagaatcagggatgagtcacgatttgatggcactgagatgagtatccatctgaagagtcgccaagttagtgtgctttagtgtcgcaaagtttgagtcttgcacaagcaaaagtcagtgtcatgatctatcactctggtttggcactaggcctattgatagccacattatggatttacaatgctccgcttgaccgtaagcaggatgttcagtttgcccaaagggtggccggagatggtcctgcgtctgtaccaatttccccttagagcttctctgcgttattacacaattattgatcagatcaaggtgcattttgatccgtgttacagttggtgtcggttcaagaaccactgttgttttgtaatatgtcccagaagttctaatttagattcatgatgccctgagcttggtagctccaagatcggagtcttgttgtacttgaataataataaatccatctgctctgagtccagtgattgggtgcctgtcataatggattttcatgaacttggtggcatgaaaagatgtactgttggtacaattgagctgtgtgttaactcaagaaaaatagtttgtgaacaatgttc

SEQ ID NO: 12478 - protein, 340 aa, Triticum aestivum
  misc_feature (1)..(340): Ceres Seq. ID no. 14301837
LFSPRRPHFFFSHSAPDSPQSPLAAARRQHRNRGDRRSPPTHAKESRRSARASRMALHQHHAGSASGSASASSSSSGLHLPASPFGDTTHTKLFVGGLAWETTSERLRRFYERFGDILEAVVITDRHSGRSKGYGFVTFRDAEAATKACEEPSPVIDGRRANCNLASLGRAQPSTPLGRPRSAGSYFGVPVPRGIYVGGYGQHRPLPLGYYQYQGFPVPQYSYSAYGTDYIYPQGTLNPYVGQQYVPVYGVSAAANTANQPFSQLSPSISGGGNGYPMMHGYSMPGNQFVHLTGSNLINSSPTNRPTIQAPFLVAAPVPSHPHLVVPAHSPQFTQASGSD

SEQ ID NO: 12479 - protein, 286 aa, Triticum aestivum
  misc_feature (1)..(286): Ceres Seq. ID no. 14301838
MALHQHHAGSASGSASASSSSSGLHLPASPFGDTTHTKLFVGGLAWETTSERLRRFYERFGDILEAVVITDRHSGRSKGYGFVTFRDAEAATKACEEPSPVIDGRRANCNLASLGRAQPSTPLGRPRSAGSYFGVPVPRGIYVGGYGQHRPLPLGYYQYQGFPVPQYSYSAYGTDYIYPQGTLNPYVGQQYVPVYGVSAAANTANQPFSQLSPSISGGGNGYPMMHGYSMPGNQFVHLTGSNLINSSPTNRPTIQAPFLVAAPVPSHPHLVVPAHSPQFTQASGSD

SEQ ID NO: 12480 - DNA, 1326 bp, Triticum aestivum
  misc_feature (1)..(1326): Ceres Seq. ID no. 14301839
tcttcgccacccgctccccgctccagaccgccgccgccgccgccgccgtgcgccatggtgaggctcaacgccgacctgatatggaagagcccgcacttcttcaacgccatcaaggagcgcgagctcgacctccgaggcaacaagatcgccatcatcgagaacatcggcgccaccgaggaccagtttgacactattgacttgtcggacaacgagattgtcaagcttgagaacttccctttcatgaatcgccttggcactctgttaatcaacaacaacagaattacacgtatcaatcccaaccttggtgagtttttacccaagatgcatactttggtgctgacgaacaatcgccttacaagtcttgcggagattgaccccctggcctctcttccaaagctgcaatttctcagcttactggataataccgtaactaagcaaccagattaccggttatatgtgatccacaaactgaagcatctgcgtttgctggacttcaagaaagtgaaacaacaggagagagctgacgcagcacaaaagttccactcaaaggaggcagaggaggcggcaaagaaggttgctgccaaagcttataccccagtagtgatggatgctcaaggtaccacaaaagaccagggccctaaagtagtcgctccaacgcctgcacaaatcacagctatcaaggctgctatcattaactcgcagacgcttgacgaagttacaaggcttgagaaggcattgagcactggccaagttcctgctgagtttgcgctccccaagcctgacaccaacatggctgaggcgtcagaggaagctgaagctgagaagatggagacagatggccaggaccaggaggaggatggggctgatgagcagaagcaagcagatgaaagcaccccgattcaggaggattgatgtcatgcatacacctgaatctgcctgttctcgtggggggatgaaaccatgtgcggcgactcggcgatctcgtgggggaattctcgactcggcgatctagtgtcagtatattgattgatgtatcctgtggatgctaacaacgcttttcagtacatggtactgttgtccgagtcgaggaaggtttacgcccaggggacctagatgtgttggatgttttagaagacgatgcgttgcgcgctgaatgaatgttgctgagactctactcccgcggtgtgtcgacaacgccgacttgcttgggctccattgttgttaaatttgctacgctacctattgatagatggtttttcttggaatttggatcttgctggggttgtaattcatcaggagaggatgtatctccatcagatttttggt

SEQ ID NO: 12481 - protein, 303 aa, Triticum aestivum
  misc_feature (1)..(303): Ceres Seq. ID no. 14301840
SSPPAPRSRPPPPPPPCAMVRLNADLIWKSPHFFNAIKERELDLRGNKIAIIENIGATEDQFDTIDLSDNEIVKLENFPFMNRLGTLLINNNRITRINPNLGEFLPKMHTLVLTNNRLTSLAEIDPLASLPKLQFLSLLDNTVTKQPDYRLYVIHKLKHLRLLDFKKVKQQERADAAQKFHSKEAEEAAKKVAAKAYTPVVMDAQGTTKDQGPKVVAPTPAQITAIKAAIINSQTLDEVTRLEKALSTGQVPAEFALPKPDTNMAEASEEAEAEKMETDGQDQEEDGADEQKQADESTPIQED

SEQ ID NO: 12482 - protein, 285 aa, Triticum aestivum
  misc_feature (1)..(285): Ceres Seq. ID no. 14301841
MVRLNADLIWKSPHFFNAIKERELDLRGNKIAIIENIGATEDQFDTIDLSDNEIVKLENFPFMNRLGTLLINNNRITRINPNLGEFLPKMHTLVLTNNRLTSLAEIDPLASLPKLQFLSLLDNTVTKQPDYRLYVIHKLKHLRLLDFKKVKQQERADAAQKFHSKEAEEAAKKVAAKAYTPVVMDAQGTTKDQGPKVVAPTPAQITAIKAAIINSQTLDEVTRLEKALSTGQVPAEFALPKPDTNMAEASEEAEAEKMETDGQDQEEDGADEQKQADESTPIQED

SEQ ID NO: 12483 - protein, 223 aa, Triticum aestivum
  misc_feature (1)..(223): Ceres Seq. ID no. 14301842
MNRLGTLLINNNRITRINPNLGEFLPKMHTLVLTNNRLTSLAEIDPLASLPKLQFLSLLDNTVTKQPDYRLYVIHKLKHLRLLDFKKVKQQERADAAQKFHSKEAEEAAKKVAAKAYTPVVMDAQGTTKDQGPKVVAPTPAQITAIKAAIINSQTLDEVTRLEKALSTGQVPAEFALPKPDTNMAEASEEAEAEKMETDGQDQEEDGADEQKQADESTPIQED

SEQ ID NO: 12484 - DNA, 604 bp, Triticum aestivum
  misc_feature (1)..(604): Ceres Seq. ID no. 14301855
gagagatgagcgggaacgaggttgagaaggccaaggctgccgccggcggcggcgtaggggagtacgggacgttccatggtccgcccagctacccgcccccgcgcccgcccgtcgggcacccgcagcccgccccgccgcccggcctccacggccatcgcgagcccaactcgcgccaccgcggcggctaccaggccgggaacgctcaagatcacgaagcaggtgcgcgtggacatagacctgaccgccttccatgctgcggtattggcatgggctggtttctattcataatcggtttctttcttggtgccatcccctggtatgtcggagcatttctgttgtggtattctagagtggattacagggagaaaccaggatatgtggcatgcacaatagcggctgtccttgctacaattgccgtcatcatcggggcaaccgctggagctcacgtttattgatgtcagtctacattgtgtcactgtacatattgtacatttcatggatgaagaaagatgtcatgtcgcgtcttctgcactgtatttgattattaactttgaaatattcaatgtatgacgaggagaaccaagtccttgttatggtcacaaat

SEQ ID NO: 12485 - protein, 150 aa, Triticum aestivum
  misc_feature (1)..(150): Ceres Seq. ID no. 14301856
EMSGNEVEKAKAAAGGGVGEYGTFHGPPSYPPPRPPVGHPQPAPPPGLHGHREPNSRHRGGYQAGNAQDHEAGARGHRPDRLPCCGIGMGWFLFIIGFFLGAIPWYVGAFLLWYSRVDYREKPGYVACTIAAVLATIAVIIGATAGAHVY

SEQ ID NO: 12486 - protein, 149 aa, Triticum aestivum
  misc_feature (1)..(149): Ceres Seq. ID no. 14301857
MSGNEVEKAKAAAGGGVGEYGTFHGPPSYPPPRPPVGHPQPAPPPGLHGHREPNSRHRGGYQAGNAQDHEAGARGHRPDRLPCCGIGMGWFLFIIGFFLGAIPWYVGAFLLWYSRVDYREKPGYVACTIAAVLATIAVIIGATAGAHVY

SEQ ID NO: 12487 - DNA, 926 bp, Triticum aestivum
  misc_feature (1)..(926): Ceres Seq. ID no. 14301874
ccgtgtctccctccctccctccctctccaccgcccccctagtctgacaccgccaaaatcccaccgcgccacgctgatggcttcgccgccgacgggacccgcggcgccggcgggcttggagagcatggaggggctcgccctcgacatcatcatcgccaaggccggcgcgcgccccgcggccgcgctcgcctgcgccagcacgcacctgcgcgccgccgtggccgaggacgccgtctggcgcagcttctgcgcccgagacctcggcctcgacgcgcccctcgaccccgaggaccgcccgctcccctccttcaaggtacgtgcatctgctgtctttgtgccagaacatcctcgtcgggggcatttgggcacacatctgtacagctattccatccgcctgtcagttcctgaggcatgcatgctaggtggggtttacttttcttcctgccagcttcactcacgccactggatcatccgatgtaaagacacggttgtttcggatatgcatggggaaggtgttattggggagcaccctttacttttaccagggcaggacgagtttgtctatgagagctgcacgccgctgaatggcagtagtggatctgtggagggctcttttacatttgtgcctgggaggttgacccagccagaaggaaaaccattcgacgtcacggtggctccgttccctctggaagtacccgactacatcttctgagcatagtatgtgcacctaataacagtgtagtatcttggtagaaacaccgaacatatctctagtactctgtctgctgtagcaaagttgctctgcctggagttgatcttgtcgatgtaatgttaactaaaggacgcaaatggttgtcgtgcgccgaccttcttccggttcctggctgtggccctaaaggaatctgtagcaggtggagcttgtttgtt

SEQ ID NO: 12488 - protein, 236 aa, Triticum aestivum
  misc_feature (1)..(236): Ceres Seq. ID no. 14301875
PCLPPSLPLHRPPSLTPPKSHRATLMASPPTGPAAPAGLESMEGLALDIIIAKAGARPAAALACASTHLRAAVAEDAVWRSFCARDLGLDAPLDPEDRPLPSFKVRASAVFVPEHPRRGHLGTHLYSYSIRLSVPEACMLGGVYFSSCQLHSRHWIIRCKDTVVSDMHGEGVIGEHPLLLPGQDEFVYESCTPLNGSSGSVEGSFTFVPGRLTQPEGKPFDVTVAPFPLEVPDYIF

SEQ ID NO: 12489 - protein, 211 aa, Triticum aestivum
  misc_feature (1)..(211): Ceres Seq. ID no. 14301876
MASPPTGPAAPAGLESMEGLALDIIIAKAGARPAAALACASTHLRAAVAEDAVWRSFCARDLGLDAPLDPEDRPLPSFKVRASAVFVPEHPRRGHLGTHLYSYSIRLSVPEACMLGGVYFSSCQLHSRHWIIRCKDTVVSDMHGEGVIGEHPLLLPGQDEFVYESCTPLNGSSGSVEGSFTFVPGRLTQPEGKPFDVTVAPFPLEVPDYIF

SEQ ID NO: 12490 - protein, 195 aa, Triticum aestivum
  misc_feature (1)..(195): Ceres Seq. ID no. 14301877
MEGLALDIIIAKAGARPAAALACASTHLRAAVAEDAVWRSFCARDLGLDAPLDPEDRPLPSFKVRASAVFVPEHPRRGHLGTHLYSYSIRLSVPEACMLGGVYFSSCQLHSRHWIIRCKDTVVSDMHGEGVIGEHPLLLPGQDEFVYESCTPLNGSSGSVEGSFTFVPGRLTQPEGKPFDVTVAPFPLEVPDYIF

SEQ ID NO: 12491 - DNA, 797 bp, Triticum aestivum
  misc_feature (1)..(797): Ceres Seq. ID no. 14301890
actcacacacacacaaccagtaccagatccacaagccagcagaaaggaagaagatgatgagcaccaaggccctcaccctcggcgcggtcgtcgtcctcgccatcgccatggcgggcgcgcacgccgagcagtgcggccacgcggccgacggcatggagtgcccaaacaacctctgctgcagcgcgtgggggtactgcggcatggacgccaactactgcggcgacggctgccagagcggcgcctgctacgagcccaaacgctgcggcgcccaggccgaggggaacgcggtgacgtgccccaacaaccactgctgcagcggcaacgggtactgcggctacggccaggagtactgcggcgacggctgccagaacgggccatgccgcgccaacatcaagtgcagcgccgacaagccgtgcctgagcaacttctgctgcagcaagtacggatactgcgggctcggcgtcgagttctgcggccagggctgccagagcggcgcctgccatgacgccgttggcgccgccgccctgccgctcagctccatagtgcaggggtgatcttgaactgcgcatggctacaagtattgcgacgggatcaggtgaggagatgagttgtggcaatgtcgatcgttgccacgtcttcttcaccggctagtttgcgttttcctcgtctttacaatcgttcccatcatgcatgcacgcatgcatgattagcgttcgggaaccacaaataatgcgtgtggcgccatgcgccgtctttgtaacctttgtaatccaataaatctgaatctcgttgcaatc

SEQ ID NO: 12492 - protein, 183 aa, Triticum aestivum
  misc_feature (1)..(183): Ceres Seq. ID no. 14301891
SHTHNQYQIHKPAERKKMMSTKALTLGAVVVLAIAMAGAHAEQCGHAADGMECPNNLCCSAWGYCGMDANYCGDGCQSGACYEPKRCGAQAEGNAVTCPNNHCCSGNGYCGYGQEYCGDGCQNGPCRANIKCSADKPCLSNFCCSKYGYCGLGVEFCGQGCQSGACHDAVGAAALPLSSIVQG

SEQ ID NO: 12493 - protein, 167 aa, Triticum aestivum
  misc_feature (1)..(167): Ceres Seq. ID no. 14301892
LTHTQPVPDPQASRKEEDDEHQGPHPRRGRRPRHRHGGRARRAVRPRGRRHGVPKQPLLQRVGVLRHGRQLLRRRLPERRLLRAQTLRRPGRGERGDVPQQPLLQRQRVLRLRPGVLRRRLPERAMPRQHQVQRRQAVPEQLLLQQVRILRARRRVLRPGLPERRLP

SEQ ID NO: 12494 - protein, 166 aa, Triticum aestivum
  misc_feature (1)..(166): Ceres Seq. ID no. 14301893
MMSTKALTLGAVVVLAIAMAGAHAEQCGHAADGMECPNNLCCSAWGYCGMDANYCGDGCQSGACYEPKRCGAQAEGNAVTCPNNHCCSGNGYCGYGQEYCGDGCQNGPCRANIKCSADKPCLSNFCCSKYGYCGLGVEFCGQGCQSGACHDAVGAAALPLSSIVQG

SEQ ID NO: 12495 - DNA, 1266 bp, Triticum aestivum
  misc_feature (1)..(1266): Ceres Seq. ID no. 14301898
cactccacatcccactccaaagctttgcttggctctcccgtacctgacctctccttccatcgaggcaatcccagtgctcctcctcccctctatcgtccatggactgctctagttccaaagagacgccaccgcacaaggcgtggtggaccggcgagacggtggcggtggtgacgggggccaaccgtggcattgggcacgcgctggccgcgcgcctggcggagcaggggctgtccgtggtgctcacggcgcgggacgaggcccgcggggaggccgccgccgccgagctccgcgccaggggtctcccgtccgtgcggttccgccgcctcgacgtcaccgactccgcctctgtcgccgccttcgcctcctggatccgcgacgatgtcggcggcctcgacattctggtgaacaatgccggggtatcgttcaacgagatcgacaccaactcggtggagcatgctgagacggtcctcaagaccaacttttacggagccaagatgctcatcgaggcgctcctgccccttttccgtcgatcctctgggaccagccggatcctgaacctcagctcccagcttggccttctcaataaggtgagggacccgtcgttgaggagcatgctgctggacgagggcaggctgacggagcagcaggtcgaggccatggcgtcgcggttcctggcgcaggtgaaggacgggacgtggcaggaccacgggtggccggccgtgtggacggactacgcggtctccaagctggccctcaacgcctactcccgcctcctcgccgcgcggctgcggggggccgtagctgtcaactgcttctgccccgggttcacgcggacagacatgacgcgggggtggggcaagcgcaccgccgaggaggccggccgcgtcgccgcggggctcgcgctgctgccccccgccgacctccccacaggcaagttcttcaagtggtccacgccgcagctctactccaagctctgacgacgacaccgcgcgctgcatggcggagctgtgcgtagctgcacgcttacgatttggcaagaaaaagatggccgtttgtcccaaaatgcaactccatctcctcaccaagcttgatgcctccgaactatcacgcccgtacagttctcgaagattcgtgctcgtcttttgacaggatagcctatcaccctccactttgtagaacagagcatgtagaaacaaaaaagctctcctcccttcctgctgtaacagagcatgtaccacaaataattcttaattgtgtttacaaagt

SEQ ID NO: 12496 - protein, 292 aa, Triticum aestivum
  misc_feature (1)..(292): Ceres Seq. ID no. 14301899
MDCSSSKETPPHKAWWTGETVAVVTGANRGIGHALAARLAEQGLSVVLTARDEARGEAAAAELRARGLPSVRFRRLDVTDSASVAAFASWIRDDVGGLDILVNNAGVSFNEIDTNSVEHAETVLKTNFYGAKMLIEALLPLFRRSSGTSRILNLSSQLGLLNKVRDPSLRSMLLDEGRLTEQQVEAMASRFLAQVKDGTWQDHGWPAVWTDYAVSKLALNAYSRLLAARLRGAVAVNCFCPGFTRTDMTRGWGKRTAEEAGRVAAGLALLPPADLPTGKFFKWSTPQLYSKL

SEQ ID NO: 12497 - protein, 160 aa, Triticum aestivum
  misc_feature (1)..(160): Ceres Seq. ID no. 14301900
MLIEALLPLFRRSSGTSRILNLSSQLGLLNKVRDPSLRSMLLDEGRLTEQQVEAMASRFLAQVKDGTWQDHGWPAVWTDYAVSKLALNAYSRLLAARLRGAVAVNCFCPGFTRTDMTRGWGKRTAEEAGRVAAGLALLPPADLPTGKFFKWSTPQLYSKL

SEQ ID NO: 12498 - DNA, 820 bp, Triticum aestivum
  misc_feature (1)..(820): Ceres Seq. ID no. 14301905
ttccccatctcaggcacacaagccctaaacccgtgcatggcattccccgcctctcgccgtctctccgccgccgccgctccgaaactctcctccctcttcacgcccggacccactcctaagcctcgcccgctgccgccggagtccggcgatgatcctaggcggcggaagccgaggccgagatcaaggcacccgtggggggaggatgcggcagcgcttctccggcggcttcacgaggggcgatacctgccgggaccctacctcccggatgcgccgcatgtagtatcccccgacgctgtcaaggccgccgccgagcggttcggcaacgatcaccaggtcgtcgccaaatggttgtcgggaagtgacttgaagaaggtagcattgtttggctgcccatctgttgagcgaagaacagtttttgcatcaaaaagattacgagctttcttcaacttgccagaagagaaagtatgcagctcttgcaagataagaagttcatgccagtttattaaccaggaggtgcctaggtatgataaagtgatcttgtcagatactatgaggatccttgctttgtttgtactggatgcatatcctgagccactacaggttactgctgaagtaaaagctagtgtccgcaaacttctcaaggacaccataaatctaagcatttaagtgctttgaggataattcgtaatcagtggaggtactatgtacatgtcaggtagatttaggttcattttcccactcttaattttcttttgtgcctcaagcattgtaacatgacctgaagcaactaatagagtgatggccacatttatttgatgtt

SEQ ID NO: 12499 - protein, 221 aa, Triticum aestivum
  misc_feature (1)..(221): Ceres Seq. ID no. 14301906
FPISGTQALNPCMAFPASRRLSAAAAPKLSSLFTPGPTPKPRPLPPESGDDPRRRKPRPRSRHPWGEDAAALLRRLHEGRYLPGPYLPDAPHVVSPDAVKAAAERFGNDHQVVAKWLSGSDLKKVALFGCPSVERRTVFASKRLRAFFNLPEEKVCSSCKIRSSCQFINQEVPRYDKVILSDTMRILALFVLDAYPEPLQVTAEVKASVRKLLKDTINLSI

SEQ ID NO: 12500 - protein, 209 aa, Triticum aestivum
  misc_feature (1)..(209): Ceres Seq. ID no. 14301907
MAFPASRRLSAAAAPKLSSLFTPGPTPKPRPLPPESGDDPRRRKPRPRSRHPWGEDAAALLRRLHEGRYLPGPYLPDAPHVVSPDAVKAAAERFGNDHQVVAKWLSGSDLKKVALFGCPSVERRTVFASKRLRAFFNLPEEKVCSSCKIRSSCQFINQEVPRYDKVILSDTMRILALFVLDAYPEPLQVTAEVKASVRKLLKDTINLSI

SEQ ID NO: 12501 - DNA, 1583 bp, Triticum aestivum
  misc_feature (1)..(1583): Ceres Seq. ID no. 14301928
caaaccctcgcaaaccccgtgctcactcaccaatcaccatggcgtccctcctgcgccgccgccacccccacccctccgccgtctccgcccacctcctccgccgcctctccgcgctcccggacgtcgatccttcgccagcctccggccccgcccgcgcggcggcccgcgcctccatcatcgatctccagctcgccgtccgcgcggagaccgacccggaccgcgtccactccctcgtcgcctccgcgctctccagccccgactaccaccgtctccacacctcgcgcgacctcttctccctcgccgcctcccgcctcgaccgcctccaccgccccgacctcgccgcctccctcctcgaccagctcctcgcctccgccccggtctcccccggcctcctcgcgcgcgccatctccctcttcccgggcccgaacgacgccgtccgtgccttctcctcctccgcccccgccgcccgctccgatgtctccctctccgccctcctctccgcgcttctacgcgcgggccgcatcgacgacctcaagtcaaccttcaaatccgctgagtcctctctcggcgtcgcccctggctgcgcctcccacaacgtgctcctccacgctctggtcaagagctctgagctcccggccgcccgcaagctgctcaacgaaatggccaagaagaagtttaagcatcgcccgcccccggacatcatatcttacaatactctcctcgctgggttctccgagcaggacgatgccgaggagtttgagaagctgctcaaggaaatcaatgagaacaagctggagcctaatgtcgtcacgtacaattgccggatgcgttggtttgcaaggaagggggaaaccttcaagggcgaggagctgctcgatgtgatggagtcaaaaggcgtgctgcccaattacgttacttacaatgcgcttgtgcagggctactgcaaggaggggaatgtcggggccgccatgcgagtattcaagaggatgaaggtgatgaagaggcgggaggggaggagtgacttgggagtgtcggtgcactcgcagacgtatgtcctgctgtgtaagagtttggtagagaagggaaggcttgatgatgccctgtggctttgtaacagctgctttgcaatgaaggcagcgccatcatttgaggctgtcaagggtttagtcgaggggttggtcaagggagggaggtctgcagaggcgaagggtgttgttgccaagatgaactttcttgtgaaaggggatgctaaagttgcttgggagaagattgctggtgaattatctcttgaagagggatcaccaagttcagatccatgatttgttggaggcatgcaagtcagttctgatttattcaagtgttttggcctttgaataacgttgatgaacaagaagggcattcacatgggttctagtattgtcttcatgggcctatctttcaaggtccaatagttagatcagagtgtaatgtctctataaggcagaatggtcagtgccatttcataatcccttttctgtaagagcttcttctattttgttgccttttggtaatacttaaaaagatattgcatttgttgaagtgct

SEQ ID NO: 12502 - protein, 438 aa, Triticum aestivum
  misc_feature (1)..(438): Ceres Seq. ID no. 14301929
NPRKPRAHSPITMASLLRRRHPHPSAVSAHLLRRLSALPDVDPSPASGPARAAARASIIDLQLAVRAETDPDRVHSLVASALSSPDYHRLHTSRDLFSLAASRLDRLHRPDLAASLLDQLLASAPVSPGLLARAISLFPGPNDAVRAFSSSAPAARSDVSLSALLSALLRAGRIDDLKSTFKSAESSLGVAPGCASHNVLLHALVKSSELPAARKLLNEMAKKKFKHRPPPDIISYNTLLAGFSEQDDAEEFEKLLKEINENKLEPNVVTYNCRMRWFARKGETFKGEELLDVMESKGVLPNYVTYNALVQGYCKEGNVGAAMRVFKRMKVMKRREGRSDLGVSVHSQTYVLLCKSLVEKGRLDDALWLCNSCFAMKAAPSFEAVKGLVEGLVKGGRSAEAKGVVAKMNFLVKGDAKVAWEKIAGELSLEEGSPSSDP

SEQ ID NO: 12503 - protein, 426 aa, Triticum aestivum
  misc_feature (1)..(426): Ceres Seq. ID no. 14301930
MASLLRRRHPHPSAVSAHLLRRLSALPDVDPSPASGPARAAARASIIDLQLAVRAETDPDRVHSLVASALSSPDYHRLHTSRDLFSLAASRLDRLHRPDLAASLLDQLLASAPVSPGLLARAISLFPGPNDAVRAFSSSAPAARSDVSLSALLSALLRAGRIDDLKSTFKSAESSLGVAPGCASHNVLLHALVKSSELPAARKLLNEMAKKKFKHRPPPDIISYNTLLAGFSEQDDAEEFEKLLKEINENKLEPNVVTYNCRMRWFARKGETFKGEELLDVMESKGVLPNYVTYNALVQGYCKEGNVGAAMRVFKRMKVMKRREGRSDLGVSVHSQTYVLLCKSLVEKGRLDDALWLCNSCFAMKAAPSFEAVKGLVEGLVKGGRSAEAKGVVAKMNFLVKGDAKVAWEKIAGELSLEEGSPSSDP

SEQ ID NO: 12504 - protein, 293 aa, Triticum aestivum
  misc_feature (1)..(293): Ceres Seq. ID no. 14301931
QTLANPVLTHQSPWRPSCAAATPTPPPSPPTSSAASPRSRTSILRQPPAPPARRPAPPSSISSSPSARRPTRTASTPSSPPRSPAPTTTVSTPRATSSPSPPPASTASTAPTSPPPSSTSSSPPPRSPPASSRAPSPSSRARTTPSVPSPPPPPPPAPMSPSPPSSPRFYARAASTTSSQPSNPLSPLSASPLAAPPTTCSSTLWSRALSSRPPASCSTKWPRRSLSIARPRTSYLTILSSLGSPSRTMPRSLRSCSRKSMRTSWSLMSSRTIAGCVGLQGRGKPSRARSCSM

SEQ ID NO: 12505 - DNA, 1414 bp, Triticum aestivum
  misc_feature (1)..(1414): Ceres Seq. ID no. 14301932
aaaaaaatttcgattcgcacactgtgcagccaaaagccgagagagagctcgagctcagctccccactccccccatccccccgaggccccaaccctaagcccctcgccgggccccaatgtcgaggccggcggccgcggccgcagcggcgctgctggttatcctcgcggcggcgggcggcgcggcggcgaagaccacgatcgagccctgctccagcgccgactcgtgcgcggcgctgctcggctactcgctctacgccgacatgaaggtctccgaggtggcggcgctcttcggcgcggacccggcggcgctgctggcggccaacgcgctcgacttcgcctcccccggcgccgccaaccggatcctccccgcggggctcctcctccgcgtccccacccgctgcgcctgcgccgacggcgtccgcaagtccgtctccgtccgctacaccgcgcgccccgccgatacgctcgccaccgtcgccgacgtcgtcttcgcgggcctcgcctccgccgaccagatccgcagcgccaacgggctcgccgaggccgacccggacgcgctgctcgacgccggccagattctcgtcgtccccttcccctgcgtctgcctcaactccaccgacaacaacctccccgccgtctacctctcctatctcgtgcgggtcggggacaccgtgcaatccatcgccgccacccacgccaccactgtcacggatctcagcaatgtgaatgccatggggagccccgtcgtggcacccggcgacatccttgcagttccattatcagcatgtgcgtctacatttcctaactttgcttcggactatggattgcttgtggcaaacgggacctatgcactaactgctggtaactgtgtagaatgcagctgtgggccaggggatctcaatctgtactgcactccagcttcattaggaacgtcatgttcaagtatgcagtgctccaatagcagtctaatgcttggtaatgtgactacccagcccaccagcggtggctgcggtgtctcgtcttgcaactatgctggcttcgttaacggaagcattaccacatcgctgtcctcgggtcttcaacctacatgccctggaccgcatcaagttcctccactcatggagccgtccaccgcggcaatccacgactcgtaccttgctccatcaccttcgccaggacctggggaggcaggtggtgctgttcccggctcgtctgaccctggagcgtcctcccattctcttgctggaagcctctcgccctcggtgcataaactgcatcaaatgatcctcattctttctctagtcttctacctgcatatgtgaattcttctgtaggaatattattggatgtatttgtatcggacggggccctcatttgggcccggtggaacctcgacggcaaggttttctggctcc

SEQ ID NO: 12506 - protein, 401 aa, Triticum aestivum
  misc_feature (1)..(401): Ceres Seq. ID no. 14301933
MSRPAAAAAAALLVILAAAGGAAAKTTIEPCSSADSCAALLGYSLYADMKVSEVAALFGADPAALLAANALDFASPGAANRILPAGLLLRVPTRCACADGVRKSVSVRYTARPADTLATVADVVFAGLASADQIRSANGLAEADPDALLDAGQILVVPFPCVCLNSTDNNLPAVYLSYLVRVGDTVQSIAATHATTVTDLSNVNAMGSPVVAPGDILAVPLSACASTFPNFASDYGLLVANGTYALTAGNCVECSCGPGDLNLYCTPASLGTSCSSMQCSNSSLMLGNVTTQPTSGGCGVSSCNYAGFVNGSITTSLSSGLQPTCPGPHQVPPLMEPSTAAIHDSYLAPSPSPGPGEAGGAVPGSSDPGASSHSLAGSLSPSVHKLHQMILILSLVFYLHM

SEQ ID NO: 12507 - protein, 353 aa, Triticum aestivum
  misc_feature (1)..(353): Ceres Seq. ID no. 14301934
MKVSEVAALFGADPAALLAANALDFASPGAANRILPAGLLLRVPTRCACADGVRKSVSVRYTARPADTLATVADVVFAGLASADQIRSANGLAEADPDALLDAGQILVVPFPCVCLNSTDNNLPAVYLSYLVRVGDTVQSIAATHATTVTDLSNVNAMGSPVVAPGDILAVPLSACASTFPNFASDYGLLVANGTYALTAGNCVECSCGPGDLNLYCTPASLGTSCSSMQCSNSSLMLGNVTTQPTSGGCGVSSCNYAGFVNGSITTSLSSGLQPTCPGPHQVPPLMEPSTAAIHDSYLAPSPSPGPGEAGGAVPGSSDPGASSHSLAGSLSPSVHKLHQMILILSLVFYLHM

SEQ ID NO: 12508 - protein, 267 aa, Triticum aestivum
  misc_feature (1)..(267): Ceres Seq. ID no. 14301935
KKISIRTLCSQKPRESSSSAPHSPHPPEAPTLSPSPGPNVEAGGRGRSGAAGYPRGGGRRGGEDHDRALLQRRLVRGAARLLALRRHEGLRGGGALRRGPGGAAGGQRARLRLPRRRQPDPPRGAPPPRPHPLRLRRRRPQVRLRPLHRAPRRYARHRRRRRLRGPRLRRPDPQRQRARRGRPGRAARRRPDSRRPLPLRLPQLHRQQPPRRLPLLSRAGRGHRAIHRRHPRHHCHGSQQCECHGEPRRGTRRHPCSSIISMCVYIS

SEQ ID NO: 12509 - DNA, 1392 bp, Triticum aestivum
  misc_feature (1)..(1392): Ceres Seq. ID no. 14301936
cacactcagaacactagctactgtcctgccattctgctccgcgcttatcttcctcagcttcccaagtctgcctaagcatcaaacgctagcacgtccaagccgagaagttccaagcatgtggaagtttcttgcagcaacggcgctgccgatcctggtctcgctgctcgccgtgcgcgcgcgcggcgtcgacgactacacggcgttcgtgtacgccgggtgctcgcaggcgcgctacgacgccggcacccagtacgccgcggacgtcgacaccgtgctctcgaccctcaccgacaccgcggcctccaccccctacgccaactacacccccccgtccggcgccgccacgggcctagtcggcctctaccagtgccgctccgacctcccggccgccgtctgcggcgtctgcgtgaaggcgtccgcctccaagctctcctccctctgcaactcggccgccggcggcgcggtgcagctgcgcgcgtgcttcgtccgctacggcaacgactcgttcctcgggaagccggacaacacggtgctgttcaagaagtgcggcggcgagagcggggacgccggcgtcgcggcgctgcgcgacgcggcgctcggagcgctccaggccgcgtcgtcccccgcggccggcggctcgtaccgcgcaggcgcggccgggtacgtgcaggccatgtcgcagtgcgtgggggacctcggcgccaaggcctgcaccgactgcgtctccgtcgccgcctcgcagctcaaggccggctgcggcgacgcctccgccggggaggtctacctcggcaagtgctacgcgcgcttctggtccaatgccggcaccggcaccggcgggaccacccccggaggaggcaacgtcatcggcggcggtaacgccggccccatcggtgacggcggcaatggcatcgctggcggaggcaatggcatcgccggcggcggcaccgtcggcgtcccgggcgcaggcagcggatacggatacgggttcgtgccgcgtccgtacggcgacgtccaagatggttccgggaagaccctcgccatcatcatcggcatcgtggcggcggcggccatcatcatcatcttcctctccttcgtccgaagagcccgcgccgccaatggcaaaagctaagctaagggttgcagcagggatggtcgccactcgccactattagctcagatttggatcggtcggtggcttttggcttcggcgttgctttagtatctctccttttatcttttatggtctcttttgccgtgccagaaaaacaaagggaggccatgccgccactgtgccgaagtagggaactgaagattccagctgcatgctactagccactaaggaaaatattactacgcaagaataagaagatatatatttgttgaagtgaccac

SEQ ID NO: 12510 - protein, 375 aa, Triticum aestivum
  misc_feature (1)..(375): Ceres Seq. ID no. 14301937
TLRTLATVLPFCSALIFLSFPSLPKHQTLARPSREVPSMWKFLAATALPILVSLLAVRARGVDDYTAFVYAGCSQARYDAGTQYAADVDTVLSTLTDTAASTPYANYTPPSGAATGLVGLYQCRSDLPAAVCGVCVKASASKLSSLCNSAAGGAVQLRACFVRYGNDSFLGKPDNTVLFKKCGGESGDAGVAALRDAALGALQAASSPAAGGSYRAGAAGYVQAMSQCVGDLGAKACTDCVSVAASQLKAGCGDASAGEVYLGKCYARFWSNAGTGTGGTTPGGGNVIGGGNAGPIGDGGNGIAGGGNGIAGGGTVGVPGAGSGYGYGFVPRPYGDVQDGSGKTLAIIIGIVAAAAIIIIFLSFVRRARAANGKS

SEQ ID NO: 12511 - protein, 337 aa, Triticum aestivum
  misc_feature (1)..(337): Ceres Seq. ID no. 14301938
MWKFLAATALPILVSLLAVRARGVDDYTAFVYAGCSQARYDAGTQYAADVDTVLSTLTDTAASTPYANYTPPSGAATGLVGLYQCRSDLPAAVCGVCVKASASKLSSLCNSAAGGAVQLRACFVRYGNDSFLGKPDNTVLFKKCGGESGDAGVAALRDAALGALQAASSPAAGGSYRAGAAGYVQAMSQCVGDLGAKACTDCVSVAASQLKAGCGDASAGEVYLGKCYARFWSNAGTGTGGTTPGGGNVIGGGNAGPIGDGGNGIAGGGNGIAGGGTVGVPGAGSGYGYGFVPRPYGDVQDGSGKTLAIIIGIVAAAAIIIIFLSFVRRARAANGKS

SEQ ID NO: 12512 - DNA, 1450 bp, Triticum aestivum
  misc_feature (1)..(1450): Ceres Seq. ID no. 14302059
ctttatccaccccatccaaatccccgattcctccaaccctcccagaccgcaatggccgccgccgccgccgccgccgccgagccctcctccgccgacagccgccgctacgtcgtgggctacgcgctcgcgcccaagaagcagaacagcttcatcaagccctcgctcatctcccgcgcggcggcgcgcggcgtggacctcgtccccgtcgacgacgcgcggcccctcgccgaccagggccccttcgacctcgtcatccacaagctctacggccacgactggcgcgcccagctccaggccttctccgcccgctacccctccgtccccgtcgtcgacccgccccacgccatcgaccgcctccacaaccgcatctccatgctccaggtcgtctccgagctcgacgtcccgctcaccgacgccgcctccgcctccgctgacggcgaaggccaccgccacaccttcggcatccccagccaggtcgtcgtctacgacgccgccgcgctcgccgactcgggcctcctcgccgcgctccgcttcccgctcatcgccaagcccctcgtcgccgacggcagcgccaagtcgcacaagatgtccctcgtctaccaccgagaggggctccgcaagctccgcccgccgctcgtcctgcaggagttcgtcaaccacggcggcgtcatattcaaggtttacgtcgtcggcggccacgtcacctgcgtcaagcgccgcagcctaccggacgtctccaaggagatcctcgaggacgccgccgccgagggcaccatctccttctcgcaggtatccaatctccccaatcagcgcacggccgaggagtactacgaggacatgcggctcgaggacgccgtcatgccgcccactgatttcgtcaacgagatcgcaggcgggctccgccgtgccctgggcctgcagctcttcaacttcgacatgatccgggatgttcgtgccgggaaccggtatctcgtcattgacatcaactacttccccggttacgcgaagatgcccggctacgagattgtccttactgatttcttctgggatatggttcacaaggacgacgtggccctcaaggaggaggagcagcagagcaatcatgctgttgtgaaatgagatggatttgctcggcatagcttgctcgcaaacctgcaattctttcatgtctgggggaaatgtgaggtggcaggatggttacaagactcgaggggaataacgagcaaccaattaggatggggagatggggattaacaggttctggatttacttgggtttcaaccagccgcaagcggaggacctgcaatgtaaatcctctctccttgctcctgtcataccggttgtttaggtatctttctgttcttcgtaatttgcttcacccagtttagttagaacaaaagtgggggaacagaagccaagttctgaagaagatatatttgttctggaaaac

SEQ ID NO: 12513 - protein, 372 aa, Triticum aestivum
  misc_feature (1)..(372): Ceres Seq. ID no. 14302060
LYPPHPNPRFLQPSQTAMAAAAAAAAEPSSADSRRYVVGYALAPKKQNSFIKPSLISRAAARGVDLVPVDDARPLADQGPFDLVIHKLYGHDWRAQLQAFSARYPSVPVVDPPHAIDRLHNRISMLQVVSELDVPLTDAASASADGEGHRHTFGIPSQVVVYDAAALADSGLLAALRFPLIAKPLVADGSAKSHKMSLVYHREGLRKLRPPLVLQEFVNHGGVIFKVYVVGGHVTCVKRRSLPDVSKEILEDAAAEGTISFSQVSNLPNQRTAEEYYEDMRLEDAVMPPTDFVNEIAGGLRRALGLQLFNFDMIRDVRAGNRYLVIDINYFPGYAKMPGYEIVLTDFFWDMVHKDDVALKEEEQQSNHAVVK

SEQ ID NO: 12514 - protein, 355 aa, Triticum aestivum
  misc_feature (1)..(355): Ceres Seq. ID no. 14302061
MAAAAAAAAEPSSADSRRYVVGYALAPKKQNSFIKPSLISRAAARGVDLVPVDDARPLADQGPFDLVIHKLYGHDWRAQLQAFSARYPSVPVVDPPHAIDRLHNRISMLQVVSELDVPLTDAASASADGEGHRHTFGIPSQVVVYDAAALADSGLLAALRFPLIAKPLVADGSAKSHKMSLVYHREGLRKLRPPLVLQEFVNHGGVIFKVYVVGGHVTCVKRRSLPDVSKEILEDAAAEGTISFSQVSNLPNQRTAEEYYEDMRLEDAVMPPTDFVNEIAGGLRRALGLQLFNFDMIRDVRAGNRYLVIDINYFPGYAKMPGYEIVLTDFFWDMVHKDDVALKEEEQQSNHAVVK

SEQ ID NO: 12515 - protein, 312 aa, Triticum aestivum
  misc_feature (1)..(312): Ceres Seq. ID no. 14302062
FIHPIQIPDSSNPPRPQWPPPPPPPPSPPPPTAAATSWATRSRPRSRTASSSPRSSPARRRAAWTSSPSTTRGPSPTRAPSTSSSTSSTATTGAPSSRPSPPATPPSPSSTRPTPSTASTTASPCSRSSPSSTSRSPTPPPPPLTAKATATPSASPARSSSTTPPRSPTRASSPRSASRSSPSPSSPTAAPSRTRCPSSTTERGSASSARRSSCRSSSTTAASYSRFTSSAATSPASSAAAYRTSPRRSSRTPPPRAPSPSRRYPISPISARPRSTTRTCGSRTPSCRPLISSTRSQAGSAVPWACSSSTST

SEQ ID NO: 12516 - DNA, 1762 bp, Triticum aestivum
  misc_feature (1)..(1762): Ceres Seq. ID no. 14302071
attttgtcctgtctccctatattcccagtgtctcgctgctcgttcccatatatgcacgcacctcgcgcgtggtcaccgtgtgaagtgcctctgccagagtgccggctaccaaccccgttgccccccggaagtggaacctaggataccgcggcagccgtcgatttcatggcgccggaagaagcaagcacggccaccaccggtggcccgcgccgccgccgcgtgctagtcttccctatcccgtaccagggccacatcaaccccatgttccagctcgccggcctcctccaagaccgcggctttgccgtcaccgtcttccacacccacttcaacgcccccgacccgtcccgccaccccgcctacggcttcgtccccgtccccgacggcttgccggcgggcagccccggcacggtggcggcgaccgtcgagcacatcttcgccatcaacggctcctgcgaggcgccgttccgggagcgcctggccgccctgctggaggctcctggcggcagggacgaggtcgcgtgcctggtcgcggacgcgcacctgctgaccctcatggacgtggcgcggcagcaaggcgtgccgacgctggcgctgcgcaccggcagcgccgcctgcttccgcaacttcatggccaccccgatgctctgcgacaagggctaccttccggtgagcgcggagtcgcagctggacgcgccggtgagggagctgccgccgtaccgcgtccgggacctgatggccgtcaccagcagccgccacgagcacgatctggtgtgcaagctgctggcccgggccgtcgaggcagtgagcacctcggctggattcatactcaacaccttcgacgcgctggaggccgacgacctggcggcgacccggcgggacctcgccggcgtgccggtgttcgaggtcggcccgctccacaagatctccccggcgtcgtccagcagcctcctgccgcaggaccgctcctgcctggactggctggacgcgcaagccccggcgtccgtgctgtacatcagcttcggcagcctggcgagcatgagcggcgaggacctggccgaggcggcgtggggcgtcgccaacagcaggcagccgttcctgtgggcgctccggccgggcctcgcccgcggcgccgccctgcccgacgggttcggcgcggagaccgaaggccgtggactggtcgtgggctgggcgccgcaggaggaggtgctggcgcacggcgccgtgggcgggttctggacgcacggcgggtggaactcggcgctggagggcgcgtgcgggggcgtgccgatgctctgccggccctgcttcggcgaccagatgggcaacgcgaggtacgtggagcacgtgtggcgcgcgggcatcgcgctggacggcggcgtgctcgagcggggagcggtggagcgggccgtccggaggctcatgcggagcgaggagggggaggagatgagggggcgagcccgggagctcgggagcagagcggcggaggccatcgccgagggtgggtcgtctcgccacagtgtcgacaagctggtgaaccacatcatgtcgctgtggaagtgagttccgagtactgccagtagaccgatgcttgcattttgtcctctttaaaatgtttggatcttttcatgactatataagacttcattgaaatcaccggcacaaaaccatggaagttttatttgttgatcaagtgtcctcaaaagcttccatgttttatcccttttttccaacgcaggctcaccatatatgcccgtgaatctcc

SEQ ID NO: 12517 - protein, 464 aa, Triticum aestivum
  misc_feature (1)..(464): Ceres Seq. ID no. 14302072
MAPEEASTATTGGPRRRRVLVFPIPYQGHINPMFQLAGLLQDRGFAVTVFHTHFNAPDPSRHPAYGFVPVPDGLPAGSPGTVAATVEHIFAINGSCEAPFRERLAALLEAPGGRDEVACLVADAHLLTLMDVARQQGVPTLALRTGSAACFRNFMATPMLCDKGYLPVSAESQLDAPVRELPPYRVRDLMAVTSSRHEHDLVCKLLARAVEAVSTSAGFILNTFDALEADDLAATRRDLAGVPVFEVGPLHKISPASSSSLLPQDRSCLDWLDAQAPASVLYISFGSLASMSGEDLAEAAWGVANSRQPFLWALRPGLARGAALPDGFGAETEGRGLVVGWAPQEEVLAHGAVGGFWTHGGWNSALEGACGGVPMLCRPCFGDQMGNARYVEHVWRAGIALDGGVLERGAVERAVRRLMRSEEGEEMRGRARELGSRAAEAIAEGGSSRHSVDKLVNHIMSLWK

SEQ ID NO: 12518 - protein, 432 aa, Triticum aestivum
  misc_feature (1)..(432): Ceres Seq. ID no. 14302073
MFQLAGLLQDRGFAVTVFHTHFNAPDPSRHPAYGFVPVPDGLPAGSPGTVAATVEHIFAINGSCEAPFRERLAALLEAPGGRDEVACLVADAHLLTLMDVARQQGVPTLALRTGSAACFRNFMATPMLCDKGYLPVSAESQLDAPVRELPPYRVRDLMAVTSSRHEHDLVCKLLARAVEAVSTSAGFILNTFDALEADDLAATRRDLAGVPVFEVGPLHKISPASSSSLLPQDRSCLDWLDAQAPASVLYISFGSLASMSGEDLAEAAWGVANSRQPFLWALRPGLARGAALPDGFGAETEGRGLVVGWAPQEEVLAHGAVGGFWTHGGWNSALEGACGGVPMLCRPCFGDQMGNARYVEHVWRAGIALDGGVLERGAVERAVRRLMRSEEGEEMRGRARELGSRAAEAIAEGGSSRHSVDKLVNHIMSLWK

SEQ ID NO: 12519 - protein, 335 aa, Triticum aestivum
  misc_feature (1)..(335): Ceres Seq. ID no. 14302074
MDVARQQGVPTLALRTGSAACFRNFMATPMLCDKGYLPVSAESQLDAPVRELPPYRVRDLMAVTSSRHEHDLVCKLLARAVEAVSTSAGFILNTFDALEADDLAATRRDLAGVPVFEVGPLHKISPASSSSLLPQDRSCLDWLDAQAPASVLYISFGSLASMSGEDLAEAAWGVANSRQPFLWALRPGLARGAALPDGFGAETEGRGLVVGWAPQEEVLAHGAVGGFWTHGGWNSALEGACGGVPMLCRPCFGDQMGNARYVEHVWRAGIALDGGVLERGAVERAVRRLMRSEEGEEMRGRARELGSRAAEAIAEGGSSRHSVDKLVNHIMSLWK

SEQ ID NO: 12520 - DNA, 1052 bp, Triticum aestivum
  misc_feature (1)..(1052): Ceres Seq. ID no. 14302082
ctgtctctccctgctctctgtttctccgctcctcccagatccgcgcgtgcgttcctgttcacgttcctttccggcggcgtcgtcgtcttcctccagattcgactcgacgatttcccaagcgataatggcggaggaggggcacaaggtggtgctcaacgtgtacgacctcagcaacggcctggcgcgccagctctccacctccttcctcggcaagcccatcgaggccatatggcacacgggcgtggtggtgtacggcaacgagtacttcttcgggggcgggatccaggcggcgccggcgggggccacgcagtacggccgccccgtgcgggtcgtcgacctgggcgtcacccacctcccccgcgaggtcttcgaggactacctccgcgacatcgcgccgcgctacaccgccgccacctacagcctgctcacccacaactgcaacaactttagcaacgaggtcgcgcagttcctcgtcggcgccgggatccccgactacatcctcaacctgcccaacgaggtcatgtccagccccatgggcgccatgatcatgcccatgatccagaacctcgaggccacgctcaggaacaacgccgcgccccagaccacccagttcgtgcccacgccggcctctgtctccgtgccgcagccggtggcttcggccgacaaaacccctagttctacagcagctgccgctgctagtgcggcacctgttggctcttcttccaagaaagaagaagagaagaagatcgagaagcagactccagagaaagccgccgcggcagctccggctatggctgaccctctcgggagcatgagggggaaggtgcaggaggaggtgatgagggagtttgcggcgctcatggccagtgggacactgcgggcgagcgaggccgcggcgctggccatgcgccgggtcatggagcgccacggtgacggcgccagtatgcaggcctagtggcctgaaactattttacacacgttcgatctttgatgcaattgcaaactgatgcttacttgtattgcagcatgaaactcaattttatttgtctgac

SEQ ID NO: 12521 - protein, 317 aa, Triticum aestivum
  misc_feature (1)..(317): Ceres Seq. ID no. 14302083
CLSLLSVSPLLPDPRVRSCSRSFPAASSSSSRFDSTISQAIMAEEGHKVVLNVYDLSNGLARQLSTSFLGKPIEAIWHTGVVVYGNEYFFGGGIQAAPAGATQYGRPVRVVDLGVTHLPREVFEDYLRDIAPRYTAATYSLLTHNCNNFSNEVAQFLVGAGIPDYILNLPNEVMSSPMGAMIMPMIQNLEATLRNNAAPQTTQFVPTPASVSVPQPVASADKTPSSTAAAAASAAPVGSSSKKEEEKKIEKQTPEKAAAAAPAMADPLGSMRGKVQEEVMREFAALMASGTLRASEAAALAMRRVMERHGDGASMQA

SEQ ID NO: 12522 - protein, 276 aa, Triticum aestivum
  misc_feature (1)..(276): Ceres Seq. ID no. 14302084
MAEEGHKVVLNVYDLSNGLARQLSTSFLGKPIEAIWHTGVVVYGNEYFFGGGIQAAPAGATQYGRPVRVVDLGVTHLPREVFEDYLRDIAPRYTAATYSLLTHNCNNFSNEVAQFLVGAGIPDYILNLPNEVMSSPMGAMIMPMIQNLEATLRNNAAPQTTQFVPTPASVSVPQPVASADKTPSSTAAAAASAAPVGSSSKKEEEKKIEKQTPEKAAAAAPAMADPLGSMRGKVQEEVMREFAALMASGTLRASEAAALAMRRVMERHGDGASMQA

SEQ ID NO: 12523 - DNA, 955 bp, Triticum aestivum
  misc_feature (1)..(955): Ceres Seq. ID no. 14302111
aaccaatcaactgaccaaccaccacgagccaagagccaacccacaccactctgtgtctgtactcagcgcgagctcacgggctccacaatgcctcgctccggcgctctccccctcctcgccgcgctggtcctcgccttggcggccgcggcggcggcgtcggcctcgaactcgaagggcgctccggcggccaccgacttcatccgcaagtcgtgccgcgagacgcagtacccgtcggtgtgcatgcagagcctgtcgtcgtacggcaaaccgccgccgcgcagcccgcaggagctggcgcgcgcggcgctgtcggtgagcgcggaccgcgcgcggtcggcgtcggcgtacgtggggcggatctgcgggccgggcctccgcagcggcagcggcgccaaggcgaagagcagccccgcgcgcgactgcctggagaacatggcggacagcgtgggccacctgcgcgacgcggccaaggagctggacgggagcctgggccgggccgggtcgccggcgttcaggtggcacctgagcaacgtgcagacctggtgcagcgcggcgctcaccgacgagaacacctgcctcgacgggctctcccgcggcgtggacgccggcacgcgcgccgccatccggagcaaggtcgtggaggtcgcccaggtcaccagcaacgccctggcgctcgtcaacaaggtcgggtccgggcactagcccggcccgtcccaggcccatccccactcgtttcgccttgctacgtactactacgcgcgtacgcatggcagctcgaatcctggtgctctataatcttgggtcatgtactactgtattccagtttcgatgtgttcttgctgtgctgtaaaatgtacttagctaagacaatcaattaagagtgtaattaatgataaggtggcgaaactaagccaaagtgtgtgttctcttgctagctatagcttttgattaacat

SEQ ID NO: 12524 - protein, 233 aa, Triticum aestivum
  misc_feature (1)..(233): Ceres Seq. ID no. 14302112
NQSTDQPPRAKSQPTPLCVCTQRELTGSTMPRSGALPLLAALVLALAAAAAASASNSKGAPAATDFIRKSCRETQYPSVCMQSLSSYGKPPPRSPQELARAALSVSADRARSASAYVGRICGPGLRSGSGAKAKSSPARDCLENMADSVGHLRDAAKELDGSLGRAGSPAFRWHLSNVQTWCSAALTDENTCLDGLSRGVDAGTRAAIRSKVVEVAQVTSNALALVNKVGSGH

SEQ ID NO: 12525 - protein, 204 aa, Triticum aestivum
  misc_feature (1)..(204): Ceres Seq. ID no. 14302113
MPRSGALPLLAALVLALAAAAAASASNSKGAPAATDFIRKSCRETQYPSVCMQSLSSYGKPPPRSPQELARAALSVSADRARSASAYVGRICGPGLRSGSGAKAKSSPARDCLENMADSVGHLRDAAKELDGSLGRAGSPAFRWHLSNVQTWCSAALTDENTCLDGLSRGVDAGTRAAIRSKVVEVAQVTSNALALVNKVGSGH

SEQ ID NO: 12526 - protein, 153 aa, Triticum aestivum
  misc_feature (1)..(153): Ceres Seq. ID no. 14302114
MQSLSSYGKPPPRSPQELARAALSVSADRARSASAYVGRICGPGLRSGSGAKAKSSPARDCLENMADSVGHLRDAAKELDGSLGRAGSPAFRWHLSNVQTWCSAALTDENTCLDGLSRGVDAGTRAAIRSKVVEVAQVTSNALALVNKVGSGH

SEQ ID NO: 12527 - DNA, 1620 bp, Triticum aestivum
  misc_feature (1)..(1620): Ceres Seq. ID no. 14302212
agaacatcctagtcgaaaactcatctcaccagaccgcaccaccccgcctccctcctcgtgccctccgccgccgccgcagcctctgcctcggcctcgaggcctccgcccgccacctccgcgcggccagggctcgagaggcgaccccggtctgcccgcccccgcttccggaacaccccgcccccgccgcaatgcagagcgcggcggccatcgggctcctccggccatgcgccgcgcggcccatcctcaagagccctagccccggggccgcccgcctcccggcctcccgcacggccctccgcctctccgccgccgcgccccgcgcgggcctcgtggcggcggcggggctcggccgcatcgggctcgtgccggcgtcgcctgagcaggagaagaggagcgactgcctcgtggccgccgcggccgcggggaaggcgtcggcgggcgaggaggccgtggaggaaagcggagcagcgctcgccaagacgctccagctcggcgtcttcttcgggctctggtacctcttcaacatctacttcaacatctacaacaagcaggtcctcaaggtttttccttatcccataaacatcacaacagttcagtttgctgttggaactacgatttccttgtttatgtgggccacgggtatccttaaaagaccaaagatttccggtgcacagcttcttgctatcctccctttggctattgtccataccatgggcaatcttttcaccaacatgagccttgggaaggttgcagtgtcatttacacatacaatcaaggccatggagcctttcttctcagttctactttctgcaatgttccttggcgagctgcctactccttgggttgttttgtctcttcttcctattgttggtggtgtggcattggcatctatttctgaagcttcttttaactgggctggatttttgagtgcaatggcttcaaatgtgaccttccagtcaaggaatgtcctcagcaagaagcttatgctgaagaaagaggcatctctggacaacatcaatctcttctcgattattacagtcatgtcattcttccttctagctcctgtaaccttgttgaccgaaggtgttaaggtcactcctacttatctgcagtctgctggtctgaacttacaacaagtgtacacaaggtctttgattgccgcattctgtttccatgcataccaacaggtgtcatacatgatcctcgcaagggtgtcaccagttacccattcggtaggtaactgcgtcaagcgtgtggtggtcattgttacatctgttctgttcttcaagactcctgtgtctccaatcaactctatcggaaccgcgatcgctcttgcgggagttttcctgtactcacaactgaagagacttcagcccaagcccaaggctgcttgattgcattctgttcgtcaggatcaatagagcgttgccactcttggaatcggtgctttagtttagccggacatattgggaagccttgttgagtaactagtaccgtgcaggatcatttgtaattcagtaatgagcattttgaccaggaaagttttgaaatctctttcaccgttctctacttggacgttctagttgccactttaataaaacctccgcagtttgattgtgc

SEQ ID NO: 12528 - protein, 463 aa, Triticum aestivum
  misc_feature (1)..(463): Ceres Seq. ID no. 14302213
NILVENSSHQTAPPRLPPRALRRRRSLCLGLEASARHLRAARAREATPVCPPPLPEHPAPAAMQSAAAIGLLRPCAARPILKSPSPGAARLPASRTALRLSAAAPRAGLVAAAGLGRIGLVPASPEQEKRSDCLVAAAAAGKASAGEEAVEESGAALAKTLQLGVFFGLWYLFNIYFNIYNKQVLKVFPYPINITTVQFAVGTTISLFMWATGILKRPKISGAQLLAILPLAIVHTMGNLFTNMSLGKVAVSFTHTIKAMEPFFSVLLSAMFLGELPTPWVVLSLLPIVGGVALASISEASFNWAGFLSAMASNVTFQSRNVLSKKLMLKKEASLDNINLFSIITVMSFFLLAPVTLLTEGVKVTPTYLQSAGLNLQQVYTRSLIAAFCFHAYQQVSYMILARVSPVTHSVGNCVKRVVVIVTSVLFFKTPVSPINSIGTAIALAGVFLYSQLKRLQPKPKAA

SEQ ID NO: 12529 - protein, 401 aa, Triticum aestivum
  misc_feature (1)..(401): Ceres Seq. ID no. 14302214
MQSAAAIGLLRPCAARPILKSPSPGAARLPASRTALRLSAAAPRAGLVAAAGLGRIGLVPASPEQEKRSDCLVAAAAAGKASAGEEAVEESGAALAKTLQLGVFFGLWYLFNIYFNIYNKQVLKVFPYPINITTVQFAVGTTISLFMWATGILKRPKISGAQLLAILPLAIVHTMGNLFTNMSLGKVAVSFTHTIKAMEPFFSVLLSAMFLGELPTPWVVLSLLPIVGGVALASISEASFNWAGFLSAMASNVTFQSRNVLSKKLMLKKEASLDNINLFSIITVMSFFLLAPVTLLTEGVKVTPTYLQSAGLNLQQVYTRSLIAAFCFHAYQQVSYMILARVSPVTHSVGNCVKRVVVIVTSVLFFKTPVSPINSIGTAIALAGVFLYSQLKRLQPKPKAA

SEQ ID NO: 12530 - protein, 255 aa, Triticum aestivum
  misc_feature (1)..(255): Ceres Seq. ID no. 14302215
MWATGILKRPKISGAQLLAILPLAIVHTMGNLFTNMSLGKVAVSFTHTIKAMEPFFSVLLSAMFLGELPTPWVVLSLLPIVGGVALASISEASFNWAGFLSAMASNVTFQSRNVLSKKLMLKKEASLDNINLFSIITVMSFFLLAPVTLLTEGVKVTPTYLQSAGLNLQQVYTRSLIAAFCFHAYQQVSYMILARVSPVTHSVGNCVKRVVVIVTSVLFFKTPVSPINSIGTAIALAGVFLYSQLKRLQPKPKAA

SEQ ID NO: 12531 - DNA, 1347 bp, Triticum aestivum
  misc_feature (1)..(1347): Ceres Seq. ID no. 14302247
gacaccgtgactgactcggccgtacggtatcgattcccgccggaaaaggaatcagcggcgagcgccatcgacggaagcaagtcattaggtatctagctagctcctttaagagagaaaaaaaaggagttatctagcttgctacttctaggcggaggttgagatggttcaggccggattggctcagccggccccgagcacgggggcgccggcgatggcggcagcggcggtgcacgtcgcgctcaagatcccctccggcggggggccgtatgcacgggccaagcactaccagctagtggagaaggacttggacgcttcgatcgcgtggttttggaaggcgatcgagacgggggacaaggtggacagcgcgctcaaggacatggcggtggtgatgaagcagcgcggttacctggacgacgccgtggacgccatccggtcgctgcgccacctctgcccggggaagcagtcgcaggagtccctggacaacatcctgctcgacctctacaaggccagcgggcgcaccaaggaggagatcgagctgctcaagcacaagctccgccggatctaccacggccaggccttccccgccggcaaggccaccaagcgcgcccgctcccacggccgcaagatccacgtctccgtccagcaggagacgtcccgggtgctgggcaacctcgcgtgggcctacatgcagcagcgcaacttcatggcggccgaggccgtgtaccgcaaggcgcagatggtggagcccgacgccaacaaggcctgcaacctcgcgctgtgcctcatggagcaggggcggctaggggacgccgagggggtgctcgccgacgtggtcgccggcgcgttccgcgacgggagggagagggagcacggcggcgggaaggtcgtgaggaaggcggaggagctgctggagcggatcagggcggagacgggcggcggcgagaaggaggccggggaggaggacggcgtcgaggccgacgagatggcggagctactggacatggtggccaggcagtgggccgcgccgtacaggaagagccaccggaggctgcccgtgttcgaggagatcacaccgttcggcagggagcagatggcttgctagctctagaagctcatgagaactcaatagaagctgtgagtgtgcagtagcttcaccagaatattgtgaagctcgtgagaactcaatagaagttgtgtgtgtgtgtgcagtactgcagtagcttgatcagaatggtgtgaagcgtacgtgttaatcaatgtgacatatgttctatgttggtgctcatgtatgtagatgtgttgcatgtgcagtgtacaagttctttttggcggtttcatgtgtacaac

SEQ ID NO: 12532 - protein, 313 aa, Triticum aestivum
  misc_feature (1)..(313): Ceres Seq. ID no. 14302248
MVQAGLAQPAPSTGAPAMAAAAVHVALKIPSGGGPYARAKHYQLVEKDLDASIAWFWKAIETGDKVDSALKDMAVVMKQRGYLDDAVDAIRSLRHLCPGKQSQESLDNILLDLYKASGRTKEEIELLKHKLRRIYHGQAFPAGKATKRARSHGRKIHVSVQQETSRVLGNLAWAYMQQRNFMAAEAVYRKAQMVEPDANKACNLALCLMEQGRLGDAEGVLADVVAGAFRDGREREHGGGKVVRKAEELLERIRAETGGGEKEAGEEDGVEADEMAELLDMVARQWAAPYRKSHRRLPVFEEITPFGREQMAC

SEQ ID NO: 12533 - protein, 296 aa, Triticum aestivum
  misc_feature (1)..(296): Ceres Seq. ID no. 14302249
MAAAAVHVALKIPSGGGPYARAKHYQLVEKDLDASIAWFWKAIETGDKVDSALKDMAVVMKQRGYLDDAVDAIRSLRHLCPGKQSQESLDNILLDLYKASGRTKEEIELLKHKLRRIYHGQAFPAGKATKRARSHGRKIHVSVQQETSRVLGNLAWAYMQQRNFMAAEAVYRKAQMVEPDANKACNLALCLMEQGRLGDAEGVLADVVAGAFRDGREREHGGGKVVRKAEELLERIRAETGGGEKEAGEEDGVEADEMAELLDMVARQWAAPYRKSHRRLPVFEEITPFGREQMAC

SEQ ID NO: 12534 - protein, 241 aa, Triticum aestivum
  misc_feature (1)..(241): Ceres Seq. ID no. 14302250
MAVVMKQRGYLDDAVDAIRSLRHLCPGKQSQESLDNILLDLYKASGRTKEEIELLKHKLRRIYHGQAFPAGKATKRARSHGRKIHVSVQQETSRVLGNLAWAYMQQRNFMAAEAVYRKAQMVEPDANKACNLALCLMEQGRLGDAEGVLADVVAGAFRDGREREHGGGKVVRKAEELLERIRAETGGGEKEAGEEDGVEADEMAELLDMVARQWAAPYRKSHRRLPVFEEITPFGREQMAC

SEQ ID NO: 12535 - DNA, 1645 bp, Triticum aestivum
  misc_feature (1)..(1645): Ceres Seq. ID no. 14302255
atagctctcattcatctcgtgagaaacacagtgtgatatggcgacgtcatggctcctcaggcatccttgtccactggctaggccatggaccagaacaaggaatgatataggtctccatgtgaccagcatcgcctactgctactggagatgcactaggaccagtggaggaggaagaatcatggcggatatgagtatgaacaccaccaactgcacggcagaacccgcccttctaccccaagctgatgctgccgaactagcagggggagccgaccatcctcctagacttagtaagagaagcgcgcgcactggccggggcgccgccgttgcggctaggcacgaggaggagggcactgacgacgaatggctcatgtacctggagccggcgaagctacaggtgttcgaccatctggagccttgggcggaggcgaatgtggtgccgctccttaagcccgccgaggtagcgtggcagccgacggacttgctgccggatctggcgtcgctgggcaccgacggcttccacgcggcgtgctccgacatcacagcgcgcgcggccggcctgcccgacgcgcacctcgtatgcctcgtggggaacatggtcacggaggaggcgctgccaacttaccagagcatacccaaccgcttcgaggccgtgcgcgacctcaccggctccagcggcactgcctgggcgcgctggatccgcggctggtctgccgaggagaaccggcacggcgacgtgcttaacaggtacctcttcctctccggccgcgtcgacatgcggcaggtcgagaggaccatccacaacctcatccagtccggcatggtcatgaacgctgcgcggagcccctaccacggcttcatctacgtcgccttccaggagcgtgccacctccatctctcacggcaacacagcccgtcgcgccaaggagtatggcgacgtggcgctcgcgcgcatatgcggtgccatcgcggctgacgagaagcggcacgagctggcctacacgcggatcgtggggaagctgttcgagatcgacccggacggcgccgtgcgcgcgctggcgtacatgatgcgccgccggatcgtcatgccggcgtccctcatgacagacggccgcgacggtgacctcttcgcgcactacgcggccgtggcgcagcaggccggcatttacaccgcctcggactaccgtagcattttggagcacctgataaagcagtggggggtgaaagagctggcagcggccgaactctccgacgacgggaggcgtgcgcgggactacgtgtgcgcgttgccccaaaagatccgcaggttggaggaaaaggctcacgagcgcagcggccagaaaacccagcctgcaacatcggccccgtttagctggatctttgataagcctgtcaacaacaccatggggtaatcaaattattgttgttatataccctaaatatcctttaaatcattatttctcgatcctatctttgagatgaagtattcttcatctctactttgctagtgtcggcgccagtaaaagtactttttttttctgatcgggttgaagctatgaggatggtattgtactactgtatttttgtaagttgttttatcacattctaaaaataaatacagggagagtgaaagttgtattcaaaaaaat

SEQ ID NO: 12536 - protein, 456 aa, Triticum aestivum
  misc_feature (1)..(456): Ceres Seq. ID no. 14302256
MATSWLLRHPCPLARPWTRTRNDIGLHVTSIAYCYWRCTRTSGGGRIMADMSMNTTNCTAEPALLPQADAAELAGGADHPPRLSKRSARTGRGAAVAARHEEEGTDDEWLMYLEPAKLQVFDHLEPWAEANVVPLLKPAEVAWQPTDLLPDLASLGTDGFHAACSDITARAAGLPDAHLVCLVGNMVTEEALPTYQSIPNRFEAVRDLTGSSGTAWARWIRGWSAEENRHGDVLNRYLFLSGRVDMRQVERTIHNLIQSGMVMNAARSPYHGFIYVAFQERATSISHGNTARRAKEYGDVALARICGAIAADEKRHELAYTRIVGKLFEIDPDGAVRALAYMMRRRIVMPASLMTDGRDGDLFAHYAAVAQQAGIYTASDYRSILEHLIKQWGVKELAAAELSDDGRRARDYVCALPQKIRRLEEKAHERSGQKTQPATSAPFSWIFDKPVNNTMG

SEQ ID NO: 12537 - protein, 409 aa, Triticum aestivum
  misc_feature (1)..(409): Ceres Seq. ID no. 14302257
MADMSMNTTNCTAEPALLPQADAAELAGGADHPPRLSKRSARTGRGAAVAARHEEEGTDDEWLMYLEPAKLQVFDHLEPWAEANVVPLLKPAEVAWQPTDLLPDLASLGTDGFHAACSDITARAAGLPDAHLVCLVGNMVTEEALPTYQSIPNRFEAVRDLTGSSGTAWARWIRGWSAEENRHGDVLNRYLFLSGRVDMRQVERTIHNLIQSGMVMNAARSPYHGFIYVAFQERATSISHGNTARRAKEYGDVALARICGAIAADEKRHELAYTRIVGKLFEIDPDGAVRALAYMMRRRIVMPASLMTDGRDGDLFAHYAAVAQQAGIYTASDYRSILEHLIKQWGVKELAAAELSDDGRRARDYVCALPQKIRRLEEKAHERSGQKTQPATSAPFSWIFDKPVNNTMG

SEQ ID NO: 12538 - protein, 406 aa, Triticum aestivum
  misc_feature (1)..(406): Ceres Seq. ID no. 14302258
MSMNTTNCTAEPALLPQADAAELAGGADHPPRLSKRSARTGRGAAVAARHEEEGTDDEWLMYLEPAKLQVFDHLEPWAEANVVPLLKPAEVAWQPTDLLPDLASLGTDGFHAACSDITARAAGLPDAHLVCLVGNMVTEEALPTYQSIPNRFEAVRDLTGSSGTAWARWIRGWSAEENRHGDVLNRYLFLSGRVDMRQVERTIHNLIQSGMVMNAARSPYHGFIYVAFQERATSISHGNTARRAKEYGDVALARICGAIAADEKRHELAYTRIVGKLFEIDPDGAVRALAYMMRRRIVMPASLMTDGRDGDLFAHYAAVAQQAGIYTASDYRSILEHLIKQWGVKELAAAELSDDGRRARDYVCALPQKIRRLEEKAHERSGQKTQPATSAPFSWIFDKPVNNTMG

SEQ ID NO: 12539 - DNA, 1287 bp, Triticum aestivum
  misc_feature (1)..(1287): Ceres Seq. ID no. 14302267
accgcggcccaacaatctcaccaaccggagcctagcaaactttcaacacgttggcccgctactcttctcctgtcctgtccaccagccgaaactcagagctccgagctccgcctctgactccacctccggccacggcgggcaccatggcgccaacggtggagatcaggaatctcaccttcacctacccgggaatcgacggcaagccgccgcccggagcaccgcccctcatcgaggacgtctgcttctccctcgaagccggtcagcgctgccttctcgtcggctccaacggcgcaggtaagacaacgatactgaagatactgggcgggaagcacatggtggatccgagcatggttggggtcctgggaaggtcggccttccacgacacggcgcttacctcctccggagacctctgctaccttggcggcgagtggaggcgcgatgttgcctttgccggctaccaggtgaatatacagatggacatttcggcagagaaaatgctatttggtgtcactggcgttgatcctcagagaagagatgagcttatcaagattttggatgttgaccttacctggcggatgcacaaggcatcagatggtcagaggagaagagtccagatttgcatgggacttctcaagccattcaaggttcttcttcttgatgagataacagttgatcttgatgtgttggcaagagcaaatctgttgacatatctaaagaaggaatgtgcggaacaaggtgcaacaattatctatgccacacatatcttcgatggcctggatgactggccaactcacattgtctatgttgctcatgggaagttgcaactagcgctgccattagaaaaggtgaaagaaatgagccagttatcgctcatgagaacagtagagcgctggctgaggaaagagagggacgaagacaggaggaagagaaaggagcggaaggagaaaggcctcccggcattcgacaaggtcattgaggggagcagagtagtgaacaacgggtgggcagcaggaaggctcacttcgacgatagccggggaagataacttttctttcagttcaaacagcgttcttcggtagtaatcccacactgcactttggttcttgagatgatgaataacagtcctatagcaccacactcgagggattttggcggtaacagcaacattcttgcacaaaaggaacagagaatttgacaaaccatgcacccctgctgcatgtatacgacaatgtactctgaatctatgatactgggcgtcgattattattgtttgattttttttctgcg

SEQ ID NO: 12540 - protein, 311 aa, Triticum aestivum
  misc_feature (1)..(311): Ceres Seq. ID no. 14302268
MAPTVEIRNLTFTYPGIDGKPPPGAPPLIEDVCFSLEAGQRCLLVGSNGAGKTTILKILGGKHMVDPSMVGVLGRSAFHDTALTSSGDLCYLGGEWRRDVAFAGYQVNIQMDISAEKMLFGVTGVDPQRRDELIKILDVDLTWRMHKASDGQRRRVQICMGLLKPFKVLLLDEITVDLDVLARANLLTYLKKECAEQGATIIYATHIFDGLDDWPTHIVYVAHGKLQLALPLEKVKEMSQLSLMRTVERWLRKERDEDRRKRKERKEKGLPAFDKVIEGSRVVNNGWAAGRLTSTIAGEDNFSFSSNSVLR

SEQ ID NO: 12541 - protein, 248 aa, Triticum aestivum
  misc_feature (1)..(248): Ceres Seq. ID no. 14302269
MVDPSMVGVLGRSAFHDTALTSSGDLCYLGGEWRRDVAFAGYQVNIQMDISAEKMLFGVTGVDPQRRDELIKILDVDLTWRMHKASDGQRRRVQICMGLLKPFKVLLLDEITVDLDVLARANLLTYLKKECAEQGATIIYATHIFDGLDDWPTHIVYVAHGKLQLALPLEKVKEMSQLSLMRTVERWLRKERDEDRRKRKERKEKGLPAFDKVIEGSRVVNNGWAAGRLTSTIAGEDNFSFSSNSVLR

SEQ ID NO: 12542 - protein, 243 aa, Triticum aestivum
  misc_feature (1)..(243): Ceres Seq. ID no. 14302270
MVGVLGRSAFHDTALTSSGDLCYLGGEWRRDVAFAGYQVNIQMDISAEKMLFGVTGVDPQRRDELIKILDVDLTWRMHKASDGQRRRVQICMGLLKPFKVLLLDEITVDLDVLARANLLTYLKKECAEQGATIIYATHIFDGLDDWPTHIVYVAHGKLQLALPLEKVKEMSQLSLMRTVERWLRKERDEDRRKRKERKEKGLPAFDKVIEGSRVVNNGWAAGRLTSTIAGEDNFSFSSNSVLR

SEQ ID NO: 12543 - DNA, 966 bp, Triticum aestivum
  misc_feature (1)..(966): Ceres Seq. ID no. 14302271
cacgaaaatcattttcgcaactctcggagcgcaccaccaccaacttcttctgcgcaaaaggagagaaatagagaaaccaccaccaaaccccaagagcgagctcggtgcgcgcgcgcgcgagagagagagagagagagagagagagagagagagagaaacagaggaggcggcgccgagcgagcgcgatcccctcctcctcccccgtcgcgtgatcatggccatggccgcctccagatcgctctgggcctcccgcgccgcctcctacctcaagatctccgccttccccagggccttctccaccgtgctgaaggatctgaagtatgctgaaacccatgaatgggtaaaggttgatggtgattccgcaaccgttgggattacagaccatgcccaggaccatttgggtgatgttgtatatgtggagctgccagaagttggcgcttctgtatctcagggaacaaactttggtgctgttgaaagtgtgaaggcaaccagtgacatcaactcgccggtgtctggagaggtcattgcagtgaatgacgaactactagagaaaccagcattggtcaatggagatccatatgagggcggctggatcatcaaggtcaaggtcagcgatgcaggtgagctcaactcactgatggacgacaagaagtactcaaaattctgcgaggaagaggacagcaagcattaagcatggtggattctgaaagagaatctgcgcttcgacactcataggtgtttgtcatgtgctgttgggcactttgtaccacctgctttctcagcccagaaaggatcaaaacatggaataaatggcatttgcctaccctacaagggcttgcgagatccgaaatctgtatatcactcgagttcctttttcttgttgccatggtttcatctctgatttaagctctgttctgattagttggtattcaaattctaaatgcatacgtactgatgatgctacac

SEQ ID NO: 12544 - protein, 229 aa, Triticum aestivum
  misc_feature (1)..(229): Ceres Seq. ID no. 14302272
TKIIFATLGAHHHQLLLRKRREIEKPPPNPKSELGARARERERERERERERETEEAAPSERDPLLLPRRVIMAMAASRSLWASRAASYLKISAFPRAFSTVLKDLKYAETHEWVKVDGDSATVGITDHAQDHLGDVVYVELPEVGASVSQGTNFGAVESVKATSDINSPVSGEVIAVNDELLEKPALVNGDPYEGGWIIKVKVSDAGELNSLMDDKKYSKFCEEEDSKH

SEQ ID NO: 12545 - protein, 158 aa, Triticum aestivum
  misc_feature (1)..(158): Ceres Seq. ID no. 14302273
MAMAASRSLWASRAASYLKISAFPRAFSTVLKDLKYAETHEWVKVDGDSATVGITDHAQDHLGDVVYVELPEVGASVSQGTNFGAVESVKATSDINSPVSGEVIAVNDELLEKPALVNGDPYEGGWIIKVKVSDAGELNSLMDDKKYSKFCEEEDSKH

SEQ ID NO: 12546 - protein, 156 aa, Triticum aestivum
  misc_feature (1)..(156): Ceres Seq. ID no. 14302274
MAASRSLWASRAASYLKISAFPRAFSTVLKDLKYAETHEWVKVDGDSATVGITDHAQDHLGDVVYVELPEVGASVSQGTNFGAVESVKATSDINSPVSGEVIAVNDELLEKPALVNGDPYEGGWIIKVKVSDAGELNSLMDDKKYSKFCEEEDSKH

SEQ ID NO: 12547 - DNA, 1438 bp, Triticum aestivum
  misc_feature (1)..(1438): Ceres Seq. ID no. 14302283
ctacaaaacacacgccaccaccctattcctgcctctccactcctcccctctcccctcctcttctcttctctccactgcccaacttttgctatagacaagaaagaacctaagctaggtagctttcctccagagcagagcaatggccatgcatcctcttgcccaggggcacccgcaagcctggccatggggggtagccatgtacacgaacatacactaccaccaccagtacgagagagagcacctgttcgagaaatcctttacgcccagtgacgtgggcaagctcaacaggctggtgatccccaagcagcacgcggagaggtacttccccctcaacggcggagactcccccggtgacaaggacctgctcctgtctttcgaggacgaggccggcaagccgtggcggttccggtactcgtactggacgagcagccagagctacgttctcaccaagggctggagcaggtacgtcaaggagaagcagcttgacgccggagacatcgtgcacttcgagagggtgcgcggccttggcacaggcgaccggctcttcatccactgcaggcgccgtggcgagagcgcgccgccaccacctgtccgcgtacctccgcccgctctgaacgccggggagcagcagccttggagcccgatgtgctatagcacatcaggatcataccctaccagccctgccaactcccatgcctatcgccgctccgtggagcaagatcacagcgagatgctgcatgcaggtgactcgccgagagaggcagacccaagagcagcacggcatcggggccgccgtcgagacgtctacggctgtttggcgtcaacctcgactgcggtccggagccagaggcagaggcagcaacgccaatgtacggctacacccaccagagcccctacgctgcagcagtggccacggtgccaacttactggggcagttcataagatggtgaggtctgaagccatgctcgagtatcctaacaaccagcagtgaaactagtcactactcccaccagccagcctactagctatgctactctggactgagtgacaggcttgaattgaactctggaagaggaagtggaagtggaagatcccttgtttcccgggcaatcttccttccatccacagagtgccctttttttttcctgttttctttcttctggtcttccagagaccctattcgatcacagtacggggcccttagcaggtggcaggtttcaggaaacgtcaggttgaaaaggtgagggaagtgggagagatagagggatggtgacacacatgaaaaacaaaagggcatgcttagcaagcatgcatgtatgtatgtgtcatctgtatgtactgggtccaagaacaaaccatgaagttgatgtatcctctccagcctcctcaagaaacaaagtcatatcccccatgggccatggccatggagattttgtcc

SEQ ID NO: 12548 - protein, 283 aa, Triticum aestivum
  misc_feature (1)..(283): Ceres Seq. ID no. 14302284
MAMHPLAQGHPQAWPWGVAMYTNIHYHHQYEREHLFEKSFTPSDVGKLNRLVIPKQHAERYFPLNGGDSPGDKDLLLSFEDEAGKPWRFRYSYWTSSQSYVLTKGWSRYVKEKQLDAGDIVHFERVRGLGTGDRLFIHCRRRGESAPPPPVRVPPPALNAGEQQPWSPMCYSTSGSYPTSPANSHAYRRSVEQDHSEMLHAGDSPREADPRAARHRGRRRDVYGCLASTSTAVRSQRQRQQRQCTATPTRAPTLQQWPRCQLTGAVHKMVRSEAMLEYPNNQQ

SEQ ID NO: 12549 - protein, 281 aa, Triticum aestivum
  misc_feature (1)..(281): Ceres Seq. ID no. 14302285
MHPLAQGHPQAWPWGVAMYTNIHYHHQYEREHLFEKSFTPSDVGKLNRLVIPKQHAERYFPLNGGDSPGDKDLLLSFEDEAGKPWRFRYSYWTSSQSYVLTKGWSRYVKEKQLDAGDIVHFERVRGLGTGDRLFIHCRRRGESAPPPPVRVPPPALNAGEQQPWSPMCYSTSGSYPTSPANSHAYRRSVEQDHSEMLHAGDSPREADPRAARHRGRRRDVYGCLASTSTAVRSQRQRQQRQCTATPTRAPTLQQWPRCQLTGAVHKMVRSEAMLEYPNNQQ

SEQ ID NO: 12550 - protein, 264 aa, Triticum aestivum
  misc_feature (1)..(264): Ceres Seq. ID no. 14302286
MYTNIHYHHQYEREHLFEKSFTPSDVGKLNRLVIPKQHAERYFPLNGGDSPGDKDLLLSFEDEAGKPWRFRYSYWTSSQSYVLTKGWSRYVKEKQLDAGDIVHFERVRGLGTGDRLFIHCRRRGESAPPPPVRVPPPALNAGEQQPWSPMCYSTSGSYPTSPANSHAYRRSVEQDHSEMLHAGDSPREADPRAARHRGRRRDVYGCLASTSTAVRSQRQRQQRQCTATPTRAPTLQQWPRCQLTGAVHKMVRSEAMLEYPNNQQ

SEQ ID NO: 12551 - DNA, 1374 bp, Triticum aestivum
  misc_feature (1)..(1374): Ceres Seq. ID no. 14302287
acacaccactccttcccctcccctgatctccccgccgcgccgatccccccaccagcgcagcagccatggcgaccgcctacaacctccggtcccgcgacgagccggacgacttcgacgagttcgactccacgccctacggcggcggctacgacctcttcgtcaccttcggccgcccgctcccgccctccgacgagacctgctacccctgctccgccccctccacctcctacgacgcgccccactacgccgccgaggagccctccccctacgcccaccaccagaagccgcagcccgcctacggcttccgcccccagaacgagcagcagcagcagccttcctacggccgcgaggacgacgactccggctacgtatccaagcccaagcccaagccccagcccgcgtacggcttccgcccccaggcggaggaggagcagcgcccgtcctacggcggcggcggggaggaggatgactccggctacggatccaagccgcagcccgcctacggcttccgcccccagcaggaggagcagccggcctacggctccggctacgggtccaagccccagcgctcccaggaggacacctacggatctggctacggccggaagccgcagcaggaggagcccgcctacgggtccgggtacggctccggctacgggaggaagccgcaggccgaggagagctacggatctgggtacgggaacacgacgcagccggaggagggctacggctccggctacgggtccaagccgcaggtggagcagacctacggcgggtcggagtacggctctgggtacggaaggaagccgcaggtggaggagagctatgggtcggggtacggaagcaggccgcaggggggagaggagtatggtagtgctgggtatggtgggaggaagactgaggaggagggctatggtggttctgggtatggatctgggaggaaggtgcaagaggaggatgaaggtgcctatggctctggtgggtaccagaagcccaagccgtatggagaggagactcaggcttcgtatggtggtgggtatgagaagcccagctacggcggggggaactatggccgcaagaagcaggatgacgactctgatgatgagaagaagaaccgttacgcgaagcgcgatgactcggatgatgagaaggagcgttacgagaagcaccaccaccaccgccgccacaactacgacgactaagcatccagcatggtcttgacctgctgccatcgcccccacatctcgctactacacgaataaagattggtcttgtttcccttgttggtgccggatcattcccctcttttatgaacttgtatgactgcaacctaaagtgtgctatgtgggtggtttatatgtttgaactatctcc

SEQ ID NO: 12552 - protein, 406 aa, Triticum aestivum
  misc_feature (1)..(406): Ceres Seq. ID no. 14302288
THHSFPSPDLPAAPIPPPAQQPWRPPTTSGPATSRTTSTSSTPRPTAAATTSSSPSAARSRPPTRPATPAPPPPPPTTRPTTPPRSPPPTPTTRSRSPPTASAPRTSSSSSLPTAARTTTPATYPSPSPSPSPRTASAPRRRRSSARPTAAAGRRMTPATDPSRSPPTASAPSRRSSRPTAPATGPSPSAPRRTPTDLATAGSRSRRSPPTGPGTAPATGGSRRPRRATDLGTGTRRSRRRATAPATGPSRRWSRPTAGRSTALGTEGSRRWRRAMGRGTEAGRRGERSMVVLGMVGGRLRRRAMVVLGMDLGGRCKRRMKVPMALVGTRSPSRMERRLRLRMVVGMRSPATAGGTMAARSRMTTLMMRRRTVTRSAMTRMMRRSVTRSTTTTAATTTTTKHPAWS

SEQ ID NO: 12553 - protein, 378 aa, Triticum aestivum
  misc_feature (1)..(378): Ceres Seq. ID no. 14302289
MATAYNLRSRDEPDDFDEFDSTPYGGGYDLFVTFGRPLPPSDETCYPCSAPSTSYDAPHYAAEEPSPYAHHQKPQPAYGFRPQNEQQQQPSYGREDDDSGYVSKPKPKPQPAYGFRPQAEEEQRPSYGGGGEEDDSGYGSKPQPAYGFRPQQEEQPAYGSGYGSKPQRSQEDTYGSGYGRKPQQEEPAYGSGYGSGYGRKPQAEESYGSGYGNTTQPEEGYGSGYGSKPQVEQTYGGSEYGSGYGRKPQVEESYGSGYGSRPQGGEEYGSAGYGGRKTEEEGYGGSGYGSGRKVQEEDEGAYGSGGYQKPKPYGEETQASYGGGYEKPSYGGGNYGRKKQDDDSDDEKKNRYAKRDDSDDEKERYEKHHHHRRHNYDD

SEQ ID NO: 12554 - protein, 251 aa, Triticum aestivum
  misc_feature (1)..(251): Ceres Seq. ID no. 14302290
MTPATDPSRSPPTASAPSRRSSRPTAPATGPSPSAPRRTPTDLATAGSRSRRSPPTGPGTAPATGGSRRPRRATDLGTGTRRSRRRATAPATGPSRRWSRPTAGRSTALGTEGSRRWRRAMGRGTEAGRRGERSMVVLGMVGGRLRRRAMVVLGMDLGGRCKRRMKVPMALVGTRSPSRMERRLRLRMVVGMRSPATAGGTMAARSRMTTLMMRRRTVTRSAMTRMMRRSVTRSTTTTAATTTTTKHPAWS

SEQ ID NO: 12555 - DNA, 1242 bp, Triticum aestivum
  misc_feature (1)..(1242): Ceres Seq. ID no. 14302299
gcatagctcacatcacatcaatacatcaccaccaccaccaccctcctctctcctctccctccctctctcctcgtagacaccttctccttctaggtctccttgcctgtgcaggctccagcacgtacactcaaggaccgacgacgacgatgcggcttagctgcaacggctgccgcgtgctgcggaagggctgcagcgaggactgcagcatccgcccctgcctgcagtggatcaagagccccgaggcgcaggccaacgccaccgtcttcctcgccaagttctacggccgcgcggggctcatgaacctcatcaacgccggcacggacgacagcctccgccccggcatcttccgctcgctcctctacgaggcctgcggccggatcgtcaaccccatatacggctccgtcggcctgctctggtccaacaactggcagatgtgccaggccgccgtcgaggccgtcctcagcggcaagcccatcgtccaggtctcctccgaggatgccgccgccgaccggacaccgccgctcaaggcgtacgacatccgccacgtctccacctcgccagccgccgacgggaggctccacaaggtcgccaagccgggtcgcacccgcttcaagcgcgcgtcctccgcctcgtcccaccacaacccgtccagcgactccaacaacaagcccaagcccaagccgcagcctcagacgcgggcgcccacggcggaggaggagctggatcgtcaacaccgcaaggagatggaggagggcgcgtcccagcgtgctccgagccacgaatcctccgacagccgacacgaggaccccgtggagccacactgccagcaagaggcgtccgcagacacggaggccgaggcggggtcgcacgtcagccaggcggagcaggagcaggagcagagcacagagccggccgcagagcacgcggaggaggtcgaaaaggaggaggacgaagaactagcgctcgagcttacgcttggattcgctcccgtcgcagtacggccggccggatttcacctgagcgtccggaccgcggcggagccggctttcgtcgggctccggttcctctaaaagcacatttaccttgtgaaaagaatatagagctatttgatggactcttttacctttaattggaaaaaaattaggtccgttagttcgtttttgtttcatggttgcaatgagtgtacagacaatagctccctcatggccaagatttttccaataaaaaatgtgttttgctgac

SEQ ID NO: 12556 - protein, 355 aa, Triticum aestivum
  misc_feature (1)..(355): Ceres Seq. ID no. 14302300
IAHITSIHHHHHHPPLSSPSLSPRRHLLLLGLLACAGSSTYTQGPTTTMRLSCNGCRVLRKGCSEDCSIRPCLQWIKSPEAQANATVFLAKFYGRAGLMNLINAGTDDSLRPGIFRSLLYEACGRIVNPIYGSVGLLWSNNWQMCQAAVEAVLSGKPIVQVSSEDAAADRTPPLKAYDIRHVSTSPAADGRLHKVAKPGRTRFKRASSASSHHNPSSDSNNKPKPKPQPQTRAPTAEEELDRQHRKEMEEGASQRAPSHESSDSRHEDPVEPHCQQEASADTEAEAGSHVSQAEQEQEQSTEPAAEHAEEVEKEEDEELALELTLGFAPVAVRPAGFHLSVRTAAEPAFVGLRFL

SEQ ID NO: 12557 - protein, 307 aa, Triticum aestivum
  misc_feature (1)..(307): Ceres Seq. ID no. 14302301
MRLSCNGCRVLRKGCSEDCSIRPCLQWIKSPEAQANATVFLAKFYGRAGLMNLINAGTDDSLRPGIFRSLLYEACGRIVNPIYGSVGLLWSNNWQMCQAAVEAVLSGKPIVQVSSEDAAADRTPPLKAYDIRHVSTSPAADGRLHKVAKPGRTRFKRASSASSHHNPSSDSNNKPKPKPQPQTRAPTAEEELDRQHRKEMEEGASQRAPSHESSDSRHEDPVEPHCQQEASADTEAEAGSHVSQAEQEQEQSTEPAAEHAEEVEKEEDEELALELTLGFAPVAVRPAGFHLSVRTAAEPAFVGLRFL

SEQ ID NO: 12558 - protein, 257 aa, Triticum aestivum
  misc_feature (1)..(257): Ceres Seq. ID no. 14302302
MNLINAGTDDSLRPGIFRSLLYEACGRIVNPIYGSVGLLWSNNWQMCQAAVEAVLSGKPIVQVSSEDAAADRTPPLKAYDIRHVSTSPAADGRLHKVAKPGRTRFKRASSASSHHNPSSDSNNKPKPKPQPQTRAPTAEEELDRQHRKEMEEGASQRAPSHESSDSRHEDPVEPHCQQEASADTEAEAGSHVSQAEQEQEQSTEPAAEHAEEVEKEEDEELALELTLGFAPVAVRPAGFHLSVRTAAEPAFVGLRFL

SEQ ID NO: 12559 - DNA, 1282 bp, Triticum aestivum
  misc_feature (1)..(1282): Ceres Seq. ID no. 14302303
aacccaaacggcacgcccaaacccaaagccaagtcgcactcctcctcctatcctcttcctcgccgaggcggcgaccggccagcgccgcagcagcaaccccggccgccgccagctccacctccaccgcccgcgcgtctccgattcggcgaatttggggctgaggaaagaggaggagcgacttctctctgctctggtggttgcaacttcaggacaaggttttgagcttttgtctgtttccctgggatggatgccaagaagttcctgcagatggtcgaagacaagaagaagagactccttgagaagaaggaagccccactgaaatggcagcagaaactggaagcggcaattaaggccactgaagagaaggagaagaagctcaagtcaaaaaagcacaggaggcgaagctattcttcctcagagtctgacagtgaatccgagagcgacagtgatcggaaacacaggaagaggaaggaccgcaaaaggcacaggaaacatggccactctgactctgatggtgccaggaggcgcaagcacaggtcaaagaggaggagcttggactctagtgatgagagcgacagtgatgaatatgatagcgaatctgaagaagagcgcccaaggaagaagcactcgcacaggaggaagcatcaccgacactctccaaggtcagagtctgatgcttcagattacagcagcgatgatgatgagcggagatcaaccaggaaggaccacacaaggagccgcaggcgtcgccaccgatcattagacgatgaatctgaggacaagatcaggtcgaggcataggaagcgtcacagatcaagtgacgaggacaagccatcagattctgacatccataagcgtcacaggagccgctctatgtccttggatgatggtgctgctggtgagccagacaagatgaatgatggtaaggggtctcacaaaagccggcaccaccgccgccatcaccatcaccatcatgatcaccatggcaactctgctgaacccagtgacgggaagcaactcgtgtaagttgttaatgcctcagaacctgattggcgtcatcactgggctctgtgacgggaaggtttgccccagttggctagttgctgaatgaaagcatgtatctttcataatgttactgtctcggctctgctgcgacttctgaagcctgtacttgttgtactgaaaaatttggcgacaccagatgttatttccagcatttcctctgttgagacatggcttggttgctgatttggtggttaaacatgcctgtttcatttgctgc

SEQ ID NO: 12560 - protein, 260 aa, Triticum aestivum
  misc_feature (1)..(260): Ceres Seq. ID no. 14302304
MDAKKFLQMVEDKKKRLLEKKEAPLKWQQKLEAAIKATEEKEKKLKSKKHRRRSYSSSESDSESESDSDRKHRKRKDRKRHRKHGHSDSDGARRRKHRSKRRSLDSSDESDSDEYDSESEEERPRKKHSHRRKHHRHSPRSESDASDYSSDDDERRSTRKDHTRSRRRRHRSLDDESEDKIRSRHRKRHRSSDEDKPSDSDIHKRHRSRSMSLDDGAAGEPDKMNDGKGSHKSRHHRRHHHHHHDHHGNSAEPSDGKQLV

SEQ ID NO: 12561 - protein, 252 aa, Triticum aestivum
  misc_feature (1)..(252): Ceres Seq. ID no. 14302305
MVEDKKKRLLEKKEAPLKWQQKLEAAIKATEEKEKKLKSKKHRRRSYSSSESDSESESDSDRKHRKRKDRKRHRKHGHSDSDGARRRKHRSKRRSLDSSDESDSDEYDSESEEERPRKKHSHRRKHHRHSPRSESDASDYSSDDDERRSTRKDHTRSRRRRHRSLDDESEDKIRSRHRKRHRSSDEDKPSDSDIHKRHRSRSMSLDDGAAGEPDKMNDGKGSHKSRHHRRHHHHHHDHHGNSAEPSDGKQLV

SEQ ID NO: 12562 - DNA, 1463 bp, Triticum aestivum
  misc_feature (1)..(1463): Ceres Seq. ID no. 14302314
ccgtctccccccacagaaagtgagaacgccaagagcgtcaagctgagggaaagatgagggagctggtctcctcctccacctcctcccccaccgcggccctcgtcgccgccggccacgcggcgctccggggatggtgggaggaggtcaacgagtcgccggcgtggcaggacggcgccttcttctccctcaccgccgcctacgccctcgtctccgccgtcgcgctgattcagctggtgaggatccagcgcagagtgcccgagttcggctggaccacgcagaaggtgttccacctcatgaacttcgtcgtcaatggggttcgtgccgttgtattcggattccatgcctatgtcttcctcctccaaacaaaagtttataagttggtgttactagacctccccggcttgttgttcttctcggcctacaccttacttgttcttttctgggcagaaatatatcatcaggctaggagtctccccaccgataagttaaggattatatacctagccgttaatagcatcgtatatgcaattcagatctgtatttgggtgtaccttggaataaacgacaatgcgttggttgagctggtgagcaaaatcttcatcgtatctgtctccgctgtggcccttcttggtttcgcagtatatggtggaaggttgtttgtcttgctgagacgtttccccattgaatcaaaggggcgaaaaaagaagctttatgaggttgggactgtgacgacaatctgctgcacctgtttcctgataagatgcatcgtggtggccgtatctgcatttgatgctgatgtttctttggaggttttagatcatccaatcctagatttcttctattatatgttgacagagatactgccttccgcgctggtccttttcatccttcggaagcttccacctaagcgagtatcggcgcaatatcaccctattaactagaggtttttgtgcttatgtatgatgttatgcttagaataatggatgaacttggaattgcccaaaattttacatgtctggtgcgagctgaatgctggtgtttgagctgtgtgttttccaaaatcatcgaagtgttgtcgatggatcatgcaatgtgcagtccaggggccctataaaagtgaattttccgtcttctgcttgttctgtttctggtggaatttggttgagagccttgctctagtagaggagaaaatcctagtggattccctgatgtttatccgagtcgttttgtgattgcacttgccatgtttaccatcagagtgttgctggttatgccgactggagcttaatatttgtaaaatgttaccagtctcttgaattatgtgtgtattgtagagggcctcaaaagtcatatttgtaagtgtaactggtttggagtagatgatgtcctgcgcgttgccaaatttcatttcaagaatgtgagaaatacttggcatgattgcaatagtatttgtaatcgtactg

SEQ ID NO: 12563 - protein, 295 aa, Triticum aestivum
  misc_feature (1)..(295): Ceres Seq. ID no. 14302315
MRELVSSSTSSPTAALVAAGHAALRGWWEEVNESPAWQDGAFFSLTAAYALVSAVALIQLVRIQRRVPEFGWTTQKVFHLMNFVVNGVRAVVFGFHAYVFLLQTKVYKLVLLDLPGLLFFSAYTLLVLFWAEIYHQARSLPTDKLRIIYLAVNSIVYAIQICIWVYLGINDNALVELVSKIFIVSVSAVALLGFAVYGGRLFVLLRRFPIESKGRKKKLYEVGTVTTICCTCFLIRCIVVAVSAFDADVSLEVLDHPILDFFYYMLTEILPSALVLFILRKLPPKRVSAQYHPIN

SEQ ID NO: 12564 - protein, 215 aa, Triticum aestivum
  misc_feature (1)..(215): Ceres Seq. ID no. 14302316
MNFVVNGVRAVVFGFHAYVFLLQTKVYKLVLLDLPGLLFFSAYTLLVLFWAEIYHQARSLPTDKLRIIYLAVNSIVYAIQICIWVYLGINDNALVELVSKIFIVSVSAVALLGFAVYGGRLFVLLRRFPIESKGRKKKLYEVGTVTTICCTCFLIRCIVVAVSAFDADVSLEVLDHPILDFFYYMLTEILPSALVLFILRKLPPKRVSAQYHPIN

SEQ ID NO: 12565 - DNA, 1403 bp, Triticum aestivum
  misc_feature (1)..(1403): Ceres Seq. ID no. 14302317
atcaattattgtatccaaacagatctagaagagaagctgatcttctccttccttcggcaccctctccttccctgatccacctactactccttctctcttcctcctagatcctgatcgggtacgttacagacgcgctggccatggcttcccctcgccatcgccaggacggagacggaccacacgacggcgcgccgacgtacgccggcatggcgaagctggtgccggcgctcccgctcgagacgcggtgcccgccgttcgcgctgcggcgctacggcggcttctggctgccggaggcggccctgcggcgcggcctcccggcgttgcacgccgggttcgcgcccaggcgcgcagacgtgctcctcgccagctaccccaagtccggcaccacctggctcaaggccctcgccttcgccaccgtccgccgcgccgtgcacccgccttcttccatcgaccacccgctccgccgtcgcaacccgcaggactgcgtcccgttcctcgagttcgacttcgaccacggggacatggccgagctcgaggcgctcccttccccgcgggtgctcgccacgcacctcccctactcgctcctccccgaccgcgtcgtcgccgacgacggcgcgcggatcgtgtacgtctgccgggaccccaaggacgcgctggtctcctcgtggctcttcaccaggaaagcgtcgccgagtgtcggagtggactccgactcctactcgctgcaggaggcggccgagcttttccgcgagggccggtgcttctacggccctcagtgccggcacgtgctcgagtactgggacgcgagccgccgtcccttcggcggcggcgaggtgctgttcctgaggtacgaggagatgctgcgcgacccggcggggagtctgaagacgatggcggagttcatgggatgcggcttctccgaggaggaggtggcgcgaggggtggtggacgagatcgtggacctgtgcagcctggagaagctgaagaacatggaggccaacagggacgggcggcggaacgcgtcgggcatcaggagcgactctttcttccggaagggggtcgccggggactggagcagccacatgtcgccggagatggggaagatgctggacgaggccgtcgaggaggcactccaggggtctgggttcagcttctctggctgagctccggcgagcactggccagggcggtagtgcggggcaaacaacaatgtcattgcaaagcacggcttggaacacatgttttgtggcgatccatggatttaaggcgcgagtttgattccagtttcttgctcgaaagttgattgtcttgtaagttcaaacagtagtttgataactcattccaaatgtttctttcccaaagttccgaatcattccagttctacaatttcagtcctcattcagc

SEQ ID NO: 12566 - protein, 340 aa, Triticum aestivum
  misc_feature (1)..(340): Ceres Seq. ID no. 14302318
MASPRHRQDGDGPHDGAPTYAGMAKLVPALPLETRCPPFALRRYGGFWLPEAALRRGLPALHAGFAPRRADVLLASYPKSGTTWLKALAFATVRRAVHPPSSIDHPLRRRNPQDCVPFLEFDFDHGDMAELEALPSPRVLATHLPYSLLPDRVVADDGARIVYVCRDPKDALVSSWLFTRKASPSVGVDSDSYSLQEAAELFREGRCFYGPQCRHVLEYWDASRRPFGGGEVLFLRYEEMLRDPAGSLKTMAEFMGCGFSEEEVARGVVDEIVDLCSLEKLKNMEANRDGRRNASGIRSDSFFRKGVAGDWSSHMSPEMGKMLDEAVEEALQGSGFSFSG

SEQ ID NO: 12567 - protein, 318 aa, Triticum aestivum
  misc_feature (1)..(318): Ceres Seq. ID no. 14302319
MAKLVPALPLETRCPPFALRRYGGFWLPEAALRRGLPALHAGFAPRRADVLLASYPKSGTTWLKALAFATVRRAVHPPSSIDHPLRRRNPQDCVPFLEFDFDHGDMAELEALPSPRVLATHLPYSLLPDRVVADDGARIVYVCRDPKDALVSSWLFTRKASPSVGVDSDSYSLQEAAELFREGRCFYGPQCRHVLEYWDASRRPFGGGEVLFLRYEEMLRDPAGSLKTMAEFMGCGFSEEEVARGVVDEIVDLCSLEKLKNMEANRDGRRNASGIRSDSFFRKGVAGDWSSHMSPEMGKMLDEAVEEALQGSGFSFSG

SEQ ID NO: 12568 - protein, 213 aa, Triticum aestivum
  misc_feature (1)..(213): Ceres Seq. ID no. 14302320
MAELEALPSPRVLATHLPYSLLPDRVVADDGARIVYVCRDPKDALVSSWLFTRKASPSVGVDSDSYSLQEAAELFREGRCFYGPQCRHVLEYWDASRRPFGGGEVLFLRYEEMLRDPAGSLKTMAEFMGCGFSEEEVARGVVDEIVDLCSLEKLKNMEANRDGRRNASGIRSDSFFRKGVAGDWSSHMSPEMGKMLDEAVEEALQGSGFSFSG

SEQ ID NO: 12569 - DNA, 1660 bp, Triticum aestivum
  misc_feature (1)..(1660): Ceres Seq. ID no. 14302321
gttccatttcatttctgtttcggaggaaaggtccagaagcgccgccgccgccgcagcagcgacacgctccctacggcatggcgccggcgtacctggcgaccatacccgcgctccggcgcgcggcgcggcgggccccggcggcgctgttctcgtcggggatcgtcgccggcgacaagcccgttctggtgcgcgatttcgtgaggtcggcgctctacgaccccaaccacggctacttctccaagcggtcggggcccgtcggcgtgctcgactccgccatccgcttccacaagctcgacgggaggaatgcgtacatgaagcatcttgataagctgtataagatgcatgatatctcttggtttactccagtggagctttttaagccatggtatgcctatgcaatagctgcgtcaatccttcgcacggctaatctttcagtcccattgaagatatatgaaatcggaggtggatccgggacatgtgcaaagtgcgtacttgattacatgatgttaaatgccccgccaaaagtctacaataatatgaaatacatctcagtagagattagctcctcccttgctgaaaagcagttggaaactgtcggtgaagtgcagagccatttgtcaaagttcacagtggagcatcgtgatgcaactgacgtagctggatggggcagcaaggatcctcaaccatgctgggtgctaatgcttgaggtacttgacaatctacctcatgaccttgtctattcaccagatcaggtctctccatggatggaggtgtggattgaaaaagtaaatggcagttcacaagtctgtgaggtctacaaaccattgcaagacccattagtttcctgctgcagtgagattgttggcatgaatgaagagaatccatctttgagagaaaaactatcattcgctgcaaaaggactcatctcaaaagtattcccgaagcctcggagagcttggttaccaaccggatgcttgaaactactggatactttgcatcaagctttgccaagtatgtcccttattgcttcagacttcagttatcttcctgatgttagcatacctggcgatagagctccattggtttcttcaaagaaggatgggaaaactttggatcatcccaactatcttgatgcacggggcgatgcagatatcttcttcccaaccgatttcttgctgttggagcagatcgaccaccactgctctggtttctcgaaagaccagatgaatcgtggtgcatttaaacctgtgaagagtaggagaacaatcatacttgattcggctgcctttatggaggagtttgggttgccactgaagacgaggaccaaagatggatacaatccacttcttgatgatttcaggaacacaaagttctatctcagtgtgcctacccacaacaagtagtagtccagcatgcctgcgtcgcttcttctgtttgccatgaggcgctgcattagacgccagtgaatacctaatatgcaactcagtaatcaatttgtcagagcaggttatttatgttttttttcctgtagaagaccgaaattcttaggttggtcaaatttgaggccacagttcaacttcaggcatgctgccgccttttctatgtttgattgatggcacggaagtgaataataccatttgaggccacagttcaattcact

SEQ ID NO: 12570 - protein, 466 aa, Triticum aestivum
  misc_feature (1)..(466): Ceres Seq. ID no. 14302322
SISFLFRRKGPEAPPPPQQRHAPYGMAPAYLATIPALRRAARRAPAALFSSGIVAGDKPVLVRDFVRSALYDPNHGYFSKRSGPVGVLDSAIRFHKLDGRNAYMKHLDKLYKMHDISWFTPVELFKPWYAYAIAASILRTANLSVPLKIYEIGGGSGTCAKCVLDYMMLNAPPKVYNNMKYISVEISSSLAEKQLETVGEVQSHLSKFTVEHRDATDVAGWGSKDPQPCWVLMLEVLDNLPHDLVYSPDQVSPWMEVWIEKVNGSSQVCEVYKPLQDPLVSCCSEIVGMNEENPSLREKLSFAAKGLISKVFPKPRRAWLPTGCLKLLDTLHQALPSMSLIASDFSYLPDVSIPGDRAPLVSSKKDGKTLDHPNYLDARGDADIFFPTDFLLLEQIDHHCSGFSKDQMNRGAFKPVKSRRTIILDSAAFMEEFGLPLKTRTKDGYNPLLDDFRNTKFYLSVPTHNK

SEQ ID NO: 12571 - protein, 441 aa, Triticum aestivum
  misc_feature (1)..(441): Ceres Seq. ID no. 14302323
MAPAYLATIPALRRAARRAPAALFSSGIVAGDKPVLVRDFVRSALYDPNHGYFSKRSGPVGVLDSAIRFHKLDGRNAYMKHLDKLYKMHDISWFTPVELFKPWYAYAIAASILRTANLSVPLKIYEIGGGSGTCAKCVLDYMMLNAPPKVYNNMKYISVEISSSLAEKQLETVGEVQSHLSKFTVEHRDATDVAGWGSKDPQPCWVLMLEVLDNLPHDLVYSPDQVSPWMEVWIEKVNGSSQVCEVYKPLQDPLVSCCSEIVGMNEENPSLREKLSFAAKGLISKVFPKPRRAWLPTGCLKLLDTLHQALPSMSLIASDFSYLPDVSIPGDRAPLVSSKKDGKTLDHPNYLDARGDADIFFPTDFLLLEQIDHHCSGFSKDQMNRGAFKPVKSRRTIILDSAAFMEEFGLPLKTRTKDGYNPLLDDFRNTKFYLSVPTHNK

SEQ ID NO: 12572 - protein, 363 aa, Triticum aestivum
  misc_feature (1)..(363): Ceres Seq. ID no. 14302324
MKHLDKLYKMHDISWFTPVELFKPWYAYAIAASILRTANLSVPLKIYEIGGGSGTCAKCVLDYMMLNAPPKVYNNMKYISVEISSSLAEKQLETVGEVQSHLSKFTVEHRDATDVAGWGSKDPQPCWVLMLEVLDNLPHDLVYSPDQVSPWMEVWIEKVNGSSQVCEVYKPLQDPLVSCCSEIVGMNEENPSLREKLSFAAKGLISKVFPKPRRAWLPTGCLKLLDTLHQALPSMSLIASDFSYLPDVSIPGDRAPLVSSKKDGKTLDHPNYLDARGDADIFFPTDFLLLEQIDHHCSGFSKDQMNRGAFKPVKSRRTIILDSAAFMEEFGLPLKTRTKDGYNPLLDDFRNTKFYLSVPTHNK

SEQ ID NO: 12573 - DNA, 1151 bp, Triticum aestivum
  misc_feature (1)..(1151): Ceres Seq. ID no. 14302325
acagagtctcactcacagaaaagaaaccatcgtccagccacgcaggcgagcgatggcgagcctgagcgtgcctccggtgctcacgcctccgcgtgatgacgccgtcgctctccacaaggccttcaaagggttcggctgcgacagcacgacggtgactaacatacttgctcaccgcgactcggcgcagcgcgcgctcatcctgcacgagtacaaagccatataccatcaggatctctaccatcgcctagcaactgaactgagtggaaaccacaagaatgctatgctgctttgggtcctcgaccccgtggggcgtgacgcgaccatactgaaccaggctctcaacagcgacatcaccgacctgagagccgccacggaggtaatctgctccaggacgccgtcgcagctgcagatcatgaagcaaacctaccgcgcgaggttcggttgctacctcgagcatgacatcaccgaacgcacctacggtgatcatcagaagcttttgcttgcgtacctgggagtccggcgcaacgaaggcccggaagttgatccttcggcggtgacagacgacgcgagggagctgtatcaagccggcgagaagagggtgggcaccgatgagcgggccttcatccgcatcttcagcgaacgcagctgggcgcacatggtgtccgtggccaacgcttaccagcacatgtacgcccggtccctggagaaggccgtgaagagtgagacgacagggaacttccagttcgggctgctgaccatcctcaggtgcgccgacactccggcaaagtactttgccaaggtcctgcacaaggcgatgaaaggcctgggcaccagcaacgcggcgctcacacgggtggcggtgacgaggaccgaggttgacatgaagtacatcaaggcagagtaccacaacaagtacaaggggtcgctggctgaagctatccactccgagacgtcggggaactaccgaaccttcctcctctcactcgtcggctgggaccgctaattcgctcctgtcgatcccacgcatgcatggtggcgccaccaagactgccatgtgtgatccatcaataggcattggggcacaataatctgaaaaggagcaaaataagattgtattattcctgtggaatcaacacaattgttctatgtgc

SEQ ID NO: 12574 - protein, 333 aa, Triticum aestivum
  misc_feature (1)..(333): Ceres Seq. ID no. 14302326
QSLTHRKETIVQPRRRAMASLSVPPVLTPPRDDAVALHKAFKGFGCDSTTVTNILAHRDSAQRALILHEYKAIYHQDLYHRLATELSGNHKNAMLLWVLDPVGRDATILNQALNSDITDLRAATEVICSRTPSQLQIMKQTYRARFGCYLEHDITERTYGDHQKLLLAYLGVRRNEGPEVDPSAVTDDARELYQAGEKRVGTDERAFIRIFSERSWAHMVSVANAYQHMYARSLEKAVKSETTGNFQFGLLTILRCADTPAKYFAKVLHKAMKGLGTSNAALTRVAVTRTEVDMKYIKAEYHNKYKGSLAEAIHSETSGNYRTFLLSLVGWDR

SEQ ID NO: 12575 - protein, 316 aa, Triticum aestivum
  misc_feature (1)..(316): Ceres Seq. ID no. 14302327
MASLSVPPVLTPPRDDAVALHKAFKGFGCDSTTVTNILAHRDSAQRALILHEYKAIYHQDLYHRLATELSGNHKNAMLLWVLDPVGRDATILNQALNSDITDLRAATEVICSRTPSQLQIMKQTYRARFGCYLEHDITERTYGDHQKLLLAYLGVRRNEGPEVDPSAVTDDARELYQAGEKRVGTDERAFIRIFSERSWAHMVSVANAYQHMYARSLEKAVKSETTGNFQFGLLTILRCADTPAKYFAKVLHKAMKGLGTSNAALTRVAVTRTEVDMKYIKAEYHNKYKGSLAEAIHSETSGNYRTFLLSLVGWDR

SEQ ID NO: 12576 - protein, 240 aa, Triticum aestivum
  misc_feature (1)..(240): Ceres Seq. ID no. 14302328
MLLWVLDPVGRDATILNQALNSDITDLRAATEVICSRTPSQLQIMKQTYRARFGCYLEHDITERTYGDHQKLLLAYLGVRRNEGPEVDPSAVTDDARELYQAGEKRVGTDERAFIRIFSERSWAHMVSVANAYQHMYARSLEKAVKSETTGNFQFGLLTILRCADTPAKYFAKVLHKAMKGLGTSNAALTRVAVTRTEVDMKYIKAEYHNKYKGSLAEAIHSETSGNYRTFLLSLVGWDR

SEQ ID NO: 12577 - DNA, 575 bp, Triticum aestivum
  misc_feature (1)..(575): Ceres Seq. ID no. 14302363
actccaacacagccatacaagactatctctcagaagtcaaaacctcccagttaattagcaatggcaaagagtctcgcagtggccctcctgctactggtggtgctcgcgcactgcgatgggagggagctgagcgccaacgaccgcgcacttgcaggttccggtgccggtggcgtccaagagtccaaggcgtcggggtcgccaggcttgccgattgtgggaacaacacctacgggcaccagtaccattaacggaccgctggtggtcattcctggggtcccagttcacccatgatcattccggcgctggctgacaagcaagctgaagctcggcctgtgcctttacttttctagcttacacctcacagaacaacggcgtttttctctcacctccatgcatatgttcgttataatgagcgtatgtatcaactatctcgtcgtgtgtatgtatttattttcagttcatgctgcggtatgttccgttccttgatgtgctacatgtaccattgcaaatttcaatacttaccgtgcacgggatgttctacatgtatcaattatatctaagaacatgttatttgg

SEQ ID NO: 12578 - protein, 81 aa, Triticum aestivum
  misc_feature (1)..(81): Ceres Seq. ID no. 14302364
SNTAIQDYLSEVKTSQLISNGKESRSGPPATGGARALRWEGAERQRPRTCRFRCRWRPRVQGVGVARLADCGNNTYGHQYH

SEQ ID NO: 12579 - protein, 76 aa, Triticum aestivum
  misc_feature (1)..(76): Ceres Seq. ID no. 14302365
MAKSLAVALLLLVVLAHCDGRELSANDRALAGSGAGGVQESKASGSPGLPIVGTTPTGTSTINGPLVVIPGVPVHP

SEQ ID NO: 12580 - protein, 47 aa, Triticum aestivum
  misc_feature (1)..(47): Ceres Seq. ID no. 14302366
MYQLSRRVYVFIFSSCCGMFRSLMCYMYHCKFQYLPCTGCSTCINYI

SEQ ID NO: 12581 - DNA, 610 bp, Triticum aestivum
  misc_feature (1)..(610): Ceres Seq. ID no. 14302375
accccacttcccacttcccaagcgcgcccacgcgcacgaaaatactcctagtactaattcgagagccagtgagtctagggtcgagtcccggctggggatgacgagccctcgccggcgatggacttgccgctagccctcgcagctctactcctcctcctcctagtgctcctcgctgccccgccggcggcgctcctcattgccctccacctgaaccgccgccgccgcctaacgccgcccgagccggcggccgcggcgctcgagccgagcgcgccggccgaggagaacgagggcgggaaggagaagaggcggcggcgcagggcgaggcggaagcagcagcagaagcagggcggcgacggggccctctcgcaggcggcaggcggcggcggggacgacgcgctgccgccgcggccgcggttcccgctcgcctcggtggccggcgcactgcagcggcggatcaccgcgcggtacgacgagctcgcgcgggccagccaggcccagtccctcaccatggacggtgtgatcgtgctcgtcaagctcttgggcctccccctgtgccttgaactcttgagtcatggctatgaataagatctgaactgggcagatccaaatg

SEQ ID NO: 12582 - protein, 155 aa, Triticum aestivum
  misc_feature (1)..(155): Ceres Seq. ID no. 14302376
MDLPLALAALLLLLLVLLAAPPAALLIALHLNRRRRLTPPEPAAAALEPSAPAEENEGGKEKRRRRRARRKQQQKQGGDGALSQAAGGGGDDALPPRPRFPLASVAGALQRRITARYDELARASQAQSLTMDGVIVLVKLLGLPLCLELLSHGYE

SEQ ID NO: 12583 - DNA, 1498 bp, Triticum aestivum
  misc_feature (1)..(1498): Ceres Seq. ID no. 14302388
gtacgctgccacgccagagcagagcagagcagaatccggtagccagatcgaacgccccaccctctctccctccctccctcgcccccttccgatcgagcccgtcgccatggcgccgccccgcgtcggcctgctcctcgccctcgccttgtgcctcgcgttcgcgcgcgcggacgcggccgtgagggagctcagggtcgggtactacgcgcagacgtgcccccgcgcggaggagatcgtgcggcgcgtcatggcccgcgcgctcgcgcgcgaggcccgcagcgtcgcctccgtcatgcgcctccagttccacgactgcttcgtcaacggatgcgacgggtcggtgctgatggacgcgacgccgacgatggcgggggagaaggaggcgctctccaacatcaactccctccgctccttcgaggtcgtggacgaggtcaagagcgccctggaggagcagtgccccggcgtcgtctcctgcgccgacatcatcatcatggccgcccgcgacgccgtcgtgctgactggtggacccaactgggacgtgaggctcgggcgcgaggacagtctgacggcgagccaggaggactcggacaacatcatgccgagcccgcgcgccaacgcgagcgcgctcatccgcctcttcgccggctacaagctcaccgtcaccgacctcgtcgcgctctccggctcgcactccatcggcgaggcccgctgcttctccatcgtcttccgcctctacaaccagtcgggctccggccgccccgacccccacatggacccggcctaccgccaggcgctcgacgcgctctgccccctcaccggcgaccagaacgtcaccggcggcctggacgctaccccggtcgtcttcgacaaccagtacttcaaggacctggtccacctccgcggattcctcaactccgaccagacgctcttctccgacaacgaggggacccggcgggtggtgacgcagttcagccagaaccaggacgccttcttcagggccttcatcgaggggatggtcaagctgggcgagctccagaaccccaggaagggggagatccggcgcaactgccgcgtcgccaacggcgggcggccgccgctggagaagcaggtcgcgccgttccgggtgctggacttctgaacctggttctacggtaggcctgtaggtgtctcacgggagctctggtgtgggagcgatccatatgcttgacataggtttggtcgtgtcgcagttctgtgcctacccaagaatggtttcaggtctggctactgcttattgctaattgttgaggaataatagagaaattgatgcctctggtactttgattgccaaaggctgcattaaggtttgcttctttgttgattctccaaagattagctagcgatagtgcaagatgcttacttagagagatggttacaagaacaaataatgattttaagagtcatagaactagcgcttaatgtttagtttggttttaaaactttgaaaatatgaaattgc

SEQ ID NO: 12584 - protein, 378 aa, Triticum aestivum
  misc_feature (1)..(378): Ceres Seq. ID no. 14302389
YAATPEQSRAESGSQIERPTLSPSLPRPLPIEPVAMAPPRVGLLLALALCLAFARADAAVRELRVGYYAQTCPRAEEIVRRVMARALAREARSVASVMRLQFHDCFVNGCDGSVLMDATPTMAGEKEALSNINSLRSFEVVDEVKSALEEQCPGVVSCADIIIMAARDAVVLTGGPNWDVRLGREDSLTASQEDSDNIMPSPRANASALIRLFAGYKLTVTDLVALSGSHSIGEARCFSIVFRLYNQSGSGRPDPHMDPAYRQALDALCPLTGDQNVTGGLDATPVVFDNQYFKDLVHLRGFLNSDQTLFSDNEGTRRVVTQFSQNQDAFFRAFIEGMVKLGELQNPRKGEIRRNCRVANGGRPPLEKQVAPFRVLDF

SEQ ID NO: 12585 - protein, 343 aa, Triticum aestivum
  misc_feature (1)..(343): Ceres Seq. ID no. 14302390
MAPPRVGLLLALALCLAFARADAAVRELRVGYYAQTCPRAEEIVRRVMARALAREARSVASVMRLQFHDCFVNGCDGSVLMDATPTMAGEKEALSNINSLRSFEVVDEVKSALEEQCPGVVSCADIIIMAARDAVVLTGGPNWDVRLGREDSLTASQEDSDNIMPSPRANASALIRLFAGYKLTVTDLVALSGSHSIGEARCFSIVFRLYNQSGSGRPDPHMDPAYRQALDALCPLTGDQNVTGGLDATPVVFDNQYFKDLVHLRGFLNSDQTLFSDNEGTRRVVTQFSQNQDAFFRAFIEGMVKLGELQNPRKGEIRRNCRVANGGRPPLEKQVAPFRVLDF

SEQ ID NO: 12586 - protein, 296 aa, Triticum aestivum
  misc_feature (1)..(296): Ceres Seq. ID no. 14302391
MARALAREARSVASVMRLQFHDCFVNGCDGSVLMDATPTMAGEKEALSNINSLRSFEVVDEVKSALEEQCPGVVSCADIIIMAARDAVVLTGGPNWDVRLGREDSLTASQEDSDNIMPSPRANASALIRLFAGYKLTVTDLVALSGSHSIGEARCFSIVFRLYNQSGSGRPDPHMDPAYRQALDALCPLTGDQNVTGGLDATPVVFDNQYFKDLVHLRGFLNSDQTLFSDNEGTRRVVTQFSQNQDAFFRAFIEGMVKLGELQNPRKGEIRRNCRVANGGRPPLEKQVAPFRVLDF

SEQ ID NO: 12587 - DNA, 656 bp, Triticum aestivum
  misc_feature (1)..(656): Ceres Seq. ID no. 14302392
caaatctcccagtcccttcctcgctcttctctctagctattggatcggtgactctgcttctgttagtttcagctttgagtcgctgctacaatgtcttgcattaagagagttgatagatccgcgtacgttgccatggcaccagaagctccgttcatggctgccggaacgatggccggagccgttgatctgtctttcagctcatcctccaacctcgagatctttgaactcgattttaactccgaagaccacgagatcaaactattaggtcagtgctcaagctcagagaggtttactcgactcgcttggggaagttatggacccgggtccgaggaatctccttatggtctcatcgctggtggcctcgtcgacgggaatatcggtttatggaatccaatcactctgattcggtgagttttctctttctctataaccctaattgttagggtttatatatgaaaaagtgtttccgtaatggacaagtaaagtatttgattttctttttgtttatttcagttctgagtgtaatgaaagtgcgcacgttagacatctttcaaaacataaagggccagtgagttgtaatctctttaacagaatctaatgttgggctaggttcttttcgatgcttacatatatatatatatattctcttgtatgtt

SEQ ID NO: 12588 - protein, 106 aa, Triticum aestivum
  misc_feature (1)..(106): Ceres Seq. ID no. 14302393
MSCIKRVDRSAYVAMAPEAPFMAAGTMAGAVDLSFSSSSNLEIFELDFNSEDHEIKLLGQCSSSERFTRLAWGSYGPGSEESPYGLIAGGLVDGNIGLWNPITLIR

SEQ ID NO: 12589 - protein, 92 aa, Triticum aestivum
  misc_feature (1)..(92): Ceres Seq. ID no. 14302394
MAPEAPFMAAGTMAGAVDLSFSSSSNLEIFELDFNSEDHEIKLLGQCSSSERFTRLAWGSYGPGSEESPYGLIAGGLVDGNIGLWNPITLIR

SEQ ID NO: 12590 - protein, 87 aa, Triticum aestivum
  misc_feature (1)..(87): Ceres Seq. ID no. 14302395
KSPSPFLALLSSYWIGDSASVSFSFESLLQCLALRELIDPRTLPWHQKLRSWLPERWPEPLICLSAHPPTSRSLNSILTPKTTRSNY

SEQ ID NO: 12591 - DNA, 1367 bp, Triticum aestivum
  misc_feature (1)..(1367): Ceres Seq. ID no. 14302404
ctccttttgccacggcccgcgcgcaccggtcacacatggctgagaccccccgtgccccgccgccactgaggcctccgccgcccgttccgctgccggacacgccgcctcgcccggattcgtcgccttccacgcccggcgaggattaccacacgccgacgccctcgctggacgaggcgcgcgaagaaacgccaccgtggtcgcaagaaaccaacggcaacgagagagcggccagcaaaagcccggccctctcgcccgtgcgcctcccctcgccgcaccgcctgctgccgcccaactcccccaccggcaacggcgatgacggtgccgccgccgggcatgcgccggtgccgggccgccgcccgcagctccgcctcgcgcccggcctcgtccggacgccgtcggaagggtccgtcgccaagtctccctcgccgtcgccctcttcgtcgctgacgtcgccatcgcctctaaccctggctcccacaatcacaaccaacagcaagagcgcccagagcacgccgaagcgcacggaggcatggaagccgccggccacggggatcgcggtgcagttcgaccctgtcgaggaagccgtcacgtcgccgctgcaactgggcaaggcccgaatcgaccgccatcgcgccactacgatggcggcagcagagaacggaggcgcgcccaacacggtgcctcgcgacgtggcggcggtggccgctgtcggggagaggaggccactgtcggtggcgctgcggctggccacggcagtgctcagcctggcgtccttcgcggtgatggccagcgcccggacgtccggctgggacggcgatcacttcgatcgctacgatcagtacaggtacgccctggcgatgaacgtgatcgtctgcgcctactcaatcgcgcaatcgcttggtgagatccgccgtctggtcgcggcgaggtttatttacaggagcatgtcaagctactacgtcagcctgttccttgatcaggtcctggcgtatctcctcatgtcggcgtcctcggctgccgcgtcgcgcaacgatctgtgggtgtcgaggttcagccaggacgccttcaacaggaagatcaccagctccgtgtggctgtccttccttgccttcatagcgctcgccgcaagctcgctcatctccacggctaatctcttcagcatggtctaattatgatagatacggttcatccctttccctctggggatgagtaactgccgacgttcttcatgtaaattttgcattttatattgcgagaaatcatacgatcgacttataccgtacgttgttctcggtcctgacctctgactcgtcagaaatcccttgtaaagaggttcatatagtgctctaattaagcttttcactgtc

SEQ ID NO: 12592 - protein, 388 aa, Triticum aestivum
  misc_feature (1)..(388): Ceres Seq. ID no. 14302405
PFATARAHRSHMAETPRAPPPLRPPPPVPLPDTPPRPDSSPSTPGEDYHTPTPSLDEAREETPPWSQETNGNERAASKSPALSPVRLPSPHRLLPPNSPTGNGDDGAAAGHAPVPGRRPQLRLAPGLVRTPSEGSVAKSPSPSPSSSLTSPSPLTLAPTITTNSKSAQSTPKRTEAWKPPATGIAVQFDPVEEAVTSPLQLGKARIDRHRATTMAAAENGGAPNTVPRDVAAVAAVGERRPLSVALRLATAVLSLASFAVMASARTSGWDGDHFDRYDQYRYALAMNVIVCAYSIAQSLGEIRRLVAARFIYRSMSSYYVSLFLDQVLAYLLMSASSAAASRNDLWVSRFSQDAFNRKITSSVWLSFLAFIALAASSLISTANLFSMV

SEQ ID NO: 12593 - protein, 377 aa, Triticum aestivum
  misc_feature (1)..(377): Ceres Seq. ID no. 14302406
MAETPRAPPPLRPPPPVPLPDTPPRPDSSPSTPGEDYHTPTPSLDEAREETPPWSQETNGNERAASKSPALSPVRLPSPHRLLPPNSPTGNGDDGAAAGHAPVPGRRPQLRLAPGLVRTPSEGSVAKSPSPSPSSSLTSPSPLTLAPTITTNSKSAQSTPKRTEAWKPPATGIAVQFDPVEEAVTSPLQLGKARIDRHRATTMAAAENGGAPNTVPRDVAAVAAVGERRPLSVALRLATAVLSLASFAVMASARTSGWDGDHFDRYDQYRYALAMNVIVCAYSIAQSLGEIRRLVAARFIYRSMSSYYVSLFLDQVLAYLLMSASSAAASRNDLWVSRFSQDAFNRKITSSVWLSFLAFIALAASSLISTANLFSMV

SEQ ID NO: 12594 - DNA, 1702 bp, Triticum aestivum
  misc_feature (1)..(1702): Ceres Seq. ID no. 14302423
cattccagcccccctgattccctcctccctttcccattccgttcaccttcctacctctcatagttggtggtggcgcaagcagacgaaccattccggattcctcgccgccgccgccgaccggtccaaccccgaaccctagcttgctcgcccgcaatgccggccaccgactcctcagcctcgccggcgcaccaccaccaccacacctccttcggccgccacatcctctcgctgcgccaccgcgagcacggccagatccactccgccccgcccacgcccgaccacgccaacaccgccaacccctcctcctcccccgccgaccgcgaagtcgacgcctttcagcgccacgccgccgagctgctcctcgacctgctcccctgctcccccgacgccgcccccgccgacgccaagaacgccccgccggagatcctgtcgatagcgtggacccagcacctgctcgactccttcctcatctgcctcgaggagttccgctccgcgctcctcggcggcggccccggggccctcgcgcgccccccgctcgaccgcctcgtcgccgacttcttcgaccgcgccgtcaaggcgctcgacctctgcaacgcgctccgcgacggcctcgacctgctccgccagtggcgcaagcacctcgccatcgccgccgccgcgctcgccccgcagggcgccgcgtccgaccccgccgcgccgctcggggagggccagatccgccgcgcccgcaaggcgctcaccgacctcaccatcctcatgctcgacgacaaggacgccggcggcggggggcagcggaaccgctccttcggccggacgggtaacggcggcaaggacgccgccgggggccagagccgggggcaccaccgccgcagcagcagcggctccggctccggctccggcggctcccacttcaggtcgctgtcctggagcgtgtcccgcacctggtccgcgtcccgccagctgcaggccatcgggggcaacctgccggtgccccgcgccaacgacatcgccgccacgggcggcctcgcgtccgccgtgtacaccatgggcgccgtcctcttcgtcaccgcctgggcgctcgtcgccgccatcccctgccaggaccgcggcctccaggcgcacttcgccgtgcccaggagcttcccctgggccggcccggtcaccacgctctacgagcgcgtcctcgaggagtccaagaagaaggaccgcaagcactcgtgcgggctgctcaaggagatacacctcatcgagcgttggtcgcggcagctcatggagatcaccgacgccgcgcagttccccctggacaaggagaaggacgccgaggtgcgggaggccgcgcaggagctggtgcaggtgtgcgagacactcaaggaagggctcgacccgctcgagcggcaggtgcgcgagatgttccaccgcatcgtgcgcaccaggacggagatcctcgactgcttgagtaggcccaacaccgccgagtaggcgaaccggcatggatcatcatggcaatgctgtttggttgaacattgtgtgatatactcaaaatgcaggtggtatgctgatgatcatcgattgccggttgaaattgaggtagctttcctctgcataagttatacatgtgtcttgatgcatagaggccggcgtggccttatgataaaatcgagtggtttagttgtatttgatttattctttgtttgtagcagct

SEQ ID NO: 12595 - protein, 441 aa, Triticum aestivum
  misc_feature (1)..(441): Ceres Seq. ID no. 14302424
MPATDSSASPAHHHHHTSFGRHILSLRHREHGQIHSAPPTPDHANTANPSSSPADREVDAFQRHAAELLLDLLPCSPDAAPADAKNAPPEILSIAWTQHLLDSFLICLEEFRSALLGGGPGALARPPLDRLVADFFDRAVKALDLCNALRDGLDLLRQWRKHLAIAAAALAPQGAASDPAAPLGEGQIRRARKALTDLTILMLDDKDAGGGGQRNRSFGRTGNGGKDAAGGQSRGHHRRSSSGSGSGSGGSHFRSLSWSVSRTWSASRQLQAIGGNLPVPRANDIAATGGLASAVYTMGAVLFVTAWALVAAIPCQDRGLQAHFAVPRSFPWAGPVTTLYERVLEESKKKDRKHSCGLLKEIHLIERWSRQLMEITDAAQFPLDKEKDAEVREAAQELVQVCETLKEGLDPLERQVREMFHRIVRTRTEILDCLSRPNTAE

SEQ ID NO: 12596 - protein, 240 aa, Triticum aestivum
  misc_feature (1)..(240): Ceres Seq. ID no. 14302425
MLDDKDAGGGGQRNRSFGRTGNGGKDAAGGQSRGHHRRSSSGSGSGSGGSHFRSLSWSVSRTWSASRQLQAIGGNLPVPRANDIAATGGLASAVYTMGAVLFVTAWALVAAIPCQDRGLQAHFAVPRSFPWAGPVTTLYERVLEESKKKDRKHSCGLLKEIHLIERWSRQLMEITDAAQFPLDKEKDAEVREAAQELVQVCETLKEGLDPLERQVREMFHRIVRTRTEILDCLSRPNTAE

SEQ ID NO: 12597 - DNA, 1451 bp, Triticum aestivum
  misc_feature (1)..(1451): Ceres Seq. ID no. 14302445
gtagaaaatccacccccgttcccgcacaggccagacctggctgattgacttttcggtcccggccgagcgagctcacacacccacacacgctccgcaccccgtctgcctcacatgtggaaccgcccccaccccctctcacactcccgtcccggcgccctctccccactcctccgcgtcctcccccgcgccgtcgccgggccgccgccgccgtccgagcacgaccggatccgggtggcgccgcctccgcggatggacgccacctcgccgtcggggcgccccaccacgcctcggcggcagctgcagctgcagggcccgcgcccgccgcggctcagcgtgcgccccgagtctcacgccatcaagaagccgtccggggcgccgccgcaggcccaggggcagggccacgcccggcgggaggagaagcagcaaggccagccgccgcgggagccggtgatcatctacgacgcgtcgcccaagatcatccacaccaagcccagcgagttcatggcgctcgtgcagcgtctcaccggccccggctctggcgcgctcccctccgaggcccagacccaggactaccagatggacgaggccgtgccggggcagtccttcctgccgccggagcttctcctctcgccgtccgccgcgatgtccccggccgcgaggctggctaccatcgagcggtccgtccggccgatgcccgcgccgacgccggattacgtcgacttcaataactacagattcgacgacggcggcctcgcggcggttctcggcgcgggtaggccagggcccggcatcctctcccctttgccgtcgtccctgccgccagccgcggcgtccgtgctgttctcgccgctgccgttcgacccgaacggcctcagctggctgaacgagctgagccccatcctccgagcggcgtccaccggcgccggctcctcaggcagcggcagcggcggcggcgggactagcaacggcggcgcctaccggcaaccacaatcctactactccgaccccttcgtcccgagcccccgcaacctccttgccacgcccaccgtgccgtcgccgcgaaccttcgcggagctcatgagcaacctgccagatctctaggccgccgcctccgtcaaagacggcaccagcggccgaaatttctcttttttttttcttttttgcttctccatttttggggggttaggcgcagcccggtgtggtggggccccgtagtgatgacaggttaattagcgaaaaattatcctctgggttttattaattcttgctgggcaaccacttgcccactaggcagcgaggaaagggactaggcagcgaggaaagggggaggaaggggaggagaaagcaatgcctaaagtcagcagtggtagccgaggaaatgattgtttgataatgcaccatgactttattcttttaccctggtgaattactccactgatgatgcgttcttg

SEQ ID NO: 12598 - protein, 329 aa, Triticum aestivum
  misc_feature (1)..(329): Ceres Seq. ID no. 14302446
MWNRPHPLSHSRPGALSPLLRVLPRAVAGPPPPSEHDRIRVAPPPRMDATSPSGRPTTPRRQLQLQGPRPPRLSVRPESHAIKKPSGAPPQAQGQGHARREEKQQGQPPREPVIIYDASPKIIHTKPSEFMALVQRLTGPGSGALPSEAQTQDYQMDEAVPGQSFLPPELLLSPSAAMSPAARLATIERSVRPMPAPTPDYVDFNNYRFDDGGLAAVLGAGRPGPGILSPLPSSLPPAAASVLFSPLPFDPNGLSWLNELSPILRAASTGAGSSGSGSGGGGTSNGGAYRQPQSYYSDPFVPSPRNLLATPTVPSPRTFAELMSNLPDL

SEQ ID NO: 12599 - protein, 283 aa, Triticum aestivum
  misc_feature (1)..(283): Ceres Seq. ID no. 14302447
MDATSPSGRPTTPRRQLQLQGPRPPRLSVRPESHAIKKPSGAPPQAQGQGHARREEKQQGQPPREPVIIYDASPKIIHTKPSEFMALVQRLTGPGSGALPSEAQTQDYQMDEAVPGQSFLPPELLLSPSAAMSPAARLATIERSVRPMPAPTPDYVDFNNYRFDDGGLAAVLGAGRPGPGILSPLPSSLPPAAASVLFSPLPFDPNGLSWLNELSPILRAASTGAGSSGSGSGGGGTSNGGAYRQPQSYYSDPFVPSPRNLLATPTVPSPRTFAELMSNLPDL

SEQ ID NO: 12600 - protein, 199 aa, Triticum aestivum
  misc_feature (1)..(199): Ceres Seq. ID no. 14302448
MALVQRLTGPGSGALPSEAQTQDYQMDEAVPGQSFLPPELLLSPSAAMSPAARLATIERSVRPMPAPTPDYVDFNNYRFDDGGLAAVLGAGRPGPGILSPLPSSLPPAAASVLFSPLPFDPNGLSWLNELSPILRAASTGAGSSGSGSGGGGTSNGGAYRQPQSYYSDPFVPSPRNLLATPTVPSPRTFAELMSNLPDL

SEQ ID NO: 12601 - DNA, 1177 bp, Triticum aestivum
  misc_feature (1)..(1177): Ceres Seq. ID no. 14302454
accccccactccccatctatccccgccccgcccgtcccggatccacaccgccgccgcgatgccgtcgttcaaggccccggcgccgggcttctccgtccgcttcagcccgttccacgagcatcgcctcctcgctgccacctcgcagcacttcggtctcgtcggcaacgggcacctcctggttctcgacctctccgccgccgggcccggcgggcccggcctcaccccgctcttctccttccccacctccgacgcgctcttcgactgcgcgtggtccgagtcccacgactccctctgcgccgccgcgtcgggggacggctccgtgcggctcttcgacgtcacgctgccgccggcgcagaaccccgtccgcctcctccgggagcacgcgcgggaggtccacgggatcgactggaaccccgtccgccgcgacgccttcctctccgcctcctgggacgacaccctcaagctctggtcccccgaccgccccgcctccgtccgcaccttccgcggccacgagtactgcgtctacgccgccgcgtggtcggcccggcacccggacgtcttcgcgtcggcgtccggcgaccacacggcccgcgtctgggacgtgcgggagccggggcccaccctcgtcatcccggcccacgaccacgaggtgctctccctggattgggacaagtacgacccgtccatcctggccaccggctccgtcgacaagtcgatccgcatctgggacgtccgctcgccgcaggcgcccctcgcccagctcgcggggcacgggtacgccgtcaagcgcgtcaagttctcgccgcatcggcagggcatgctcatgtcctgctcctacgacatgacggtctgcatgtgggattaccggaaagaggacgccctgctgcaaaggtacggccaccacaccgagttcgtagctgggatcgacatgagcgtgctcaccgatgggctgctggccagcaccggctgggacgagatgatctacgtttggccatttgggagtgatcccagagcaatgtaacacaacatattttgataatctgtatcatgtctgttgagtcgatcttacattggctgtgatacatatggaatggaatggaagtaaacacctggtgagttgaagttggaataatgctacggtaccattgtttgcttcacaaattggttaagtttttag

SEQ ID NO: 12602 - protein, 339 aa, Triticum aestivum
  misc_feature (1)..(339): Ceres Seq. ID no. 14302455
PPTPHLSPPRPSRIHTAAAMPSFKAPAPGFSVRFSPFHEHRLLAATSQHFGLVGNGHLLVLDLSAAGPGGPGLTPLFSFPTSDALFDCAWSESHDSLCAAASGDGSVRLFDVTLPPAQNPVRLLREHAREVHGIDWNPVRRDAFLSASWDDTLKLWSPDRPASVRTFRGHEYCVYAAAWSARHPDVFASASGDHTARVWDVREPGPTLVIPAHDHEVLSLDWDKYDPSILATGSVDKSIRIWDVRSPQAPLAQLAGHGYAVKRVKFSPHRQGMLMSCSYDMTVCMWDYRKEDALLQRYGHHTEFVAGIDMSVLTDGLLASTGWDEMIYVWPFGSDPRAM

SEQ ID NO: 12603 - protein, 334 aa, Triticum aestivum
  misc_feature (1)..(334): Ceres Seq. ID no. 14302456
TPHSPSIPAPPVPDPHRRRDAVVQGPGAGLLRPLQPVPRASPPRCHLAALRSRRQRAPPGSRPLRRRARRARPHPALLLPHLRRALRLRVVRVPRLPLRRRVGGRLRAALRRHAAAGAEPRPPPPGARAGGPRDRLEPRPPRRLPLRLLGRHPQALVPRPPRLRPHLPRPRVLRLRRRVVGPAPGRLRVGVRRPHGPRLGRAGAGAHPRHPGPRPRGALPGLGQVRPVHPGHRLRRQVDPHLGRPLAAGAPRPARGARVRRQARQVLAASAGHAHVLLLRHDGLHVGLPERGRPAAKVRPPHRVRSWDRHERAHRWAAGQHRLGRDDLRLAIWE

SEQ ID NO: 12604 - protein, 320 aa, Triticum aestivum
  misc_feature (1)..(320): Ceres Seq. ID no. 14302457
MPSFKAPAPGFSVRFSPFHEHRLLAATSQHFGLVGNGHLLVLDLSAAGPGGPGLTPLFSFPTSDALFDCAWSESHDSLCAAASGDGSVRLFDVTLPPAQNPVRLLREHAREVHGIDWNPVRRDAFLSASWDDTLKLWSPDRPASVRTFRGHEYCVYAAAWSARHPDVFASASGDHTARVWDVREPGPTLVIPAHDHEVLSLDWDKYDPSILATGSVDKSIRIWDVRSPQAPLAQLAGHGYAVKRVKFSPHRQGMLMSCSYDMTVCMWDYRKEDALLQRYGHHTEFVAGIDMSVLTDGLLASTGWDEMIYVWPFGSDPRAM

SEQ ID NO: 12605 - DNA, 2023 bp, Triticum aestivum
  misc_feature (1)..(2023): Ceres Seq. ID no. 14302458
gttagatctctgcttacagtagccgagtccccactgtgtagcgtagtgtgttctcttctcttctcccgtcacgcccaccccccttcttcccccctcactctccctcccacactctcagcagccgccgcccaagctgagagggcggggcacacacagaggcacgcatccggccagcagaccagcacggtgcgagcaatggagtatgagaggattcacaagccccaggcaggcgccctttctcccacaaagctgaggatgaagctcctgggagcccacaaccgcgtgagggtcatcagcagcagctcgtcgcgaacatcgccttcaaagaacgccgagccatcgctagcgcacaacagattattagtatgcgatgttcttgacgaagtttcagacagctccggtgcctccaaatgccctgcagcagtcagcaacaccgaagttatagacaaggatccagcagtagataggtacaaggttcagaacacgcccaagagttcagttcaccaaccggcgccgagcaactcaagcatgatacatccagtgcgaactgtcgaggaggacagtaacgaatgcgacagtggtcttgacaatgccagtaccagcagcttcgagttccatggaggtgagaagacggcggcgaagaacccaacggcggggtacttctcgagacaggcttcctccaagtggaacgacgcggagaaatggattgtgaacaagcagactgttcagcagaacaccaccaccaagggcgcatcgcagaaccagagtgcgcaccaggtgagttccgctgcgcccaggggcggtggcgttgtgcccaaacaccacggaacatttgctcgccccattcagaacatgaagagattcaatccggcttcgtcagcctctcggagcatattagagaggctgtctttcgcttcgcatcagccgaagctggtcaggcatgctgatgtctgtgcagatcaaggttctagcgccatctcggactatcagaagggtcaagctgaaaccgattcaattgcaattaagccctgcaatgatactgaagctatttctacagttcaggcggtgtctgtgagagatgtgggcacagaaatgactccaataccaagtcaagatccgtcaagaacaggaacaccacttgggtctgtgacaccgactcgcagccctaattgttcgataccatcaactcctgtaggtggacgatcgtcggcatcaataggagaagacaacgcagatgatggtccttatttcaacagaaaaggtggcatgaatgaaatgtcagaggatgaaatcaggctcaaggcaaggaaagaaatcgctgccctaggtgtacaactaggaaagatgaacattgcttcatgggctagtaaagaggagctagaattagtctctgcgacaccgagcatcgctgatctggagcggatgaagcaggaatacgctactcgtgctgcagcattcgaggatgctgaaaattctaaacacacggcacgattcaagaaggaagagctgaagatcgaagcatgggagagccgccaaagaacaaaagttgaatccgaaatgaagagactagaggaacgcgcggagaaaatgagaagcgaggccatggcgaggatggccgaaaggctggagctggcacgccgtgtggccgaggagaagcgggcatcagccaacgccaagatgaacaagcaagcagcaagggcagttcagaaggccgatctgattcgccagacaggacggattccagggtcgcgtatcctatgctgcggctgcttctgtgaaccttagcacttgtttaactactagcctgttaaaatatggtcgtgagaggaatctaatttcctcctatagtcagcattccctggttttttagtatgcaaaagggaatgtctggtctaggtgattcaggtgtacacattcttcattgtcatataaataatttgcttagtgtgaggtgtgccaggttcttgttttttttagaaaaaaaaaaaaaaaaaaaaaaaaaaaaaaaaaaaaaaaaaaaaag

SEQ ID NO: 12606 - protein, 594 aa, Triticum aestivum
  misc_feature (1)..(594): Ceres Seq. ID no. 14302459
VRSLLTVAESPLCSVVCSLLFSRHAHPPSSPLTLPPTLSAAAAQAERAGHTQRHASGQQTSTVRAMEYERIHKPQAGALSPTKLRMKLLGAHNRVRVISSSSSRTSPSKNAEPSLAHNRLLVCDVLDEVSDSSGASKCPAAVSNTEVIDKDPAVDRYKVQNTPKSSVHQPAPSNSSMIHPVRTVEEDSNECDSGLDNASTSSFEFHGGEKTAAKNPTAGYFSRQASSKWNDAEKWIVNKQTVQQNTTTKGASQNQSAHQVSSAAPRGGGVVPKHHGTFARPIQNMKRFNPASSASRSILERLSFASHQPKLVRHADVCADQGSSAISDYQKGQAETDSIAIKPCNDTEAISTVQAVSVRDVGTEMTPIPSQDPSRTGTPLGSVTPTRSPNCSIPSTPVGGRSSASIGEDNADDGPYFNRKGGMNEMSEDEIRLKARKEIAALGVQLGKMNIASWASKEELELVSATPSIADLERMKQEYATRAAAFEDAENSKHTARFKKEELKIEAWESRQRTKVESEMKRLEERAEKMRSEAMARMAERLELARRVAEEKRASANAKMNKQAARAVQKADLIRQTGRIPGSRILCCGCFCEP

SEQ ID NO: 12607 - protein, 529 aa, Triticum aestivum
  misc_feature (1)..(529): Ceres Seq. ID no. 14302460
MEYERIHKPQAGALSPTKLRMKLLGAHNRVRVISSSSSRTSPSKNAEPSLAHNRLLVCDVLDEVSDSSGASKCPAAVSNTEVIDKDPAVDRYKVQNTPKSSVHQPAPSNSSMIHPVRTVEEDSNECDSGLDNASTSSFEFHGGEKTAAKNPTAGYFSRQASSKWNDAEKWIVNKQTVQQNTTTKGASQNQSAHQVSSAAPRGGGVVPKHHGTFARPIQNMKRFNPASSASRSILERLSFASHQPKLVRHADVCADQGSSAISDYQKGQAETDSIAIKPCNDTEAISTVQAVSVRDVGTEMTPIPSQDPSRTGTPLGSVTPTRSPNCSIPSTPVGGRSSASIGEDNADDGPYFNRKGGMNEMSEDEIRLKARKEIAALGVQLGKMNIASWASKEELELVSATPSIADLERMKQEYATRAAAFEDAENSKHTARFKKEELKIEAWESRQRTKVESEMKRLEERAEKMRSEAMARMAERLELARRVAEEKRASANAKMNKQAARAVQKADLIRQTGRIPGSRILCCGCFCEP

SEQ ID NO: 12608 - protein, 509 aa, Triticum aestivum
  misc_feature (1)..(509): Ceres Seq. ID no. 14302461
MKLLGAHNRVRVISSSSSRTSPSKNAEPSLAHNRLLVCDVLDEVSDSSGASKCPAAVSNTEVIDKDPAVDRYKVQNTPKSSVHQPAPSNSSMIHPVRTVEEDSNECDSGLDNASTSSFEFHGGEKTAAKNPTAGYFSRQASSKWNDAEKWIVNKQTVQQNTTTKGASQNQSAHQVSSAAPRGGGVVPKHHGTFARPIQNMKRFNPASSASRSILERLSFASHQPKLVRHADVCADQGSSAISDYQKGQAETDSIAIKPCNDTEAISTVQAVSVRDVGTEMTPIPSQDPSRTGTPLGSVTPTRSPNCSIPSTPVGGRSSASIGEDNADDGPYFNRKGGMNEMSEDEIRLKARKEIAALGVQLGKMNIASWASKEELELVSATPSIADLERMKQEYATRAAAFEDAENSKHTARFKKEELKIEAWESRQRTKVESEMKRLEERAEKMRSEAMARMAERLELARRVAEEKRASANAKMNKQAARAVQKADLIRQTGRIPGSRILCCGCFCEP

SEQ ID NO: 12609 - DNA, 1699 bp, Triticum aestivum
  misc_feature (1)..(1699): Ceres Seq. ID no. 14302742
actgctcctccctcctccctcctcctccacctcttccctcccctgacccctcgcctccaaattactatctccgtcggacgcacgcacgcgcgcggaaaggtttggttttgcggtgaccatgcaggcagcgacggtggcagcggcggcgaacggcgggggcgacgtgcagaagcagcagcaggtgggggcggcgccgctcccggcggtggcggcgctggcgccgccgccccattgggtggccatgccgttcgcgccgccgggcgccgcggccatggtggtgccgcaccagatggcgccggcgccgccccaccagttcgcgccgcacttcgtgccgttccacgccgtcgcaccgccgcccccgccgctgcagccgcgcccggcgcacgtcgccatgggctcgcccgcccccgccgcgcagcccggccaggaggagaacaagaccatctgggtcggcgacctccattactggatggacgagaactacctccacacctgcttcggctacaccggcgaggttgtcgcaatcaaggttattcgtaataagcaaaccggacaatcagaaggatatggatttgtagagttctacagtcatgctgcagctgaaaaagtacttgatggttttgctgggcatataatgccaaatactgaccaaccttttaggataaactgggcatcatttagcatgggggataggcgctcggacattgcttcagatcattccatatttgtaggcgatcttgcctctgatgtcaatgatactgcattgctagagactttctccagcaggtactcctctgtcaaaggtgcaaaagttgttattgatgctaacactggtagatccaagggctatggctttgtgcggtttggagatgatagtgagaagacaaacgccatgactgagatgaatggagtgtattgctcaactaggcccatgaggattggccctgcaactcccagaaaatcttcaggtacttctggatctactgtttcatctgctcgatcagacggagatttgacaaacacaactgtatttgtcggtgggcttgacccaaatgttagtgaagatgatcttaagcaaaccttctcccagtatggcgagatttcctctgtgaagattccagttgggaaacagtgcgggtttgtgcagtttcttcagagaaagaatgcagaagatgcattgcaagggctgaacgggagcaccattgggaaacagaccgtgcgcctttcatggggtcgcaatccagcaaacaagcagttgaggagtgacaacggcaaccagtggaacaacgggatgtactacgcgccctcgcccttctacaacgggtacggctaccccgcggcaccgttccctgacccgggcatgtacgccgctgcctatggcgcataccccgtctacgggaaccagcaacaggtcagctgaagatcggaggatcacacgcccatcgatccctcgacaacaacccgaggcgcgcacgcagtagctgtagctcttgctagagaaagaaggtagacgatgacggcttcttaggtgagctagatgtagtgactggtcatgtaaagtacattactattacgaagaactagcaccactaaggcacctaaaatgactcgaccgccatggccgtctagctggattgttctagggaaaaaaaaagttttggcatagagctgcaatataaggtagaacaataatctattc

SEQ ID NO: 12610 - protein, 433 aa, Triticum aestivum
  misc_feature (1)..(433): Ceres Seq. ID no. 14302743
MQAATVAAAANGGGDVQKQQQVGAAPLPAVAALAPPPHWVAMPFAPPGAAAMVVPHQMAPAPPHQFAPHFVPFHAVAPPPPPLQPRPAHVAMGSPAPAAQPGQEENKTIWVGDLHYWMDENYLHTCFGYTGEVVAIKVIRNKQTGQSEGYGFVEFYSHAAAEKVLDGFAGHIMPNTDQPFRINWASFSMGDRRSDIASDHSIFVGDLASDVNDTALLETFSSRYSSVKGAKVVIDANTGRSKGYGFVRFGDDSEKTNAMTEMNGVYCSTRPMRIGPATPRKSSGTSGSTVSSARSDGDLTNTTVFVGGLDPNVSEDDLKQTFSQYGEISSVKIPVGKQCGFVQFLQRKNAEDALQGLNGSTIGKQTVRLSWGRNPANKQLRSDNGNQWNNGMYYAPSPFYNGYGYPAAPFPDPGMYAAAYGAYPVYGNQQQVS

SEQ ID NO: 12611 - protein, 392 aa, Triticum aestivum
  misc_feature (1)..(392): Ceres Seq. ID no. 14302744
MPFAPPGAAAMVVPHQMAPAPPHQFAPHFVPFHAVAPPPPPLQPRPAHVAMGSPAPAAQPGQEENKTIWVGDLHYWMDENYLHTCFGYTGEVVAIKVIRNKQTGQSEGYGFVEFYSHAAAEKVLDGFAGHIMPNTDQPFRINWASFSMGDRRSDIASDHSIFVGDLASDVNDTALLETFSSRYSSVKGAKVVIDANTGRSKGYGFVRFGDDSEKTNAMTEMNGVYCSTRPMRIGPATPRKSSGTSGSTVSSARSDGDLTNTTVFVGGLDPNVSEDDLKQTFSQYGEISSVKIPVGKQCGFVQFLQRKNAEDALQGLNGSTIGKQTVRLSWGRNPANKQLRSDNGNQWNNGMYYAPSPFYNGYGYPAAPFPDPGMYAAAYGAYPVYGNQQQVS

SEQ ID NO: 12612 - protein, 382 aa, Triticum aestivum
  misc_feature (1)..(382): Ceres Seq. ID no. 14302745
MVVPHQMAPAPPHQFAPHFVPFHAVAPPPPPLQPRPAHVAMGSPAPAAQPGQEENKTIWVGDLHYWMDENYLHTCFGYTGEVVAIKVIRNKQTGQSEGYGFVEFYSHAAAEKVLDGFAGHIMPNTDQPFRINWASFSMGDRRSDIASDHSIFVGDLASDVNDTALLETFSSRYSSVKGAKVVIDANTGRSKGYGFVRFGDDSEKTNAMTEMNGVYCSTRPMRIGPATPRKSSGTSGSTVSSARSDGDLTNTTVFVGGLDPNVSEDDLKQTFSQYGEISSVKIPVGKQCGFVQFLQRKNAEDALQGLNGSTIGKQTVRLSWGRNPANKQLRSDNGNQWNNGMYYAPSPFYNGYGYPAAPFPDPGMYAAAYGAYPVYGNQQQVS

SEQ ID NO: 12613 - DNA, 1916 bp, Triticum aestivum
  misc_feature (1)..(1916): Ceres Seq. ID no. 14302746
ctcgctcctcctccgtccatccacaactcaattgctgccaaatcttagcgctgcacccaccgcctccgtttggttccctggattcttctccgcgcccgcgagaaatctgggtgatgagatgatgaggacggcggcggtgctgttcctctgctttttcgccttcgccggcagcggctggggcggagcgcgggtcgcggccgtatgggcggagggggtcagacagacggcggcggtggtggtggaccctgcctggcgcttccctagcccgcggctgcgggacgcgtacgtcgcgctgcagacatggaagcagcaggccatcttctccgaccccaagaacctcaccggcgactgggtgggtcccgcggtctgcggctacaccggcgtgttctgcgcgcctgctccgtcgtcgggcgagctcgccgtcgccggcatcgacctcaaccacggcgacatcgcgggctacctcccgtcggagctcggcctcctctgcgacctcgcgctgctccacctcaactccaaccgcttctgcggcctcgtgcccgacaccttccgccggctcgtcctcctccacgagctcgacctcagcaacaaccgcttcgtgggcgcgttcccgaccgtcgtgctcgacctcccgtccctcaggttcctcgacctccgcttcaacgacttcgagggcggcgtgccgcgggagctcttcgaccgcccgttcgacgccatcttcctcaaccacaatcgcctccgcttccagctccccgacaacttcggcaattcgcccgtgtccgtcatcgtcctcgccaacaaccacttcggcggctgcctcccggcgagcctcggcaacatgtccgacacgctcaacgagatcctcctcatcaacaacggcctcacctcgtgcctcccggcggaggtcgggatgctccgggaggtgacggtgttcgacgtcagcttcaacgccctcgcagggccgctgccgccggaggtggccgggatgcaaaaggtggagcagctcgacatcgcgcacaacctgctgtcggggaccgtgccggaggccgtgtgcgacctcccacggctcaagaacttcaccttctcctacaacttcttcaccggcgagccgccgtcctgcgcgcgcgtcgtgcctgccgacggcgaccgccggaactgcctccccaaccgccccgcccagcgcatgccgcagcagtgcgccgctttctatgcccgcccgcccgtcgactgcgcagctttccagtgcaagccgtttgtcccacctcggccacccccaccgccagcataccccggcccgttgccgccagtgtaccccatgccatacgcgtcgccgccgccgcctccacgttaccgatgattctttgacaacagaagcattgccagtttcactttcccttgccgcaccccttgccgccggtgtggaagagccagcggagctcgccgtcacaaaagtacgtggtcattgttgttcgtggattaccagttcttgattgatagctaccggcgtaaagaagaacgtggtgcatatatccttttcttgtttttttgcattggttggtgtctgttttccgcatcgtcgtcttcgatcatccgtttgcgcggtggcgatggcgaaaaggattggagcatggtgataaggaaatttgaaaggtgggagcaaattgggcttggattgatggctaattgggttgtgaataataaactggctgagagagacaggttaagctgagattgagaaatccatggaaaagttgtgatgcgggatgtatagaatgatacttttagttcggtaaagctctagttgagggtcagagataagtttctacatcaagagatttgtcctactgaattcctcttgtgtcacagctgcttactgttattcgattattattattaagatgtttagttgggcttct

SEQ ID NO: 12614 - protein, 451 aa, Triticum aestivum
  misc_feature (1)..(451): Ceres Seq. ID no. 14302747
SLLLRPSTTQLLPNLSAAPTASVWFPGFFSAPARNLGDEMMRTAAVLFLCFFAFAGSGWGGARVAAVWAEGVRQTAAVVVDPAWRFPSPRLRDAYVALQTWKQQAIFSDPKNLTGDWVGPAVCGYTGVFCAPAPSSGELAVAGIDLNHGDIAGYLPSELGLLCDLALLHLNSNRFCGLVPDTFRRLVLLHELDLSNNRFVGAFPTVVLDLPSLRFLDLRFNDFEGGVPRELFDRPFDAIFLNHNRLRFQLPDNFGNSPVSVIVLANNHFGGCLPASLGNMSDTLNEILLINNGLTSCLPAEVGMLREVTVFDVSFNALAGPLPPEVAGMQKVEQLDIAHNLLSGTVPEAVCDLPRLKNFTFSYNFFTGEPPSCARVVPADGDRRNCLPNRPAQRMPQQCAAFYARPPVDCAAFQCKPFVPPRPPPPPAYPGPLPPVYPMPYASPPPPPRYR

SEQ ID NO: 12615 - protein, 412 aa, Triticum aestivum
  misc_feature (1)..(412): Ceres Seq. ID no. 14302748
MMRTAAVLFLCFFAFAGSGWGGARVAAVWAEGVRQTAAVVVDPAWRFPSPRLRDAYVALQTWKQQAIFSDPKNLTGDWVGPAVCGYTGVFCAPAPSSGELAVAGIDLNHGDIAGYLPSELGLLCDLALLHLNSNRFCGLVPDTFRRLVLLHELDLSNNRFVGAFPTVVLDLPSLRFLDLRFNDFEGGVPRELFDRPFDAIFLNHNRLRFQLPDNFGNSPVSVIVLANNHFGGCLPASLGNMSDTLNEILLINNGLTSCLPAEVGMLREVTVFDVSFNALAGPLPPEVAGMQKVEQLDIAHNLLSGTVPEAVCDLPRLKNFTFSYNFFTGEPPSCARVVPADGDRRNCLPNRPAQRMPQQCAAFYARPPVDCAAFQCKPFVPPRPPPPPAYPGPLPPVYPMPYASPPPPPRYR

SEQ ID NO: 12616 - protein, 411 aa, Triticum aestivum
  misc_feature (1)..(411): Ceres Seq. ID no. 14302749
MRTAAVLFLCFFAFAGSGWGGARVAAVWAEGVRQTAAVVVDPAWRFPSPRLRDAYVALQTWKQQAIFSDPKNLTGDWVGPAVCGYTGVFCAPAPSSGELAVAGIDLNHGDIAGYLPSELGLLCDLALLHLNSNRFCGLVPDTFRRLVLLHELDLSNNRFVGAFPTVVLDLPSLRFLDLRFNDFEGGVPRELFDRPFDAIFLNHNRLRFQLPDNFGNSPVSVIVLANNHFGGCLPASLGNMSDTLNEILLINNGLTSCLPAEVGMLREVTVFDVSFNALAGPLPPEVAGMQKVEQLDIAHNLLSGTVPEAVCDLPRLKNFTFSYNFFTGEPPSCARVVPADGDRRNCLPNRPAQRMPQQCAAFYARPPVDCAAFQCKPFVPPRPPPPPAYPGPLPPVYPMPYASPPPPPRYR

SEQ ID NO: 12617 - DNA, 1422 bp, Triticum aestivum
  misc_feature (1)..(1422): Ceres Seq. ID no. 14302776
atcccgcacccaccattgagagaagcagcagcacgagcagcacatgtcacagagggccagcgtcccacactcctcctgcatagccttcgccctccattcccacctcctcgtgtcctctgagatgtgccccagctcctactgggaatagaatagccacccccgcccaaatcccacacctttttcgtttttgatttcctctcttctttagattttttttctagatctttgggggcctccaattcgtccgtccgcgagggggaagcgaggggaagatgggcgtcaaggggttcgtcgagggcggcatcgcctccatcgtcgccggctgctccacccaccctctcgacctcatcaaggtccggatgcagctgcagggggagtcctccgcggccgcggcccagcccgcgctccgcccggcgctcgccttccaggccggggcgcacaccgtgacgctcccgcacgcgcccacgccggtgcccaagcccggcccgattggcatctgcacgcagatcctgcgcgccgagggcgccgccgggctcttctccgggatctcggccaccatgctgcgccagacgctctactccaccacgcggatggggctctacgacatcctcaagaagcgctggacccaggagaacgccggcgtgctgccgctgcaccgcaagatcgccgccggcctcatcgccggcggcgtcggcgcggccgtcggcaacccggccgacctggccatggtgcggatgcaggccgacggccgcctcccgctggccgaccgcaggaactaccgcagcgtgggcgacgccatcgcccggatgacgcgcgacgagggcgtgcgcagcctctggcgcggctccgcgctcacggtcaaccgcgccatgattgtcaccgcgtcgcagctggccacctacgaccaggccaaggaggccatcctggcccgccgcggcccggccgccgacgggctgggcacgcacgtggccgccagcttcgccgcgggcatcgtggccgccgccgcgtccaaccccgtggacgtggtcaagaccagggtgatgaacatgaaggtggcgcccggcgcgccccctccgtacgccggggccctggactgcgcgctcaagacggtgcggtcggagggcgtgatggcgctctacaaggggttcatccccacggtgtcgcgccaggggcccttcaccgtggtgctcttcgtcaccctggagcaggtgcgcaaggtcttcaaggacgtcgagttctaatgcagtgcagaccaccgcacggcgcggcgccatggatccatgatgatgacgacaagaagctgcccattgatgccgctgctgctaagaataactagtagtaccgctggagggatttctccagttcctgcctctcattttattcggatgaatttgatcgattttgaatgaaattctcattttc

SEQ ID NO: 12618 - protein, 322 aa, Triticum aestivum
  misc_feature (1)..(322): Ceres Seq. ID no. 14302777
MGVKGFVEGGIASIVAGCSTHPLDLIKVRMQLQGESSAAAAQPALRPALAFQAGAHTVTLPHAPTPVPKPGPIGICTQILRAEGAAGLFSGISATMLRQTLYSTTRMGLYDILKKRWTQENAGVLPLHRKIAAGLIAGGVGAAVGNPADLAMVRMQADGRLPLADRRNYRSVGDAIARMTRDEGVRSLWRGSALTVNRAMIVTASQLATYDQAKEAILARRGPAADGLGTHVAASFAAGIVAAAASNPVDVVKTRVMNMKVAPGAPPPYAGALDCALKTVRSEGVMALYKGFIPTVSRQGPFTVVLFVTLEQVRKVFKDVEF

SEQ ID NO: 12619 - protein, 293 aa, Triticum aestivum
  misc_feature (1)..(293): Ceres Seq. ID no. 14302778
MQLQGESSAAAAQPALRPALAFQAGAHTVTLPHAPTPVPKPGPIGICTQILRAEGAAGLFSGISATMLRQTLYSTTRMGLYDILKKRWTQENAGVLPLHRKIAAGLIAGGVGAAVGNPADLAMVRMQADGRLPLADRRNYRSVGDAIARMTRDEGVRSLWRGSALTVNRAMIVTASQLATYDQAKEAILARRGPAADGLGTHVAASFAAGIVAAAASNPVDVVKTRVMNMKVAPGAPPPYAGALDCALKTVRSEGVMALYKGFIPTVSRQGPFTVVLFVTLEQVRKVFKDVEF

SEQ ID NO: 12620 - protein, 227 aa, Triticum aestivum
  misc_feature (1)..(227): Ceres Seq. ID no. 14302779
MLRQTLYSTTRMGLYDILKKRWTQENAGVLPLHRKIAAGLIAGGVGAAVGNPADLAMVRMQADGRLPLADRRNYRSVGDAIARMTRDEGVRSLWRGSALTVNRAMIVTASQLATYDQAKEAILARRGPAADGLGTHVAASFAAGIVAAAASNPVDVVKTRVMNMKVAPGAPPPYAGALDCALKTVRSEGVMALYKGFIPTVSRQGPFTVVLFVTLEQVRKVFKDVEF

SEQ ID NO: 12621 - DNA, 1346 bp, Triticum aestivum
  misc_feature (1)..(1346): Ceres Seq. ID no. 14302780
cttttccccgtcagacgccagcaagctgcttgctttgcttcggttagctcgctgcgcggcgccgctctcggctcccccgcggccaggctgctcggatggcggggcggccggggtacgtcacgctgccgataatctcggtgttcgccgcgatcgggtacgtctactacaccgcggtgttcctcgcgatccccgcgtggctggggctcgccacggcggcgggggtcgccaacgtcgcggcctacaccgcgctcgcgctcgcctgcgtcgccgcctacggcctcgtcgtcacgcgcgacccgggccgcgtgccgcccgccttcgtgcccgacgtcgaggacacggagacccccctccatgagatcaagcgcaagggtggtgatttgagatactgccagaagtgttttcattataaacctcctcgcgcgcatcattgtcgtgtctgcaagagatgtattctgaaaatggatcaccactgtatttggattaacaattgtgttgggcatgagaattacaaaattttcctcgtctttgtgttgtatgctgcaaccgcaagcttctattctttggctctgatgattggaggcgtagtgcatagtgtgcctacagatgaacaatcaggaattgattctccaagaaaatcgttagttatttgtggcgtctttgtgggtgtaatgactttggcgttgtctatcctcttggtctggcatgtttacctcatcttacataataagactactattgagtaccatgaaggagttagggcaatgtggttggcagaaaaggctggaaatctttaccatcatccatatgatctcggtgtctatcataatattgtttcggtcctaggccccaacatgctatgctggttctgccctgtatcgaggaacataggcgacggcgttcgtttccgcacatcgtatgatattccgctatcgacaccaccatccaaagcagaaaagcatctggcaatgtcttgagctcttgcattgagagcgtatattgtgggatcaaatctgtgaatcatgccgcaagtgtaaggtacatagcgagggctgaggagcttcaagagtagttcctccaggccccagggatgtatctggagttagaaaccctaatctagctagttattccattatactttttggccagcttgatgagaagaatcaccgatgggcctcaatagatctggagtgacctggctcgcctgtactcatacaaaaagtctgaactgaagagtcaaagactgctctgttgtaaagtacgtgcctgtagtgtcgtttaccctgaagtccgtatattgcgtttttgtgtcagagagagttaagggacaaatgtcctatttactc

SEQ ID NO: 12622 - protein, 293 aa, Triticum aestivum
  misc_feature (1)..(293): Ceres Seq. ID no. 14302781
MAGRPGYVTLPIISVFAAIGYVYYTAVFLAIPAWLGLATAAGVANVAAYTALALACVAAYGLVVTRDPGRVPPAFVPDVEDTETPLHEIKRKGGDLRYCQKCFHYKPPRAHHCRVCKRCILKMDHHCIWINNCVGHENYKIFLVFVLYAATASFYSLALMIGGVVHSVPTDEQSGIDSPRKSLVICGVFVGVMTLALSILLVWHVYLILHNKTTIEYHEGVRAMWLAEKAGNLYHHPYDLGVYHNIVSVLGPNMLCWFCPVSRNIGDGVRFRTSYDIPLSTPPSKAEKHLAMS

SEQ ID NO: 12623 - protein, 171 aa, Triticum aestivum
  misc_feature (1)..(171): Ceres Seq. ID no. 14302782
MDHHCIWINNCVGHENYKIFLVFVLYAATASFYSLALMIGGVVHSVPTDEQSGIDSPRKSLVICGVFVGVMTLALSILLVWHVYLILHNKTTIEYHEGVRAMWLAEKAGNLYHHPYDLGVYHNIVSVLGPNMLCWFCPVSRNIGDGVRFRTSYDIPLSTPPSKAEKHLAMS

SEQ ID NO: 12624 - DNA, 1533 bp, Triticum aestivum
  misc_feature (1)..(1533): Ceres Seq. ID no. 14302824
ctctttcggtcttggaatccttcctccctcccttccctccgtgtcgcccgcgctccgcctaccggatcgcaattccgcatcgccccgccgcagccccagccccagccccggccaggcccccatggcgaggcgatccgccccgctcctccgccgcctggtctcctccgcgccgcccctcccgggccacggcggcggcgcgcgccgcacggtcacctacatgccccgcccgggcgatggcaccccgcgccccgtcacgctcatcccgggcgacggcatcggacccctcgtcaccggcgccgtggagcaggtcatggaggccatgcacgcgcccgtctacttcgagtcctacgacgtccacggcgacatgcccgccgtgccgcccgccgtcatcgaatccatccgccgcaacaaggtctgcctcaagggcggcctcgccacccccgtcggcgggggcgtctcctccctcaacatgcagctccgcaaggagctcgacctcttcgcctccctcgtcaactgcgccaacgtccccggcctgcccaccaggcaccagaacgtcgacatcgtcgtcatcagggagaacaccgagggcgagtactcgggcctcgagcacgaggtcgtcccgggggtcgtcgagagcctcaaggtgatcacgaagttttgctccgagaggattgccaaatatgccttcgagtatgcttaccttaactaccggaagaaagtcacagcagtgcataaagcaaacatcatgaaacttgctgatggtttgttcttggagtcttgccgtgagattgctgctaaatatccaagtattgagtataatgaaatcattgttgacaactgctgcatgcaacttgtttcaaggcctgagcaatttgatgttatggttacgcctaacctttacggcaatttggttgccaacacagctgcaggtcttgttggaggaacaggtgtcatgccaggaggtaatgtaggtcaggatcatgccatcttcgagcaaggtgcttctgcaggaaatgtgggaaatgacaatcttgtagagcagcagaaagcaaaccctgtcgccctgctcctgtcgtctgctatgatgttgaggcatttgcagttcccgtcgttcgctgaccgtctggaaactgcggtgaagcgggtcattgcagatggcaagtacaggacaaaggatctgggcggcaccagcaccacccaggaagttactgatgcagtgatcgctaatctggattaggtacctgatgcacgcctgaagaatcgattcttttggaggactggtttaaaggtcccaactcctgagtgctattttttccgtacagcattagatcggcaattatgtttgagaaataattgaggaacccacgaggattattcttcccactatactttgtagcaaggcaaaacaccttgtgttgcagaggggatagctggctaccttaaatttaaacggcatgtattgaaagtttattctcagttcttattcgtggttatcactcccatggaaccggaaatctggtcctctttttcagt

SEQ ID NO: 12625 - protein, 411 aa, Triticum aestivum
  misc_feature (1)..(411): Ceres Seq. ID no. 14302825
SFGLGILPPSLPSVSPALRLPDRNSASPRRSPSPSPGQAPMARRSAPLLRRLVSSAPPLPGHGGGARRTVTYMPRPGDGTPRPVTLIPGDGIGPLVTGAVEQVMEAMHAPVYFESYDVHGDMPAVPPAVIESIRRNKVCLKGGLATPVGGGVSSLNMQLRKELDLFASLVNCANVPGLPTRHQNVDIVVIRENTEGEYSGLEHEVVPGVVESLKVITKFCSERIAKYAFEYAYLNYRKKVTAVHKANIMKLADGLFLESCREIAAKYPSIEYNEIIVDNCCMQLVSRPEQFDVMVTPNLYGNLVANTAAGLVGGTGVMPGGNVGQDHAIFEQGASAGNVGNDNLVEQQKANPVALLLSSAMMLRHLQFPSFADRLETAVKRVIADGKYRTKDLGGTSTTQEVTDAVIANLD

SEQ ID NO: 12626 - protein, 371 aa, Triticum aestivum
  misc_feature (1)..(371): Ceres Seq. ID no. 14302826
MARRSAPLLRRLVSSAPPLPGHGGGARRTVTYMPRPGDGTPRPVTLIPGDGIGPLVTGAVEQVMEAMHAPVYFESYDVHGDMPAVPPAVIESIRRNKVCLKGGLATPVGGGVSSLNMQLRKELDLFASLVNCANVPGLPTRHQNVDIVVIRENTEGEYSGLEHEVVPGVVESLKVITKFCSERIAKYAFEYAYLNYRKKVTAVHKANIMKLADGLFLESCREIAAKYPSIEYNEIIVDNCCMQLVSRPEQFDVMVTPNLYGNLVANTAAGLVGGTGVMPGGNVGQDHAIFEQGASAGNVGNDNLVEQQKANPVALLLSSAMMLRHLQFPSFADRLETAVKRVIADGKYRTKDLGGTSTTQEVTDAVIANLD

SEQ ID NO: 12627 - protein, 339 aa, Triticum aestivum
  misc_feature (1)..(339): Ceres Seq. ID no. 14302827
MPRPGDGTPRPVTLIPGDGIGPLVTGAVEQVMEAMHAPVYFESYDVHGDMPAVPPAVIESIRRNKVCLKGGLATPVGGGVSSLNMQLRKELDLFASLVNCANVPGLPTRHQNVDIVVIRENTEGEYSGLEHEVVPGVVESLKVITKFCSERIAKYAFEYAYLNYRKKVTAVHKANIMKLADGLFLESCREIAAKYPSIEYNEIIVDNCCMQLVSRPEQFDVMVTPNLYGNLVANTAAGLVGGTGVMPGGNVGQDHAIFEQGASAGNVGNDNLVEQQKANPVALLLSSAMMLRHLQFPSFADRLETAVKRVIADGKYRTKDLGGTSTTQEVTDAVIANLD

SEQ ID NO: 12628 - DNA, 1426 bp, Triticum aestivum
  misc_feature (1)..(1426): Ceres Seq. ID no. 14302836
ccattccattccatcccccttcatcttcttgtagccaccgagccagccagcgaccgagcggcggcgatttccatttcatctcagaattcagacggtgttcttgtctagagcaagaggggtttcttggcgttgatgtcgatggcgcaggtgtgctgtgactcggcctcgtcggcggtggtggtcggtgcggaggcggaggccagggccagggcgcgcgccgggaggcgccgcagagcgggcgacgcggcagccaggtggaaggtcaccgcggaggcgccgcagggcgccgaggaggccgcggccacgaggaagcgccgcgcggctgggggcgagggggtgcccgcgaaacgccacgggttcacgtcggttgccggacggaggagggagatggaggatgccgtctccatacgggaggccttcaccgtcccggccgaggaggggaagcccaggcgcgacttctacggcgttttcgacggacacggctgctcgcacgtggcggacgcgtgcagagaccggatgcacgagctcgttgccgaggagctcgccggcgcggcccagcccgagtcctggaccggcgcaatggagcgcagtttcgcgaggatggacgccgaggtgaccgccagcgggggcggcgacagcgccagctgccgctgcgaggccaacaagtgcgaccacgtggggtccacggccgtggtggccgtcgtgggggagcagcgcgtcctggtggccaactgcggcgactcccgcgccgtcctctgccgcgacggcgcgcccgtcgtcctctcctccgaccacaagcccgacaggccggacgagctggagaggatcgaggcggccggcggccgcgtcatattctgggagggcgcgagggtgctgggcgttctggccatgtcgcgcgccatcggcgacggctacctgaagccgttcgtgacggcggtcccggaggtgacggtgaccgacagggcggccggcgacgagtgcctgatccttgccagcgacggcctgtgggacgtggtcaacaacgagacagcgtgcgaggtggcgcgggcctgcctccggaggggcagagacaggtggtgcgccgaggcggcggccatgctcaccaagctggctctgaccaagaacagctcggacaacatctccgttgtcgtcgtcgatctccggccaaggaatcatttgtaggagggcgaccagctgccgtgatcttccattgcaacaatagcagtatagtagtagtaacagtaggatcaaatccaaaactagctctatagtgattctactgattatttctcttcttcaaaattcatttttttttttttttttttttttttttgcaatatttctccctggatcaagttcagtggagcacatagattatggtggggttgtggaaagaaataacaactggtgtaaccaagttcgatcc

SEQ ID NO: 12629 - protein, 349 aa, Triticum aestivum
  misc_feature (1)..(349): Ceres Seq. ID no. 14302837
MSMAQVCCDSASSAVVVGAEAEARARARAGRRRRAGDAAARWKVTAEAPQGAEEAAATRKRRAAGGEGVPAKRHGFTSVAGRRREMEDAVSIREAFTVPAEEGKPRRDFYGVFDGHGCSHVADACRDRMHELVAEELAGAAQPESWTGAMERSFARMDAEVTASGGGDSASCRCEANKCDHVGSTAVVAVVGEQRVLVANCGDSRAVLCRDGAPVVLSSDHKPDRPDELERIEAAGGRVIFWEGARVLGVLAMSRAIGDGYLKPFVTAVPEVTVTDRAAGDECLILASDGLWDVVNNETACEVARACLRRGRDRWCAEAAAMLTKLALTKNSSDNISVVVVDLRPRNHL

SEQ ID NO: 12630 - protein, 347 aa, Triticum aestivum
  misc_feature (1)..(347): Ceres Seq. ID no. 14302838
MAQVCCDSASSAVVVGAEAEARARARAGRRRRAGDAAARWKVTAEAPQGAEEAAATRKRRAAGGEGVPAKRHGFTSVAGRRREMEDAVSIREAFTVPAEEGKPRRDFYGVFDGHGCSHVADACRDRMHELVAEELAGAAQPESWTGAMERSFARMDAEVTASGGGDSASCRCEANKCDHVGSTAVVAVVGEQRVLVANCGDSRAVLCRDGAPVVLSSDHKPDRPDELERIEAAGGRVIFWEGARVLGVLAMSRAIGDGYLKPFVTAVPEVTVTDRAAGDECLILASDGLWDVVNNETACEVARACLRRGRDRWCAEAAAMLTKLALTKNSSDNISVVVVDLRPRNHL

SEQ ID NO: 12631 - protein, 264 aa, Triticum aestivum
  misc_feature (1)..(264): Ceres Seq. ID no. 14302839
MEDAVSIREAFTVPAEEGKPRRDFYGVFDGHGCSHVADACRDRMHELVAEELAGAAQPESWTGAMERSFARMDAEVTASGGGDSASCRCEANKCDHVGSTAVVAVVGEQRVLVANCGDSRAVLCRDGAPVVLSSDHKPDRPDELERIEAAGGRVIFWEGARVLGVLAMSRAIGDGYLKPFVTAVPEVTVTDRAAGDECLILASDGLWDVVNNETACEVARACLRRGRDRWCAEAAAMLTKLALTKNSSDNISVVVVDLRPRNHL

SEQ ID NO: 12632 - DNA, 1347 bp, Triticum aestivum
  misc_feature (1)..(1347): Ceres Seq. ID no. 14302840
tctctcgactcattctcacggtcgtcaccagctatcgattcgcaacacagccgtcaagcccagccccgaggaaggaaggaaggaaaggaaggaataggtcggcgccgccatggagatgctgagcatgctgaaggtggggtacacggtgctgcgcagcgagacgccggcgacggacctcgtcaacaccttcatggactgggcggctcgccggtcgctcctccttctggcgctcttcatgcccccctactacgtctacaagctcaccgcgtcggccgccgccaccgtcgcgccgcaggacgtcgcggggaaggtcgtgctcgtcacgggcgcctcctccggcatcggcgagcaaatagcttaccagtacgcgaagaagggagcgaggctggccctggtggcacggagggagggaagcctgcgcgaggtcgccgccaaggcgaccgatctcggctcgccggacgtgctcgttgtgcccggggacgtggcgaggccggaggactgtaaggcgttcgtccaggccacagtcgagcgctttggccggttggatcatctcgtgaacaatgccggtctggtcaacgtgtgctggttcgaggagatgcccgacgtcgccactttcaagcaagtcttggacgtgaacttctggggcacggtgcatccaacccacgccgctcttcctcacctgacgaggagccgcggcaagatcttcgtcaactcctcggccgcggcggtgctggcaatgcctaggatgagcttctacaatgctagcaaggctgccgtgctgagcttcgccgacaccctgcggatggagctcggcgacgaggtgggcgtcacggtggcgacgcccggatggatcgagtccgagatgaccaaggggaagcacctctccaaaggagggagagtcgaggtcgatcaagacacgagggatgctcaggtggggctgtttccggtggtgcgtgccgagcggtgcgccgaggccatcgtggacgccgtttgccgcggccggcgcagcgtcaccgtgccgctgtggtaccgggcgctgttcctctggcggtcgttggcgccggaggtgggcgacgtcctgcaacgcgtgttctaccgccggagctccggcgacgggggcaggcagatgagggcgaggagggtcctggaggtcacgggcgccaagcgcgtgctgcagccgccgtcgctgcacacctcggatatcaaacgggagtagatgctacgtgaataaatgaatgttccggtgtcgtactgcaaagaaaataagatagaatggcgaggtgtagatggatggtttgtgtaaatttaagttgcgttcgaactaagtatgattttgtttctacctac

SEQ ID NO: 12633 - protein, 368 aa, Triticum aestivum
  misc_feature (1)..(368): Ceres Seq. ID no. 14302841
MEMLSMLKVGYTVLRSETPATDLVNTFMDWAARRSLLLLALFMPPYYVYKLTASAAATVAPQDVAGKVVLVTGASSGIGEQIAYQYAKKGARLALVARREGSLREVAAKATDLGSPDVLVVPGDVARPEDCKAFVQATVERFGRLDHLVNNAGLVNVCWFEEMPDVATFKQVLDVNFWGTVHPTHAALPHLTRSRGKIFVNSSAAAVLAMPRMSFYNASKAAVLSFADTLRMELGDEVGVTVATPGWIESEMTKGKHLSKGGRVEVDQDTRDAQVGLFPVVRAERCAEAIVDAVCRGRRSVTVPLWYRALFLWRSLAPEVGDVLQRVFYRRSSGDGGRQMRARRVLEVTGAKRVLQPPSLHTSDIKRE

SEQ ID NO: 12634 - protein, 366 aa, Triticum aestivum
  misc_feature (1)..(366): Ceres Seq. ID no. 14302842
MLSMLKVGYTVLRSETPATDLVNTFMDWAARRSLLLLALFMPPYYVYKLTASAAATVAPQDVAGKVVLVTGASSGIGEQIAYQYAKKGARLALVARREGSLREVAAKATDLGSPDVLVVPGDVARPEDCKAFVQATVERFGRLDHLVNNAGLVNVCWFEEMPDVATFKQVLDVNFWGTVHPTHAALPHLTRSRGKIFVNSSAAAVLAMPRMSFYNASKAAVLSFADTLRMELGDEVGVTVATPGWIESEMTKGKHLSKGGRVEVDQDTRDAQVGLFPVVRAERCAEAIVDAVCRGRRSVTVPLWYRALFLWRSLAPEVGDVLQRVFYRRSSGDGGRQMRARRVLEVTGAKRVLQPPSLHTSDIKRE

SEQ ID NO: 12635 - protein, 363 aa, Triticum aestivum
  misc_feature (1)..(363): Ceres Seq. ID no. 14302843
MLKVGYTVLRSETPATDLVNTFMDWAARRSLLLLALFMPPYYVYKLTASAAATVAPQDVAGKVVLVTGASSGIGEQIAYQYAKKGARLALVARREGSLREVAAKATDLGSPDVLVVPGDVARPEDCKAFVQATVERFGRLDHLVNNAGLVNVCWFEEMPDVATFKQVLDVNFWGTVHPTHAALPHLTRSRGKIFVNSSAAAVLAMPRMSFYNASKAAVLSFADTLRMELGDEVGVTVATPGWIESEMTKGKHLSKGGRVEVDQDTRDAQVGLFPVVRAERCAEAIVDAVCRGRRSVTVPLWYRALFLWRSLAPEVGDVLQRVFYRRSSGDGGRQMRARRVLEVTGAKRVLQPPSLHTSDIKRE

SEQ ID NO: 12636 - DNA, 1477 bp, Triticum aestivum
  misc_feature (1)..(1477): Ceres Seq. ID no. 14302844
acactccaactcagtggcaacagcatctcccctgttccgcccgcccgctcgcctctgtttcttttctttctttccacagcggctctgctccgctcctcacctccctcgatcgcacataccatatttggtagctcagcacagccatggtggttcttgccagcacgcccgccgtcgatcacatcccgctcctcaggtcccccgaccccggggactacttctccggcatgccggttgtcgacctctccagccctggcgcgccgcgggccatcgccgacgcctgcgagcgcttcgggttcttcaagctcgtcaaccacggggtgccagcggacacgatggacaggctcgagtcagaggccgtcaggttcttctcgctgccgcaggccgacaaggaccgctccggcccggcctacccgttcggctacggcagcaagcgcatcgggctcaatggcgacatgggctggctcgagtacctcctcctcgccgtcgagtccgcgtcgctctccggcgcctgcaccgtcccgtcctgcgcgctcttccgggcggcgctgaacgagtacatcgcggcggtgcggaaggtggcggtgcgggtgatggaggcgatggcggaggggctgggcattgcgcccgttgacgcgctgagcgcgatggtgacggcgggggggagcgaccaggtgttccgggtgaaccactacccgccgtgccacgcgctgcaagggctgggctgcagcgccacaggcttcggcgagcacaccgacccgcagctcatctccgtgctgcgctccaacggcacgtccggcctgcagatcgcgctccagaacgggcagtgggtgtccgtgccctcggaccgcgacgccttcttcgtcaacgtcggcgactcgttgcaggtgctgaccaacgggaggttcaagagcgtgaagcacagggtggtggccaacagcctaaagtctagggtttccatgatctactttggagggccagcgatgacacagaggattgcaccattgccgcagctgctgggcgcgggagagcagagcctgtacaaggacttcacatggggcgagtacaagaaggctgcctacaactcgaggctcggggacaacaggctggctcagttccacaggtagcctcgcctgccgcctgggcctgctcaaggagcagcttttaccaagccagctagctctagcttagctagctctgccgtggcttgtatttcccacacgatcgatgaagatcaagagggggggaagctactactagaaaagaaaaagaaacagggctaaaagaagatgatttcaagattcacatgcagtagtagagctgcggaggtagctagatcctttttgcgtgtgcgcgtgcgtgtgtgttcatagttgctaaaactcgcctttcctattcgggaatgccggacgaacgatgaacagataagttaacttgatgaatagttagtgtgaaccagatacagcagaggattggcatc

SEQ ID NO: 12637 - protein, 326 aa, Triticum aestivum
  misc_feature (1)..(326): Ceres Seq. ID no. 14302845
MVVLASTPAVDHIPLLRSPDPGDYFSGMPVVDLSSPGAPRAIADACERFGFFKLVNHGVPADTMDRLESEAVRFFSLPQADKDRSGPAYPFGYGSKRIGLNGDMGWLEYLLLAVESASLSGACTVPSCALFRAALNEYIAAVRKVAVRVMEAMAEGLGIAPVDALSAMVTAGGSDQVFRVNHYPPCHALQGLGCSATGFGEHTDPQLISVLRSNGTSGLQIALQNGQWVSVPSDRDAFFVNVGDSLQVLTNGRFKSVKHRVVANSLKSRVSMIYFGGPAMTQRIAPLPQLLGAGEQSLYKDFTWGEYKKAAYNSRLGDNRLAQFHR

SEQ ID NO: 12638 - protein, 299 aa, Triticum aestivum
  misc_feature (1)..(299): Ceres Seq. ID no. 14302846
MPVVDLSSPGAPRAIADACERFGFFKLVNHGVPADTMDRLESEAVRFFSLPQADKDRSGPAYPFGYGSKRIGLNGDMGWLEYLLLAVESASLSGACTVPSCALFRAALNEYIAAVRKVAVRVMEAMAEGLGIAPVDALSAMVTAGGSDQVFRVNHYPPCHALQGLGCSATGFGEHTDPQLISVLRSNGTSGLQIALQNGQWVSVPSDRDAFFVNVGDSLQVLTNGRFKSVKHRVVANSLKSRVSMIYFGGPAMTQRIAPLPQLLGAGEQSLYKDFTWGEYKKAAYNSRLGDNRLAQFHR

SEQ ID NO: 12639 - protein, 263 aa, Triticum aestivum
  misc_feature (1)..(263): Ceres Seq. ID no. 14302847
MDRLESEAVRFFSLPQADKDRSGPAYPFGYGSKRIGLNGDMGWLEYLLLAVESASLSGACTVPSCALFRAALNEYIAAVRKVAVRVMEAMAEGLGIAPVDALSAMVTAGGSDQVFRVNHYPPCHALQGLGCSATGFGEHTDPQLISVLRSNGTSGLQIALQNGQWVSVPSDRDAFFVNVGDSLQVLTNGRFKSVKHRVVANSLKSRVSMIYFGGPAMTQRIAPLPQLLGAGEQSLYKDFTWGEYKKAAYNSRLGDNRLAQFHR

SEQ ID NO: 12640 - DNA, 1415 bp, Triticum aestivum
  misc_feature (1)..(1415): Ceres Seq. ID no. 14302852
atcacaccatcacgatcgagcactcgcaacagcttcactcaactcgcagtgaagatcacctagagaccgactagcagtgatcgatggcgtccgtccggcgcccgtgcgcggtggcgctgctcgcctgcgccgccgcattcctcgtgacggtcggtgcccagccgaaggacaaccccattttgtcggaccccaacgtggtccccatctacatgagccccggcgcgcagcccaccgtggtgagctgctacaaccagagcagcccgtcgcaggccccagagtgcatgattccggtgcgccggtgccccgccggctgccgcgacctctgctacgtgcactgccccagctgcaagctcgtctgcatgtgtgaactggccggcacggagtgctacgacccgcgcttcgtgggtggcgacggcaacaagttcctcttccacggccgcagggacgccgacttctgcctgctctccgacgccaacctgcacatcaacgcgcacttcatcggcaagcgcaacgtgaaggcggcgcgtgacttcacatgggtgcaggcgctcggcatccgcttcggtggccaccgcctctacctcggcgtcaagaggacggtcacctgggacaacgccgtcgaccgcctcgtcatcaccttcgacggcgtgcccgtcgagctggacgcggcgccggccgccagctggagcccggcctccgcgcccgcgctgtctgtcttccgcatcggcaaggccaacggcgtggtggtgcgcctcgacggccggttccgcatcgtcgccaacgcggtgccggtgaccgaggaggactcgagggtccacgactacggcctcaccgccgacgacagcctcgcgcacctcaacgtcgcgttcaagttcaactccatcagcgccgacgtgcacggcgtgctcggccagacctaccgcccggactacgtcagcgccggggttgacatgggcgccaagatcccggtgatggggggtgccgcaaagtaccaggtgtcggacatcttcgggacggactgcgaggtggcgcgcttcgccggagaggacgtcgtccgcgtcggggcggtcgacatgatcgacgagccggccgacaccatgtgcggcagcggcaagggcagcgccgggctggtctgcaagaagtgatgtggtatcgcgagctgattttgcttcgttaccctcgtaagtgtgcccatacacgtctacgtgctcgctgctgctacactacattatcggtagtacctccgcatttcagaataaataaccgctggtgatgtcgtgtcgttgtgtgttagtcaatcgatagtcgtgtagggcaacgttggaaatccaggcgttgctcggtgtaacaggctactttttttccctccatgttttttcaaatgtaatgattgaacaatcaagtttgtgatttac

SEQ ID NO: 12641 - protein, 353 aa, Triticum aestivum
  misc_feature (1)..(353): Ceres Seq. ID no. 14302853
MASVRRPCAVALLACAAAFLVTVGAQPKDNPILSDPNVVPIYMSPGAQPTVVSCYNQSSPSQAPECMIPVRRCPAGCRDLCYVHCPSCKLVCMCELAGTECYDPRFVGGDGNKFLFHGRRDADFCLLSDANLHINAHFIGKRNVKAARDFTWVQALGIRFGGHRLYLGVKRTVTWDNAVDRLVITFDGVPVELDAAPAASWSPASAPALSVFRIGKANGVVVRLDGRFRIVANAVPVTEEDSRVHDYGLTADDSLAHLNVAFKFNSISADVHGVLGQTYRPDYVSAGVDMGAKIPVMGGAAKYQVSDIFGTDCEVARFAGEDVVRVGAVDMIDEPADTMCGSGKGSAGLVCKK

SEQ ID NO: 12642 - protein, 311 aa, Triticum aestivum
  misc_feature (1)..(311): Ceres Seq. ID no. 14302854
MSPGAQPTVVSCYNQSSPSQAPECMIPVRRCPAGCRDLCYVHCPSCKLVCMCELAGTECYDPRFVGGDGNKFLFHGRRDADFCLLSDANLHINAHFIGKRNVKAARDFTWVQALGIRFGGHRLYLGVKRTVTWDNAVDRLVITFDGVPVELDAAPAASWSPASAPALSVFRIGKANGVVVRLDGRFRIVANAVPVTEEDSRVHDYGLTADDSLAHLNVAFKFNSISADVHGVLGQTYRPDYVSAGVDMGAKIPVMGGAAKYQVSDIFGTDCEVARFAGEDVVRVGAVDMIDEPADTMCGSGKGSAGLVCKK

SEQ ID NO: 12643 - protein, 287 aa, Triticum aestivum
  misc_feature (1)..(287): Ceres Seq. ID no. 14302855
MIPVRRCPAGCRDLCYVHCPSCKLVCMCELAGTECYDPRFVGGDGNKFLFHGRRDADFCLLSDANLHINAHFIGKRNVKAARDFTWVQALGIRFGGHRLYLGVKRTVTWDNAVDRLVITFDGVPVELDAAPAASWSPASAPALSVFRIGKANGVVVRLDGRFRIVANAVPVTEEDSRVHDYGLTADDSLAHLNVAFKFNSISADVHGVLGQTYRPDYVSAGVDMGAKIPVMGGAAKYQVSDIFGTDCEVARFAGEDVVRVGAVDMIDEPADTMCGSGKGSAGLVCKK

SEQ ID NO: 12644 - DNA, 1818 bp, Triticum aestivum
  misc_feature (1)..(1818): Ceres Seq. ID no. 14302867
cgaaaaaaaatctatcggttttggtctctctcgccgccggatcgccggtccccaacccccacggccgcctccgtcagtaaggcatcgccatgtctgccgctccagaagctcctccttccgaaggtcctccatcgttcatcgccatgtctgccgctccggaagctcctccttccgaaggtccttcatcgtcggtcgccatatccacctcccccttccccaactggatactgctggagagctttgtcttccgcagggacgacaagaagtcttttccggacgacacaaaggcacccatcagggcgtccggcatcacctcctggaacgctcccttccggattgccttctcccttgccaagcccccgctcgcttcccgcctctatgcaaagttgcgacgctttccagatcctagtcaagagacgcctttagccatagtggcgacccacttcaatctactgctgcttcgcgtaggtaccaaaatccctgcacgagggctagtgcaggacttctttatctgcaatgcctatgaaccttccacgctcaaagctttgcctccttgtagagagccctacacagattatagccgcagcagcggtgacaacctacctcgtggtcgacccctccagaaggaggagcgacgcctgcttgaggttcaatcaatggggctcttgtgcggaggcggggagaagtttgcggtggcagagctctgcgttttcaagaccatccacttaaaatcatatgctgacatttgtttgctatgctctcccacatcagccgcccctgtccttggcggcaattggaactcgttccgtgtaccaatccttggcattgacagcaatgatccatggcacatttgttgctgggacactgacactgtcattacttttaggcactggctgtgctggatcgattatcatcgtggtattctattctttgacgtgttcggagagcctgtccctaccgtcacattccttgcttttcctcttgatgagtatccttccccgcacagtctcaaagaggtcaagccatccagccctctcaaatccagccggttgtatcgtggtgcgtctgtcttatttggtggcaatatgatcaaatttgtcaatgtcacccgccacgacggcattggttatggagaactcaaacctcgttcaggcttcaccatcacctgccacaccctcgagttaggcgacaccccagtgataggcaatgcaaggtggaagttagactacaagattacttctgatgagctttggtccgccaatcctcctgagcatcttccacacaacattctcatgttccctcaaatagacttagacatgccacatctagtgcactttatcatcagcgagtttgaattcgttattaagaagatgtggttggtgtccattgatatgaaaactaaggaggtgaaatcatttgctccgtacatcagtgggaaggaaggacttgaaacagacgacgcagacttgatcagagaaaggtctgacgctcccatgcccttcctaccctgtgatttctccaggtttctccgtctctcaaggttgagcaaggatatggaatgactcacggtgtacatttaagttcagctaccatgccaagactttccaaaggcaaacaacaagagaaatgacgcaatgacggacgatatacattaatacattattagatcctcacagacatcaagataacggtgtactacataagctgcgtatgagtagtctctcccaaagcttcatccttgtaattattgtagttgaacttgaattgtagaccgtaaagctatccagattgatgaagttggcacacgtgagtcattcc

SEQ ID NO: 12645 - protein, 490 aa, Triticum aestivum
  misc_feature (1)..(490): Ceres Seq. ID no. 14302868
MSAAPEAPPSEGPPSFIAMSAAPEAPPSEGPSSSVAISTSPFPNWILLESFVFRRDDKKSFPDDTKAPIRASGITSWNAPFRIAFSLAKPPLASRLYAKLRRFPDPSQETPLAIVATHFNLLLLRVGTKIPARGLVQDFFICNAYEPSTLKALPPCREPYTDYSRSSGDNLPRGRPLQKEERRLLEVQSMGLLCGGGEKFAVAELCVFKTIHLKSYADICLLCSPTSAAPVLGGNWNSFRVPILGIDSNDPWHICCWDTDTVITFRHWLCWIDYHRGILFFDVFGEPVPTVTFLAFPLDEYPSPHSLKEVKPSSPLKSSRLYRGASVLFGGNMIKFVNVTRHDGIGYGELKPRSGFTITCHTLELGDTPVIGNARWKLDYKITSDELWSANPPEHLPHNILMFPQIDLDMPHLVHFIISEFEFVIKKMWLVSIDMKTKEVKSFAPYISGKEGLETDDADLIRERSDAPMPFLPCDFSRFLRLSRLSKDME

SEQ ID NO: 12646 - protein, 472 aa, Triticum aestivum
  misc_feature (1)..(472): Ceres Seq. ID no. 14302869
MSAAPEAPPSEGPSSSVAISTSPFPNWILLESFVFRRDDKKSFPDDTKAPIRASGITSWNAPFRIAFSLAKPPLASRLYAKLRRFPDPSQETPLAIVATHFNLLLLRVGTKIPARGLVQDFFICNAYEPSTLKALPPCREPYTDYSRSSGDNLPRGRPLQKEERRLLEVQSMGLLCGGGEKFAVAELCVFKTIHLKSYADICLLCSPTSAAPVLGGNWNSFRVPILGIDSNDPWHICCWDTDTVITFRHWLCWIDYHRGILFFDVFGEPVPTVTFLAFPLDEYPSPHSLKEVKPSSPLKSSRLYRGASVLFGGNMIKFVNVTRHDGIGYGELKPRSGFTITCHTLELGDTPVIGNARWKLDYKITSDELWSANPPEHLPHNILMFPQIDLDMPHLVHFIISEFEFVIKKMWLVSIDMKTKEVKSFAPYISGKEGLETDDADLIRERSDAPMPFLPCDFSRFLRLSRLSKDME

SEQ ID NO: 12647 - protein, 301 aa, Triticum aestivum
  misc_feature (1)..(301): Ceres Seq. ID no. 14302870
MGLLCGGGEKFAVAELCVFKTIHLKSYADICLLCSPTSAAPVLGGNWNSFRVPILGIDSNDPWHICCWDTDTVITFRHWLCWIDYHRGILFFDVFGEPVPTVTFLAFPLDEYPSPHSLKEVKPSSPLKSSRLYRGASVLFGGNMIKFVNVTRHDGIGYGELKPRSGFTITCHTLELGDTPVIGNARWKLDYKITSDELWSANPPEHLPHNILMFPQIDLDMPHLVHFIISEFEFVIKKMWLVSIDMKTKEVKSFAPYISGKEGLETDDADLIRERSDAPMPFLPCDFSRFLRLSRLSKDME

SEQ ID NO: 12648 - DNA, 2088 bp, Triticum aestivum
  misc_feature (1)..(2088): Ceres Seq. ID no. 14302875
cctgccggaaacgaaacaccattcgtcgctccctcgcctcccatcagcgcgcactagtccttccctgcctcctcctcttctcgggcgcgcgccgcctctgccctgcctcggcaacgacagcaaacaccggctagccagccaagaaagaggcgccgacatggccatcccgctccaggcgaagaagcagcaggagaacggaagcaagggcggccaaggcagccacgtggacggcggcgacgacaacccttcggcggcggaggagctgcgggagctgtggcgcatggcggcgccgatcacagcgctcaactgcgtggtgtacctgcgcgccatggtgtccgtgctctgcctgggccgcctcggcccgcttgacctcgccggcggcgcgctcgcgatcgggctcaccaacatcactggccacagtgtgctcttcggcctcgcgtccgggttggagccgctctgcgcgcaggcctacggctcccgcaactacgacctgctcacgctctccctccaccgcgccgtgctgctgctcgccatcgccgccgtccccatcgcgctgctctggctcaacgtcggccccatcctggtcgcgctcggccaggacccagccatctccgcctccgccgccgcatacgccgcgtgggcgctcccggacctcgccgcgctggccgtgctccagccgctccgcgtctaccttaggtcccagggcatcaccaagcccatggccgcctgctccgccgccgccgtcgcgctgcacatcccgctcaactttctcctcgtcttccgcatgggcttcggcgtgcgcggcgtcgcggcagcgcaggcgctcacaaacacaaacatggtgctcttcctgctcgcctacgtccgctgggcgggtgcgtgcgacgacacgtggaggggcttcgcgcggcccgccgccgtagccagcgggctcggcggcctcgtccgcctcgccgtgcccagctgcatcggcgtctgcctcgagtggtggtggtacgaggtcgtcaccgtgctcgccggctaccttgccaaccccaccgccgccgtcggcgccgcgggagtcctcatccagacaaccagcctgatgtacaccgtgcccatggcgctcgccgcctgcgtctccacccgggtgggcaacgagctcggcgccgggaagccgcggcgtgcgcggatggcggcgacggtggcgctgtggtgcgcagcgggcgtgggcctcgcgcacgtggcgtggacggcggccttcagcgcgcagtgggtgtcgctcttcacccgggagccgtcggtggtgctgctggcgtcggcggcgatgccgctgctggggctgtgcgagctgggcaactgcccgcagaccacggggtgcggcgtgctgcgcggcacagccaggcccgccgtgggcgcccgcatcaacctgctctccttctacctcgtcggcacgcccgtggcggtgctgctggcgttcgggcacgggccgctgtccgggttccgcgggctgtggtacgggctgctgtccgcgcaggccgcctgcgtggctctggtgctggtcgccgtcgtgtggcgcaccgactggcgcgtcgaggccatgcgcgcgcggaagctgaccggcaccggcgcggacacgacggcgacggccaccgagggggaggagcaggaggagatgaggcgcctcgtggccggcaacggcctggaggcggacgtcgacgtgtagcgagccgttcctttcggtggaaccacctagtttagctctacgtgcggtgcatcgcggtgacatgctaaaattaagccagactagccattccactcgtagggcaggcatagcatattgcagcaccgagtagctggctagctttagttattgtggtgagccacacagctcacagatttgctgctgcatgcatgcttgcagctgggcctaagcggtggtgtgttcgcattgaagtagtacggttgctgcttggagaaatgggctagctagctagcaagctaatcaagctagagatcttgatcgagctaagcaagttcattccaagttacacgcacttcattttctgtatgggctaaacaagttcattagcgcttgattttgggatt

SEQ ID NO: 12649 - protein, 567 aa, Triticum aestivum
  misc_feature (1)..(567): Ceres Seq. ID no. 14302876
LPETKHHSSLPRLPSARTSPSLPPPLLGRAPPLPCLGNDSKHRLASQERGADMAIPLQAKKQQENGSKGGQGSHVDGGDDNPSAAEELRELWRMAAPITALNCVVYLRAMVSVLCLGRLGPLDLAGGALAIGLTNITGHSVLFGLASGLEPLCAQAYGSRNYDLLTLSLHRAVLLLAIAAVPIALLWLNVGPILVALGQDPAISASAAAYAAWALPDLAALAVLQPLRVYLRSQGITKPMAACSAAAVALHIPLNFLLVFRMGFGVRGVAAAQALTNTNMVLFLLAYVRWAGACDDTWRGFARPAAVASGLGGLVRLAVPSCIGVCLEWWWYEVVTVLAGYLANPTAAVGAAGVLIQTTSLMYTVPMALAACVSTRVGNELGAGKPRRARMAATVALWCAAGVGLAHVAWTAAFSAQWVSLFTREPSVVLLASAAMPLLGLCELGNCPQTTGCGVLRGTARPAVGARINLLSFYLVGTPVAVLLAFGHGPLSGFRGLWYGLLSAQAACVALVLVAVVWRTDWRVEAMRARKLTGTGADTTATATEGEEQEEMRRLVAGNGLEADVDV

SEQ ID NO: 12650 - protein, 515 aa, Triticum aestivum
  misc_feature (1)..(515): Ceres Seq. ID no. 14302877
MAIPLQAKKQQENGSKGGQGSHVDGGDDNPSAAEELRELWRMAAPITALNCVVYLRAMVSVLCLGRLGPLDLAGGALAIGLTNITGHSVLFGLASGLEPLCAQAYGSRNYDLLTLSLHRAVLLLAIAAVPIALLWLNVGPILVALGQDPAISASAAAYAAWALPDLAALAVLQPLRVYLRSQGITKPMAACSAAAVALHIPLNFLLVFRMGFGVRGVAAAQALTNTNMVLFLLAYVRWAGACDDTWRGFARPAAVASGLGGLVRLAVPSCIGVCLEWWWYEVVTVLAGYLANPTAAVGAAGVLIQTTSLMYTVPMALAACVSTRVGNELGAGKPRRARMAATVALWCAAGVGLAHVAWTAAFSAQWVSLFTREPSVVLLASAAMPLLGLCELGNCPQTTGCGVLRGTARPAVGARINLLSFYLVGTPVAVLLAFGHGPLSGFRGLWYGLLSAQAACVALVLVAVVWRTDWRVEAMRARKLTGTGADTTATATEGEEQEEMRRLVAGNGLEADVDV

SEQ ID NO: 12651 - protein, 474 aa, Triticum aestivum
  misc_feature (1)..(474): Ceres Seq. ID no. 14302878
MAAPITALNCVVYLRAMVSVLCLGRLGPLDLAGGALAIGLTNITGHSVLFGLASGLEPLCAQAYGSRNYDLLTLSLHRAVLLLAIAAVPIALLWLNVGPILVALGQDPAISASAAAYAAWALPDLAALAVLQPLRVYLRSQGITKPMAACSAAAVALHIPLNFLLVFRMGFGVRGVAAAQALTNTNMVLFLLAYVRWAGACDDTWRGFARPAAVASGLGGLVRLAVPSCIGVCLEWWWYEVVTVLAGYLANPTAAVGAAGVLIQTTSLMYTVPMALAACVSTRVGNELGAGKPRRARMAATVALWCAAGVGLAHVAWTAAFSAQWVSLFTREPSVVLLASAAMPLLGLCELGNCPQTTGCGVLRGTARPAVGARINLLSFYLVGTPVAVLLAFGHGPLSGFRGLWYGLLSAQAACVALVLVAVVWRTDWRVEAMRARKLTGTGADTTATATEGEEQEEMRRLVAGNGLEADVDV

SEQ ID NO: 12652 - DNA, 1759 bp, Triticum aestivum
  misc_feature (1)..(1759): Ceres Seq. ID no. 14302879
acaccccaagggcccagaagccaaaaacccaagcagagcaaactgcacacacaagcgcttccacacagaagcagccgtggccatggccatggcattcttcctccttgccgcggcggcgtcagcggctgtcgccggagcctcctggagcccgcggccagagggcgacctcgtcaccgggctccctgggcaaccagaggtcgggttcaagcactacgccggctacgtcgacgtcggaacgggcggcgacaaggcgctcttctactggttcttcgaggccgagcaggagccggagaagaagcccctcatgctgtggctcaacggagggcccgggtgctcgtccatcgcctacggcgcggcccaggagctgggcccgttcctggtcaggggctacggcgcgaacctcacccgcaacgcctacgcgtggaacaaagccgtgaacctgctgttcctggaggcgccggtgggcgtggggttctcctacaccaacaagacggcggacctgggccgcctcggcgaccgcgtgacggcgcaggactcgtacaccttcctcctcaactggctcgccaagttcccggagttcaagggccgcgacttctacatcgccggagagagctacgccgggcactacgtcccgcagctcgcagatctcatctacgaggggaacaaagcggcgggcagaggcagcatcatcaacctcaaaggcttcatgattggcaacgcggtgctgaacgacgagacggaccagctgggcatggtggagtacgcgtggagccacgccatcatctccgacgagctgcactcggcggtgacgcgggagtgcgactccttcaaggaggaggccgacggcggcaggcccgggaagggctgctcgtcggccgtccgcgccttcatgggcgccttcgacgacatcgacatctacagcatctacacgccgacgtgcctctccccctccgccggctccgcctccgccgcgccgcgcccgtccaggctcgtcaccgcgccccgcctcttctcccagcacgtactacgtcctactccctctctctctctgacatctctggtagtgcatacactgtgtgcgagaaagaaaataagtgtcttgtcgtggcggtggtgcgtacgcaggaggcatggcacatgatgaggcgtgcgccggcggggtacgacccgtgcacggaggcgtacgtgaccaggtatttcaaccgccaggacgtgcagcgggcgctgcacgccaaccggacgggcctcaagtacccatactcgccttgcagcgcggtgataagcaagtggaacgactcgccggcgaccgtactccccgtcctgaagaagctcatggccgccgggctgcgcgtctgggtctacagcggcgacacggacgggagggtgccggtgacgtcgacgcggtacagcgtcaacgcgatgaagctgcgggcgcgggcgaggagcgggtggcgggcgtggttctacaggcagcaggtagccgggtgggcggtggagtacgaggaggggctgacgctggtgacggtgcgcggggcggggcaccaggtgccgctcttcgcgcccgaccgctcgctcgccatgctctaccacttcctccggggccagcccctgccggccgccgctccacgctagcggaagtgtgtctggtccattcttctgctcagcaaagctacgagcaagtgcttcatcattgggtggtagcgttgtactatgcctgtaactgatgtgacgatatcaatgtgggattttcatgggaaac

SEQ ID NO: 12653 - protein, 543 aa, Triticum aestivum
  misc_feature (1)..(543): Ceres Seq. ID no. 14302880
TPQGPRSQKPKQSKLHTQALPHRSSRGHGHGILPPCRGGVSGCRRSLLEPAARGRPRHRAPWATRGRVQALRRLRRRRNGRRQGALLLVLRGRAGAGEEAPHAVAQRRARVLVHRLRRGPGAGPVPGQGLRREPHPQRLRVEQSREPAVPGGAGGRGVLLHQQDGGPGPPRRPRDGAGLVHLPPQLARQVPGVQGPRLLHRRRELRRALRPAARRSHLRGEQSGGQRQHHQPQRLHDWQRGAERRDGPAGHGGVRVEPRHHLRRAALGGDAGVRLLQGGGRRRQAREGLLVGRPRLHGRLRRHRHLQHLHADVPLPLRRLRLRRAAPVQARHRAPPLLPARTTSYSLSLSDISGSAYTVCEKENKCLVVAVVRTQEAWHMMRRAPAGYDPCTEAYVTRYFNRQDVQRALHANRTGLKYPYSPCSAVISKWNDSPATVLPVLKKLMAAGLRVWVYSGDTDGRVPVTSTRYSVNAMKLRARARSGWRAWFYRQQVAGWAVEYEEGLTLVTVRGAGHQVPLFAPDRSLAMLYHFLRGQPLPAAAPR

SEQ ID NO: 12654 - protein, 379 aa, Triticum aestivum
  misc_feature (1)..(379): Ceres Seq. ID no. 14302881
HPKGPEAKNPSRANCTHKRFHTEAAVAMAMAFFLLAAAASAAVAGASWSPRPEGDLVTGLPGQPEVGFKHYAGYVDVGTGGDKALFYWFFEAEQEPEKKPLMLWLNGGPGCSSIAYGAAQELGPFLVRGYGANLTRNAYAWNKAVNLLFLEAPVGVGFSYTNKTADLGRLGDRVTAQDSYTFLLNWLAKFPEFKGRDFYIAGESYAGHYVPQLADLIYEGNKAAGRGSIINLKGFMIGNAVLNDETDQLGMVEYAWSHAIISDELHSAVTRECDSFKEEADGGRPGKGCSSAVRAFMGAFDDIDIYSIYTPTCLSPSAGSASAAPRPSRLVTAPRLFSQHVLRPTPSLSLTSLVVHTLCARKKISVLSWRWCVRRRHGT

SEQ ID NO: 12655 - protein, 352 aa, Triticum aestivum
  misc_feature (1)..(352): Ceres Seq. ID no. 14302882
MAMAFFLLAAAASAAVAGASWSPRPEGDLVTGLPGQPEVGFKHYAGYVDVGTGGDKALFYWFFEAEQEPEKKPLMLWLNGGPGCSSIAYGAAQELGPFLVRGYGANLTRNAYAWNKAVNLLFLEAPVGVGFSYTNKTADLGRLGDRVTAQDSYTFLLNWLAKFPEFKGRDFYIAGESYAGHYVPQLADLIYEGNKAAGRGSIINLKGFMIGNAVLNDETDQLGMVEYAWSHAIISDELHSAVTRECDSFKEEADGGRPGKGCSSAVRAFMGAFDDIDIYSIYTPTCLSPSAGSASAAPRPSRLVTAPRLFSQHVLRPTPSLSLTSLVVHTLCARKKISVLSWRWCVRRRHGT

SEQ ID NO: 12656 - DNA, 818 bp, Triticum aestivum
  misc_feature (1)..(818): Ceres Seq. ID no. 14302986
cccatccccaaactccagatcgatcgcaccgggagattgctgacgcccgcccgccgcgatggaggaggagaagaagatgaagctctgcttctccatcccctcgaaacccaaggtcaagcccgccacgcctcccgccgccttctccgtcgccgccgtggcccccggccccgccccgcggttcgtcaccgtgttcgatccctcggaaaccctcaccccagcgcccgccgcgcccgtcgtcattgcgccccttcccgactcgcgcaaaccctccccagctgctgccgcgccggccgcgcccgtcgtcatcgcgccccttcccaacacgcgcaagctcgccgaggcccccgccttcgtgctcggcgcctccgacagcccctcctccagcgcagcctacggcctcaccgtccgcaatacggattcgaagaggaagcttgatccccaggacgatgctgctagggagcagccgtcgcctccaggccccagcggcgaggacctgatgctgcggcggttcaaggaggacatggccgttctcccggaaatcgaaggtacggacgagtatgacgaggtgcctgtggaggggttcggtgctgctctcctcgctggctatggctggaaggaaggggattctattggaaagaaatacaagggcatgggcgctgtcaaggttcgtgagtacggccgccgccgctgcggcacgcagggtctaggctcgtagggttgccaggtcgtgacagtttctgtttcttgtttattttcttgatttcggttatctgtaactgtaagtatgtatggttcatcagactttgtctttgcctatc

SEQ ID NO: 12657 - protein, 218 aa, Triticum aestivum
  misc_feature (1)..(218): Ceres Seq. ID no. 14302987
MEEEKKMKLCFSIPSKPKVKPATPPAAFSVAAVAPGPAPRFVTVFDPSETLTPAPAAPVVIAPLPDSRKPSPAAAAPAAPVVIAPLPNTRKLAEAPAFVLGASDSPSSSAAYGLTVRNTDSKRKLDPQDDAAREQPSPPGPSGEDLMLRRFKEDMAVLPEIEGTDEYDEVPVEGFGAALLAGYGWKEGDSIGKKYKGMGAVKVREYGRRRCGTQGLGS

SEQ ID NO: 12658 - protein, 212 aa, Triticum aestivum
  misc_feature (1)..(212): Ceres Seq. ID no. 14302988
MKLCFSIPSKPKVKPATPPAAFSVAAVAPGPAPRFVTVFDPSETLTPAPAAPVVIAPLPDSRKPSPAAAAPAAPVVIAPLPNTRKLAEAPAFVLGASDSPSSSAAYGLTVRNTDSKRKLDPQDDAAREQPSPPGPSGEDLMLRRFKEDMAVLPEIEGTDEYDEVPVEGFGAALLAGYGWKEGDSIGKKYKGMGAVKVREYGRRRCGTQGLGS

SEQ ID NO: 12659 - protein, 144 aa, Triticum aestivum
  misc_feature (1)..(144): Ceres Seq. ID no. 14302989
PIPKLQIDRTGRLLTPARRDGGGEEDEALLLHPLETQGQARHASRRLLRRRRGPRPRPAVRHRVRSLGNPHPSARRARRHCAPSRLAQTLPSCCRAGRARRHRAPSQHAQARRGPRLRARRLRQPLLQRSLRPHRPQYGFEEEA

SEQ ID NO: 12660 - DNA, 1458 bp, Triticum aestivum
  misc_feature (1)..(1458): Ceres Seq. ID no. 14303006
ctccgtcattaccaaggtaattgcactgcccagcatgcatcttcgtcttaatccactctatcggtgcttcgtcttgcgtcccgtggcagcctgtgccgccatgcctgttgcctaatttcctactgatgcagtatcgcaatgcactcctgagctgacagttttagattttagcaagtgcctgtgcatctcccggcctgctcactcgcctctgttttgagttcctagctttcttttcgagaaattacaccctgctttgccgacagagattctcgctgctagtacgagattatttatttataaactgatgtctgcttcggcctctgcttttctgaattttgttgccacgcgtagtacagtagtactggaagattgcaagctctggttttctgaatattcgagctgcttcagatcgagttcagaagtttttctgaattccgtgccattattaatttggaagttgagagcgcaggaaggaagatgggctcgttggaggcgacgcgggcggagctggggctggcggtgctgtacctgaacaaggcggaggctcgggacaagatctgcagggccatccagtacggctccaagttcatcagcaacggccagcccggcaccgcgcagaacgtcgacaagtccaccaccttggctcgcaaggtcttccgcctcctcaagtgggtgaacgatctgcacgccctcatcagcccggccgccaaagggacccctctcacgctggtcttgcttgggaagtccaagaatgcgctgctgtcgactttcctgttcctggaccagttcgtgtggctaggaagatcggggatttaccagaacaaggagcgcacggaccgcatcgccaggatgtccctctactgctggatggcctcctccgtctgtgcaagtctagtcgagcttggtgagctcaagagactatcaaaggcgatgaggaagcgcgccaaggagcttaggggcgccgacaaatacgaggacgagcagtacctggggaagatgaagcagtcggacgaccggctgctggcgctggtgaaggcgggcatggacgtggtggtggccgtggggctgctgcagctggcgcccaagaagatcacccccagggtcaccggggccttcggcttcgtcacctccctcatctcctgctaccagcaactcccgtcccgcgctcccctggccaaactcaaggcgtgaggaacggacgctacaccatgcatgctagtccagatgctgcctccgcttaactcaagccgatgctgtgctccagcatggaatccgagatgttttattcctgtgtacgtagcagtatagaatgatgatgtcgattgtctgtacgtacggtttttatacatatacatgtacacggtatatgctatgaatagtagtaatggacatggtatgtctggtcgatcatgtgttggtgcatgctgcttatatatgccaacagtgttgccacttgcg

SEQ ID NO: 12661 - protein, 237 aa, Triticum aestivum
  misc_feature (1)..(237): Ceres Seq. ID no. 14303007
MGSLEATRAELGLAVLYLNKAEARDKICRAIQYGSKFISNGQPGTAQNVDKSTTLARKVFRLLKWVNDLHALISPAAKGTPLTLVLLGKSKNALLSTFLFLDQFVWLGRSGIYQNKERTDRIARMSLYCWMASSVCASLVELGELKRLSKAMRKRAKELRGADKYEDEQYLGKMKQSDDRLLALVKAGMDVVVAVGLLQLAPKKITPRVTGAFGFVTSLISCYQQLPSRAPLAKLKA

SEQ ID NO: 12662 - DNA, 2552 bp, Triticum aestivum
  misc_feature (1)..(2552): Ceres Seq. ID no. 14303011
aaagaaccggaaggagtaggacacacctttggtcttcgctccgccgctcagttcgacgaaatgccgcattcgctccctcctcaggcaggctgtctccgcgtacacatcccacccctccccccacccttcccttcatatggatacggtggagccgtggaggtcctccggcgagacactacgatggcgctcaaagaagctctgctgcgcgtgccgcgtgcgatatggccctgggtcctctgcgccgtattccaggagaaagtatgaggatagaggcctaggtcaaggcgaaagcgcccacctacgaggctgcactcttgcccagtgatcagggtactatcggtattgggcgaacgtttggttgggcgctgctcgcaaggtgctcgaccaaatgcccaggtagagtgtgtcgactgaaatattttttatcttcttctttatctcacaatggtattaagcttgatgttgaagtttttaggatctaaatcatctacttttcatatgataattctgtgaaaaatatcaaaaagtttctaagttttgtcatgatattctgccatttattttctacttctgatggatcactatttgaaggctgaattgtagttcattatcttgctgcttgatgtatatggattagttgtaagaattgcttgtttccagtggcaatttcaaatattgtatagcaggattagcactaaatataaattcaagtgcacagtcactgtaaataaaatgaaaaatctacgccactccaaaagaaaaggttgcttctgtgctgctttaaaatgtctgaatcccatgctgaacaatttaaccagatcagaataacaagtctgctaatctagaaataataatgcctctgctagtgacaggttgttaattttattatttccactggatcccatgctaaacaatgtaacccgatcagaagaacaagtctgctaatctaatctgcgagtgacaggtttagtattatatccggatctgaatttgaccaacctttcagcctttccattgtctggtccgaagatagaaaataagaaagcatgctggccctactattgctgctgataagcagccagaagcccagaaacgacatccccgttgatcatagacaaaagaagtattgaacttccggtactttttcagcgttgtcatcctaatttgattcctgcagatccaagatctggtgtttagccttgctccaagtaaagccatagcctccaaacagatggtgcatatgaatcaaggacaaggggaaacaagctatgcacacaactccagtatccagaacgctcagcagaacaggatgaagcccctgatagaagcggccatcattgacttgtgcggcagcaaaagcaccttgttccccgaaaagatgctgattgcggacttgggctgctcttatggcccaaatgcgctagcactggtatcgactgccgtcaaggccatcatcaaccactgccttcagttccagcaaccaccacccgaagtgtgtgtgctcctcaatgaccttcctgacaatgacttcaacacggtggtgaagagcctggccacgctccgtcaaaataacaacaagcttgttgttgtgactggtgtagcaccggggtcattttacgagaggctcttcactagtgactccttgcatcttgtctgctcgtccaacagcttgcattggctctccatggtgtgaatttatcacccttcaatggatctatccattgcattacttatttattttgtaaaagaaaccttatcctcgcaggctcccgaagatctgacaatgaaccagatccctgcgtacgacatggatgagcatgctaggcgtgaaagactccctacggtccgtgaagcatatgcacgccagttcaggaaagatttcatacttttcctggagctgagagccaaagaattggttccaggaggccgaatggttgtttctcttgtagggcggccttctaatgtaaaagcctccaaattctttcacctttgggaaactctagttcagattctaagtgtcatggccttagagggtgtgatcgacaaagcgaagtttgattctttctatgtgccggtgtatggaccctctggtgaagagctgagggagatcatccaagacgagggctccttttctatcagggatatgcgggtatatgacgctacaactgatatggacagcatgctcttcaccccaagctcgtttgtgaattatctgagagccatatttgagccgataatagtcgagcattttggagaggtcatggatgaatttgtgaggaccgcggagcggcgctggagcctcgagggcagcatgcaaaacgagcgtgctaggaatccatgagctatgctggctgtatcccttgtaaaggcatgattatcaggtactttatagtacatcacatttggttaggtttattgctttatttgaggtgacaatgtgtgccaacttcattgtgtaaactacatcctgtatggtgttctgcgaagatatcgacgctcaagagattaagaatgaactatcatttatatagattagcagactgttgttgccc

SEQ ID NO: 12663 - protein, 210 aa, Triticum aestivum
  misc_feature (1)..(210): Ceres Seq. ID no. 14303012
MDLSIALLIYFVKETLSSQAPEDLTMNQIPAYDMDEHARRERLPTVREAYARQFRKDFILFLELRAKELVPGGRMVVSLVGRPSNVKASKFFHLWETLVQILSVMALEGVIDKAKFDSFYVPVYGPSGEELREIIQDEGSFSIRDMRVYDATTDMDSMLFTPSSFVNYLRAIFEPIIVEHFGEVMDEFVRTAERRWSLEGSMQNERARNP

SEQ ID NO: 12664 - protein, 185 aa, Triticum aestivum
  misc_feature (1)..(185): Ceres Seq. ID no. 14303013
MNQIPAYDMDEHARRERLPTVREAYARQFRKDFILFLELRAKELVPGGRMVVSLVGRPSNVKASKFFHLWETLVQILSVMALEGVIDKAKFDSFYVPVYGPSGEELREIIQDEGSFSIRDMRVYDATTDMDSMLFTPSSFVNYLRAIFEPIIVEHFGEVMDEFVRTAERRWSLEGSMQNERARNP

SEQ ID NO: 12665 - protein, 177 aa, Triticum aestivum
  misc_feature (1)..(177): Ceres Seq. ID no. 14303014
MDEHARRERLPTVREAYARQFRKDFILFLELRAKELVPGGRMVVSLVGRPSNVKASKFFHLWETLVQILSVMALEGVIDKAKFDSFYVPVYGPSGEELREIIQDEGSFSIRDMRVYDATTDMDSMLFTPSSFVNYLRAIFEPIIVEHFGEVMDEFVRTAERRWSLEGSMQNERARNP

SEQ ID NO: 12666 - DNA, 742 bp, Triticum aestivum
  misc_feature (1)..(742): Ceres Seq. ID no. 14303027
tgtgttagctgtagatgttgaaagtgaagccttgtgcagtgttctttggatcttgtctaagccatgtgctacctttctgtggagatcgacaatgttgatgcccagtgtggtctgcagtggtattcaggaatcagggtgacgcatttatcttgtttgtatactgatgatggtcttttaattttgcagatgtgaaggatattaagtgtgtgattaattttgatttcccgacaactatcgaggattatattcataggataggtcgcactggccgtgccggtgctaccgggatggcattcacgttcttcacacattccaatgcaaaatattcaaggaatctcgttaagatcttgcgcgaagctgggcaggttgtgaatccagcgttagaagctatgtccaagtctgctggttctatgggaggaggaggtaatttccggtcaaggggccgaggtgggtttggtggtggtgggtatggtggtaaccgttctggatcaaattccattccagtacgtagaagatactaagacacaaacatgaaggtcaattctgatgctggaaaagacagagcgatgaagttttatctgtatacattaggcattaaattaaatgcatttttggggaatttctttgaaatccttctactgttagaagatcaaaacaaaagtcattcttgatatttttgtaccggagctcaaatggaaggaactcatgtatcagcgaccttggagattagaatagtcttgtc

SEQ ID NO: 12667 - protein, 77 aa, Triticum aestivum
  misc_feature (1)..(77): Ceres Seq. ID no. 14303028
MAFTFFTHSNAKYSRNLVKILREAGQVVNPALEAMSKSAGSMGGGGNFRSRGRGGFGGGGYGGNRSGSNSIPVRRRY

SEQ ID NO: 12668 - protein, 46 aa, Triticum aestivum
  misc_feature (1)..(46): Ceres Seq. ID no. 14303029
MKVNSDAGKDRAMKFYLYTLGIKLNAFLGNFFEILLLLEDQNKSHS

SEQ ID NO: 12669 - protein, 45 aa, Triticum aestivum
  misc_feature (1)..(45): Ceres Seq. ID no. 14303030
VLAVDVESEALCSVLWILSKPCATFLWRSTMLMPSVVCSGIQESG

SEQ ID NO: 12670 - DNA, 1601 bp, Triticum aestivum
  misc_feature (1)..(1601): Ceres Seq. ID no. 14303043
tttttttcttgtaaatttccgaatggaaaactagtttttcttcccaaaaaacccacgaacacgagggttttgcccccgtcgacccacggtcgccattggccactctgctccgccgctccatgctcctccctagcctcctccgcggcgcccacctgctgcggccgtgccaccctcctcgccgccacctctcccgcctcctagaccgctacggcttcgtgccgccggcctccctgacccccaccgcgaaagagatctcccacggcacaggcgccgccgccgaccagaagcgtcggaccaagaagcccccctaccggccgccctcttcgctggaccgcggagaccgcccggcctcccactccgacctccccttcgatttccgcttcagctacacggagagctccccggacgccaagcccatcgggctccgcgagcccaagtactcccctttcggccccggtcgcctcgaccgcccctggaccggcctctgcgcgcccgccgtcgacaccacgctccggagcgtcgacgccgaggaccccgcccccgccgccgagaaggacctggaggaggcccggcggcgcgagcgagagcgcgtgctcggcgagccgctcacccccgcggagcgctccttcttggtcgacaaatgccagaagaaccgcaccaagcggcagatcaatctcgggagagatgggctcactcataacatgctgaatgacattcacaaccactggaagcatggcgagggggtcagggtgaaatgccttggtgtgccgacggttgatatgcaaaatgtgtgccgtgagctcgaggataaaactggtggccttatcatccacaggcatggtggccagttaatactatacagagggaggcattatcatccaaagaaaagacctgttattccgttgatgttatggaagccagctgaaccgatctacccaaggctaattaaaacaacaatagaagggctgacagttcaggagacaaaggaaatgaggaagaagggcctacatgctcctgtcttgacaaagcttgcaaagaacgggtattatgctagtctcgtgtcgatggttcgagatggttttctggccgatgaattggttcgtatagattgtaaaggattgccaaagagtgattatcggaagattggagtcaagctcagggaccttgttccttgtattcttgtgtcttttgacaaggagcaaattattgtttggagggggaaagaccatgatgaaagcatacaggataatatgcacaaggcattcccttcagttcttcaattagagagtgcagcaggagagaatgaacaggaagaagcatcaagtgagagtgtagcaggagagaatgaacatggtgaaaaagaagaaacatcagttgactgttcttctgatgagtggtctgagatcagtagctctgacgatgtgccagatgataagtaggacatttccagggtagaatatctttagatcgatctgacatatccagaggactcaatctgccaccaggtgttcacaaagttggcatgtcatccaacaccaccaacttgtccattcttaccagtgatgattatgttctatcactagtcgcaaccaaatccagtt

SEQ ID NO: 12671 - protein, 439 aa, Triticum aestivum
  misc_feature (1)..(439): Ceres Seq. ID no. 14303044
MLLPSLLRGAHLLRPCHPPRRHLSRLLDRYGFVPPASLTPTAKEISHGTGAAADQKRRTKKPPYRPPSSLDRGDRPASHSDLPFDFRFSYTESSPDAKPIGLREPKYSPFGPGRLDRPWTGLCAPAVDTTLRSVDAEDPAPAAEKDLEEARRRERERVLGEPLTPAERSFLVDKCQKNRTKRQINLGRDGLTHNMLNDIHNHWKHGEGVRVKCLGVPTVDMQNVCRELEDKTGGLIIHRHGGQLILYRGRHYHPKKRPVIPLMLWKPAEPIYPRLIKTTIEGLTVQETKEMRKKGLHAPVLTKLAKNGYYASLVSMVRDGFLADELVRIDCKGLPKSDYRKIGVKLRDLVPCILVSFDKEQIIVWRGKDHDESIQDNMHKAFPSVLQLESAAGENEQEEASSESVAGENEHGEKEETSVDCSSDEWSEISSSDDVPDDK

SEQ ID NO: 12672 - protein, 245 aa, Triticum aestivum
  misc_feature (1)..(245): Ceres Seq. ID no. 14303045
MLNDIHNHWKHGEGVRVKCLGVPTVDMQNVCRELEDKTGGLIIHRHGGQLILYRGRHYHPKKRPVIPLMLWKPAEPIYPRLIKTTIEGLTVQETKEMRKKGLHAPVLTKLAKNGYYASLVSMVRDGFLADELVRIDCKGLPKSDYRKIGVKLRDLVPCILVSFDKEQIIVWRGKDHDESIQDNMHKAFPSVLQLESAAGENEQEEASSESVAGENEHGEKEETSVDCSSDEWSEISSSDDVPDDK

SEQ ID NO: 12673 - protein, 219 aa, Triticum aestivum
  misc_feature (1)..(219): Ceres Seq. ID no. 14303046
MQNVCRELEDKTGGLIIHRHGGQLILYRGRHYHPKKRPVIPLMLWKPAEPIYPRLIKTTIEGLTVQETKEMRKKGLHAPVLTKLAKNGYYASLVSMVRDGFLADELVRIDCKGLPKSDYRKIGVKLRDLVPCILVSFDKEQIIVWRGKDHDESIQDNMHKAFPSVLQLESAAGENEQEEASSESVAGENEHGEKEETSVDCSSDEWSEISSSDDVPDDK

SEQ ID NO: 12674 - DNA, 1147 bp, Triticum aestivum
  misc_feature (1)..(1147): Ceres Seq. ID no. 14303047
gtcctcccggcaccgcacaccgcaacctctaagctcaaaccacaacgcgcacccacacaaagccgagagcgcgctctcgctcgctcgccggcggcgacagaggacaggcatggccgtgtacatccgcctggacgacgccgtgcgcgcgcgcctccgcggggacgggggtggcaccagcagcggcagcgaccacgacgcctccgcctgcctctccgacctcgtccaggccttcctcgagacggacgccgccggcaacggggacgacgcggccgggccggccccgaaaggacgtgacgggtacgactccgacgacgcggacggcgccgcggaggcggccgcgtccgtgcgggagctgctcgacccgccggccgcggaggaccccttccggatcaggctggcggccgccgtgtccgcggcgctggacgcggaggcgccgctgcgggggcacggcgcggcgttccggcgcgcggtgatgcggcggctgcgtgccgctgggtacgacgccggcgtgtgcaggtcgcgctgggagacgtgcggcaacctgacggccgggacgtacgagtacatcgacgtggtcgtgccggccgcggggaaggcggcgaggtacattgtggacgcggacttccgggcggggctggaggtggcgcgcgcgacggcggagtacgcggtcgtcgtggccgcggtgccggccaaggcggtggtcgcgcgggaggaggccgtggggcgcgccgtgcgcgtggccgccgacgccgcgcgccggtcgctccgggcgcacggcctgcacgtgccgccgtggcgcaagagccggtacatgctcgccaagtggctggggccctacaagcggtcgccgtcctcctcatcatcggcgtccggcgcaatgccggcgcccggcggccccgggatggacatcatcaagtgccgcgccgtcgggttcttcccgtcccagacggccgcgccggcggcgaggatcaagtaaaagctcctcggcaccgctaattctccgcgcgcgtctctggaagatgtcatagtctgataagtagatgtagagagatgatcgatgagttggagcgtgcctcgaattcgtttttgtacaaacatttttggtctacctagactatgaaaggagcaaattgttggtcaaaaaaac

SEQ ID NO: 12675 - protein, 324 aa, Triticum aestivum
  misc_feature (1)..(324): Ceres Seq. ID no. 14303048
SSRHRTPQPLSSNHNAHPHKAESALSLARRRRQRTGMAVYIRLDDAVRARLRGDGGGTSSGSDHDASACLSDLVQAFLETDAAGNGDDAAGPAPKGRDGYDSDDADGAAEAAASVRELLDPPAAEDPFRIRLAAAVSAALDAEAPLRGHGAAFRRAVMRRLRAAGYDAGVCRSRWETCGNLTAGTYEYIDVVVPAAGKAARYIVDADFRAGLEVARATAEYAVVVAAVPAKAVVAREEAVGRAVRVAADAARRSLRAHGLHVPPWRKSRYMLAKWLGPYKRSPSSSSSASGAMPAPGGPGMDIIKCRAVGFFPSQTAAPAARIK

SEQ ID NO: 12676 - protein, 288 aa, Triticum aestivum
  misc_feature (1)..(288): Ceres Seq. ID no. 14303049
MAVYIRLDDAVRARLRGDGGGTSSGSDHDASACLSDLVQAFLETDAAGNGDDAAGPAPKGRDGYDSDDADGAAEAAASVRELLDPPAAEDPFRIRLAAAVSAALDAEAPLRGHGAAFRRAVMRRLRAAGYDAGVCRSRWETCGNLTAGTYEYIDVVVPAAGKAARYIVDADFRAGLEVARATAEYAVVVAAVPAKAVVAREEAVGRAVRVAADAARRSLRAHGLHVPPWRKSRYMLAKWLGPYKRSPSSSSSASGAMPAPGGPGMDIIKCRAVGFFPSQTAAPAARIK

SEQ ID NO: 12677 - protein, 167 aa, Triticum aestivum
  misc_feature (1)..(167): Ceres Seq. ID no. 14303050
MRRLRAAGYDAGVCRSRWETCGNLTAGTYEYIDVVVPAAGKAARYIVDADFRAGLEVARATAEYAVVVAAVPAKAVVAREEAVGRAVRVAADAARRSLRAHGLHVPPWRKSRYMLAKWLGPYKRSPSSSSSASGAMPAPGGPGMDIIKCRAVGFFPSQTAAPAARIK

SEQ ID NO: 12678 - DNA, 1231 bp, Triticum aestivum
  misc_feature (1)..(1231): Ceres Seq. ID no. 14303051
actcgacccagccacagcctggttgcttggcgtcctcgttgccttacccttccaaacgagctccatcgtctccactttccacagcccacctccacctaccgcagcagcaagggcccttgtcgcgcggcggcggcggggaggatgtcatcgccgccggcaccggtattcgagaggctggccgggatccggcccctcgccgagtccggccgcttcaaggcatggttcctggaccagttcggtgttcttcatgacgggaagaaaccctacccgggcgccattttggcattggagaagctcgctgggaatggcgccaagatggtgataatcagcaattcctcaaggcggtcgtctgtaaccatggagaagctgcagagccttgggtttgacacgtcttgtttcctcggggcgatcaccagcggggaactcacccatcagtaccttgacaagagggatgacccatggtttgcatctctgggaaggaagtgtgtccatctgacatggggcaatcgaggtgcaatttctctggagggacttggtttgcaagttgtgaacaatgttgacgatgcagagtttatactagcccatggtactgaagccctgggtttaccttctggtgatccactttcgaaaagtcttgaggagcttgagcagattctagtgcttggtatacaaaagcgacttccaatggtggtagctaatccagattatgtcactgttgaagctcgaaacctgcgtgtcatgcctggcaccctggcagcaaaatacgagagtcttggtggtgaagtaaaatggatggggaagcctgataaggttatctatacatcagcaatgtccctagcaggtgttgaagcacatgaatgtatcaccgtaggtgattcgctgcaccacgacatcaaaggcgcaaatggagccggaatggcatctgcattcatcactggaggtatccatgcggctgaacttggactcggtgaatttggagaaactgctggagatgatgccgtcagtgcgttgtgttgcaagcatagctcatacccatcttacgttttgccttcatttgcatggtagaaaacacggtttagattcaggcacaccgtttaaacgggattgcggtctaggataatgatgctcttttcagttgtcaaagtgagcatcaagaccgtggaggtgtttcagtgccgcgctaaattattagcgttatgcattttccggaaataaaatatctgttgaaatg

SEQ ID NO: 12679 - protein, 354 aa, Triticum aestivum
  misc_feature (1)..(354): Ceres Seq. ID no. 14303052
TRPSHSLVAWRPRCLTLPNELHRLHFPQPTSTYRSSKGPCRAAAAGRMSSPPAPVFERLAGIRPLAESGRFKAWFLDQFGVLHDGKKPYPGAILALEKLAGNGAKMVIISNSSRRSSVTMEKLQSLGFDTSCFLGAITSGELTHQYLDKRDDPWFASLGRKCVHLTWGNRGAISLEGLGLQVVNNVDDAEFILAHGTEALGLPSGDPLSKSLEELEQILVLGIQKRLPMVVANPDYVTVEARNLRVMPGTLAAKYESLGGEVKWMGKPDKVIYTSAMSLAGVEAHECITVGDSLHHDIKGANGAGMASAFITGGIHAAELGLGEFGETAGDDAVSALCCKHSSYPSYVLPSFAW

SEQ ID NO: 12680 - protein, 307 aa, Triticum aestivum
  misc_feature (1)..(307): Ceres Seq. ID no. 14303053
MSSPPAPVFERLAGIRPLAESGRFKAWFLDQFGVLHDGKKPYPGAILALEKLAGNGAKMVIISNSSRRSSVTMEKLQSLGFDTSCFLGAITSGELTHQYLDKRDDPWFASLGRKCVHLTWGNRGAISLEGLGLQVVNNVDDAEFILAHGTEALGLPSGDPLSKSLEELEQILVLGIQKRLPMVVANPDYVTVEARNLRVMPGTLAAKYESLGGEVKWMGKPDKVIYTSAMSLAGVEAHECITVGDSLHHDIKGANGAGMASAFITGGIHAAELGLGEFGETAGDDAVSALCCKHSSYPSYVLPSFAW

SEQ ID NO: 12681 - protein, 249 aa, Triticum aestivum
  misc_feature (1)..(249): Ceres Seq. ID no. 14303054
MVIISNSSRRSSVTMEKLQSLGFDTSCFLGAITSGELTHQYLDKRDDPWFASLGRKCVHLTWGNRGAISLEGLGLQVVNNVDDAEFILAHGTEALGLPSGDPLSKSLEELEQILVLGIQKRLPMVVANPDYVTVEARNLRVMPGTLAAKYESLGGEVKWMGKPDKVIYTSAMSLAGVEAHECITVGDSLHHDIKGANGAGMASAFITGGIHAAELGLGEFGETAGDDAVSALCCKHSSYPSYVLPSFAW

SEQ ID NO: 12682 - DNA, 1323 bp, Triticum aestivum
  misc_feature (1)..(1323): Ceres Seq. ID no. 14303067
acacacatcccacccacacacatcatccatccacccgtagaaacatcgagcatacacttggcgacatccagctagctagctctcgtcggcgtcgacgatggcggggaggcggcaggcagcctggtgcctggtggtcatcgctctggcagtgacgctggcggtggcgtcggcgcagcccgtgcagccgagggtgggcgggccggggaagaaaggcggcaagatgccgccgggcaagttcgagacggtgaccttcgccaagaacaacaagcgcaagtacgaggtggcctgcaccgacaaccgcggcccgccctgcgtcgtctcctgccccaagacctgccccaacaagtgcctcgccttctgcgagtactgcatgaccttctgcatgtgcgacatgttcccgggcacgtcgtgcggggacccgcgcttcacgggcggcgacggcaacaccttctacttccacggaaagaaggaccaggacttttgcatcgtctctgacaaggacctccacatcaacgcgcacttcattggcaaccacaaccctgatatgaagcgtgacttcacgtgggtgcaggccctcggtgtcaccttcgtccatggcggcgccgaccaccgcctctacgtgggtgccaagaaggtcgtcgagtgggacgaggaggaggaccatgttcaaatcaccctcgatggggtgcccgtggaggtggaggccggcaagaatgcccaatgggtctctagggccatgccggggctctccgtcactcgcaccgacacggtgaacaccgtcgtcgtggagctcgacggcgtgttcagcatctcggccaacgccgtgcccatcactgacgaggactcccggatccacaactacgggaagaccaaggacagcctcatgcacctcgacctagggttcaagttccacacccttactaacggcgtcgacggcgtgctcggccagacctaccgcttagactacatcagcaaggtcaacgtcacggccaagatgcccatcatgggcggcgcgcccaagtacctctcggccagcctcttctccacagactgcgccgtctccagcttccaccgtaacggtgacgccgccatcgagacgttcgcctcataaaccattggttcatggaacctacacgagaaataaacaaatatcaaccggaagggagtgatatcatctccatcatgttgttgtggagtatatatgtgtgcatctcacacgattgaggttgtgaaataagtttcaagtcaataattgaagcaaagtgtgtaccatgttagtaacttaacatttttttaagaaaagaagcatcgtgcttacatagt

SEQ ID NO: 12683 - protein, 337 aa, Triticum aestivum
  misc_feature (1)..(337): Ceres Seq. ID no. 14303068
MAGRRQAAWCLVVIALAVTLAVASAQPVQPRVGGPGKKGGKMPPGKFETVTFAKNNKRKYEVACTDNRGPPCVVSCPKTCPNKCLAFCEYCMTFCMCDMFPGTSCGDPRFTGGDGNTFYFHGKKDQDFCIVSDKDLHINAHFIGNHNPDMKRDFTWVQALGVTFVHGGADHRLYVGAKKVVEWDEEEDHVQITLDGVPVEVEAGKNAQWVSRAMPGLSVTRTDTVNTVVVELDGVFSISANAVPITDEDSRIHNYGKTKDSLMHLDLGFKFHTLTNGVDGVLGQTYRLDYISKVNVTAKMPIMGGAPKYLSASLFSTDCAVSSFHRNGDAAIETFAS

SEQ ID NO: 12684 - protein, 296 aa, Triticum aestivum
  misc_feature (1)..(296): Ceres Seq. ID no. 14303069
MPPGKFETVTFAKNNKRKYEVACTDNRGPPCVVSCPKTCPNKCLAFCEYCMTFCMCDMFPGTSCGDPRFTGGDGNTFYFHGKKDQDFCIVSDKDLHINAHFIGNHNPDMKRDFTWVQALGVTFVHGGADHRLYVGAKKVVEWDEEEDHVQITLDGVPVEVEAGKNAQWVSRAMPGLSVTRTDTVNTVVVELDGVFSISANAVPITDEDSRIHNYGKTKDSLMHLDLGFKFHTLTNGVDGVLGQTYRLDYISKVNVTAKMPIMGGAPKYLSASLFSTDCAVSSFHRNGDAAIETFAS

SEQ ID NO: 12685 - protein, 246 aa, Triticum aestivum
  misc_feature (1)..(246): Ceres Seq. ID no. 14303070
MTFCMCDMFPGTSCGDPRFTGGDGNTFYFHGKKDQDFCIVSDKDLHINAHFIGNHNPDMKRDFTWVQALGVTFVHGGADHRLYVGAKKVVEWDEEEDHVQITLDGVPVEVEAGKNAQWVSRAMPGLSVTRTDTVNTVVVELDGVFSISANAVPITDEDSRIHNYGKTKDSLMHLDLGFKFHTLTNGVDGVLGQTYRLDYISKVNVTAKMPIMGGAPKYLSASLFSTDCAVSSFHRNGDAAIETFAS

SEQ ID NO: 12686 - DNA, 1482 bp, Triticum aestivum
  misc_feature (1)..(1482): Ceres Seq. ID no. 14303071
gttgatgctcgacacctttgtatcttgtgtttggtgtgtgctgtgtgcgatggtagtgtgtgtttgttcggctttcggttgtaatcgatggttgtaatcggtgatggttactttataatactccagcctgtggacaacaacgcttgcttgctctgattttgatgtgataaatttgagccagcctagagctgcgggagctgctccccgctgaatcctaggccgctgcgaggtgtcgtcaggccatggccaccaagatgcgcaagctgccgagcgccgttttgctgctcctcttggtcgcgaacctgggatgggcatgggcgctgatcccttcctcccccgcaggcctctccgccaggcgctacgactccatcttcagcttcggcgactcctacgccgaaaccggcaacaaccccgtcgtcttcgccgccaactccgtcttcaaccttgtcacgcgcccaccctacggctccaccttcttcggccgccccaccggccgcaactccgacggccgcctcatcatcgacttcatcgctcagcgcctcggcctgccgctcgtcccgccgtccctggcgcacaacgggagcttccgccaaggcgccaacttcgccgtcgggggcgccaccgctctggacgccgctttcttccacgacgggtccgatcccggcaacaagttccctctcaacaccagcttgggcgtccagctgcagtggttcgaggctctcaagccttccctctgccgcacgacccaagagtgcgaggccttcttcggcagatccctcttcttcgtgggcgaattcggggtcaacgactaccacttctccttccccaccaagagcctgcaagagatcacggcgttcgttccggaagtgatcagggccatctcaatggcaatcgagaggctgatcaagcacggggccacgagtttcgtcgttcccgggacaatcccgtcgggatgcacgccgcacattctcagctccttcgccaaagacgaccccgcggaatacaactccaccaccgactgcctggaagattacaacaagctagggatgcaccacaacctgctgctgcaggaggccctggagaagcttcggggcaggcacccggacgccatgatcgtctacgccgacctcttcggccccatcattgacatggttgagtcacctcgcaagtatgggtttgaagatgttcttaccaactgttgcggagggcctggggcacttatctgcggcgaccaaggtgcacatgtatgtgagaaaccggctgctcgtctgttctgggatgtcgcgcacttgacggaggcggcttaccgctacatcgccgatggctggctgggcagcatagactcccctgcaactgcaagagagagcaggtatcagttagtgaggtagcagaagctgccctgattcatggactgatagctatctgaagtctggcctgtctgaactgaaaaacactggaattgaaatggaagcatgcaagttt

SEQ ID NO: 12687 - protein, 381 aa, Triticum aestivum
  misc_feature (1)..(381): Ceres Seq. ID no. 14303072
MATKMRKLPSAVLLLLLVANLGWAWALIPSSPAGLSARRYDSIFSFGDSYAETGNNPVVFAANSVFNLVTRPPYGSTFFGRPTGRNSDGRLIIDFIAQRLGLPLVPPSLAHNGSFRQGANFAVGGATALDAAFFHDGSDPGNKFPLNTSLGVQLQWFEALKPSLCRTTQECEAFFGRSLFFVGEFGVNDYHFSFPTKSLQEITAFVPEVIRAISMAIERLIKHGATSFVVPGTIPSGCTPHILSSFAKDDPAEYNSTTDCLEDYNKLGMHHNLLLQEALEKLRGRHPDAMIVYADLFGPIIDMVESPRKYGFEDVLTNCCGGPGALICGDQGAHVCEKPAARLFWDVAHLTEAAYRYIADGWLGSIDSPATARESRYQLVR

SEQ ID NO: 12688 - protein, 377 aa, Triticum aestivum
  misc_feature (1)..(377): Ceres Seq. ID no. 14303073
MRKLPSAVLLLLLVANLGWAWALIPSSPAGLSARRYDSIFSFGDSYAETGNNPVVFAANSVFNLVTRPPYGSTFFGRPTGRNSDGRLIIDFIAQRLGLPLVPPSLAHNGSFRQGANFAVGGATALDAAFFHDGSDPGNKFPLNTSLGVQLQWFEALKPSLCRTTQECEAFFGRSLFFVGEFGVNDYHFSFPTKSLQEITAFVPEVIRAISMAIERLIKHGATSFVVPGTIPSGCTPHILSSFAKDDPAEYNSTTDCLEDYNKLGMHHNLLLQEALEKLRGRHPDAMIVYADLFGPIIDMVESPRKYGFEDVLTNCCGGPGALICGDQGAHVCEKPAARLFWDVAHLTEAAYRYIADGWLGSIDSPATARESRYQLVR

SEQ ID NO: 12689 - protein, 279 aa, Triticum aestivum
  misc_feature (1)..(279): Ceres Seq. ID no. 14303074
MGMGADPFLPRRPLRQALRLHLQLRRLLRRNRQQPRRLRRQLRLQPCHAPTLRLHLLRPPHRPQLRRPPHHRLHRSAPRPAARPAVPGAQRELPPRRQLRRRGRHRSGRRFLPRRVRSRQQVPSQHQLGRPAAVVRGSQAFPLPHDPRVRGLLRQIPLLRGRIRGQRLPLLLPHQEPARDHGVRSGSDQGHLNGNREADQARGHEFRRSRDNPVGMHAAHSQLLRQRRPRGIQLHHRLPGRLQQARDAPQPAAAGGPGEASGQAPGRHDRLRRPLRPHH

SEQ ID NO: 12690 - DNA, 1758 bp, Triticum aestivum
  misc_feature (1)..(1758): Ceres Seq. ID no. 14303079
acacgacgcctctctcccgttcacccgtcccgattccggatcactccctctcctctcctctcttctccactcccccgccgagatatttcacgcggcccgcccgccatgtcgctgctcgccgtcgtcaccagccgcgccgcgcccgtgcgcccgctccgcgcctcggcggcctcgggagaggcggcggcggccgccgcggaccagccgggggagcggaggccggtcaagataatactgcccaagaagaagccgcagaagtggtccacggggatggagccggggtcgtacggcggcggcccgaccaccatcaagccgcgcaagtactggatggggaaggaggaccgcgaccccattggcaacaccgacgacttcatctggaacaagaacttcctcccccacatggagcgcgtcatcgccaacggcggtacggacacgcccgccaccatcccccgcgtcacgccggcggacgaggactcagggtttctaagcttcaaccgcgcaatggaccttgacagtgtggatgttgatctgagcaaggagcttatggcaccggccaagtcaatcttgcagacgcagctcaaggctgcccgccgtggtcgatccactagcgttgaggctgtcaatagacccacctacattagatggaagctagctccgactcgacgggagcaggagcaatgggaccgagcgaccagggcaaccaccggtggcattgatgtcatactaagggagtcgcagcagaaagtgcagctgaaaggggaccctaaggtggtggcagctgaggccagagagcaatacctgaagttgaaagaaaggttgcagctgcttactttaggtattggtggcgtcggggtggtttctgcttatgtttcatacactcctgaaattgctgcgagctttagtgcagggctgattggatctctggtgtatctccgcatgcttggaaccagtgtggattctttagcgggtggaactaaagcagctgccaagggcgctgcggcacagccaagattgcttattccaatggttcttgtgatgatgtacaatcgatggaatgcgtaagtagatcaagtcttttaaaatacttcctctgcctcttgaactgcaaaaacgtcttatatttagaggcagagggagtattttctgctgaaatattttcgtaatatgtcaaacaaacaaaaaaaaacgtacatgcatgtttgcctttgctttttctgatgcaggatactggttccagagtacggcttcatgcacctggagttgatacccatgctccttgggttctttacctacaagattgctatgtttactcaagcgattcaggaatcagtacctgatgctggaaaccgcgaagtttgaacactgttttggctaatagaaaaacaaagagaaggtcttattaaaggttttagaagagtctaatctggggcctggagatgccgccaggtacgtagatgagatgcacgctgaggctgaggatactgtctgaacatattaccaacattccgcggagaaagtttactttgttgactgtacaaaagggagttggccaacacaaattcaagttccgtgtagtgtacacctttgaacttttggtgcactgaccccgactcctatggttgagctggcatctaacattatttacgcaaggaggtcggcaggattcggatcagtacagaatgtaaatagcgcgagctgtcaatatactagctcgggaagctctatattttacaaagtgctaaaaaaatgatatattac

SEQ ID NO: 12691 - protein, 353 aa, Triticum aestivum
  misc_feature (1)..(353): Ceres Seq. ID no. 14303080
TRRLSPVHPSRFRITPSPLLSSPLPRRDISRGPPAMSLLAVVTSRAAPVRPLRASAASGEAAAAAADQPGERRPVKIILPKKKPQKWSTGMEPGSYGGGPTTIKPRKYWMGKEDRDPIGNTDDFIWNKNFLPHMERVIANGGTDTPATIPRVTPADEDSGFLSFNRAMDLDSVDVDLSKELMAPAKSILQTQLKAARRGRSTSVEAVNRPTYIRWKLAPTRREQEQWDRATRATTGGIDVILRESQQKVQLKGDPKVVAAEAREQYLKLKERLQLLTLGIGGVGVVSAYVSYTPEIAASFSAGLIGSLVYLRMLGTSVDSLAGGTKAAAKGAAAQPRLLIPMVLVMMYNRWNA

SEQ ID NO: 12692 - protein, 318 aa, Triticum aestivum
  misc_feature (1)..(318): Ceres Seq. ID no. 14303081
MSLLAVVTSRAAPVRPLRASAASGEAAAAAADQPGERRPVKIILPKKKPQKWSTGMEPGSYGGGPTTIKPRKYWMGKEDRDPIGNTDDFIWNKNFLPHMERVIANGGTDTPATIPRVTPADEDSGFLSFNRAMDLDSVDVDLSKELMAPAKSILQTQLKAARRGRSTSVEAVNRPTYIRWKLAPTRREQEQWDRATRATTGGIDVILRESQQKVQLKGDPKVVAAEAREQYLKLKERLQLLTLGIGGVGVVSAYVSYTPEIAASFSAGLIGSLVYLRMLGTSVDSLAGGTKAAAKGAAAQPRLLIPMVLVMMYNRWNA

SEQ ID NO: 12693 - protein, 263 aa, Triticum aestivum
  misc_feature (1)..(263): Ceres Seq. ID no. 14303082
MEPGSYGGGPTTIKPRKYWMGKEDRDPIGNTDDFIWNKNFLPHMERVIANGGTDTPATIPRVTPADEDSGFLSFNRAMDLDSVDVDLSKELMAPAKSILQTQLKAARRGRSTSVEAVNRPTYIRWKLAPTRREQEQWDRATRATTGGIDVILRESQQKVQLKGDPKVVAAEAREQYLKLKERLQLLTLGIGGVGVVSAYVSYTPEIAASFSAGLIGSLVYLRMLGTSVDSLAGGTKAAAKGAAAQPRLLIPMVLVMMYNRWNA

SEQ ID NO: 12694 - DNA, 1713 bp, Triticum aestivum
  misc_feature (1)..(1713): Ceres Seq. ID no. 14303091
cccagagaatctttcccccccttccttcctcactccctttctctttcctgacctcaccctacctcatccccctttctttatccccctccctctctccctctgctgacaggggagtgagtgagtgagtgaggcgagcgagtgatggcacggggaggagctcgcgccgtcgcgccggcggctctgctgctcctgcttctcctcgcggcaggcggcggtgtgcattgcctgaggtcaagggcggagagcggcgccacggtcctggagctgcggcaccacgccagcctcggctcaggcggcaggagcggcagcgcggaggaggcccgcggcgtcctggcctccgacgccgccagggtctcgtcgctgcagcggcgcatcggcagctacggcctgatcaggtcgtcggacgcggcgtccaagctggcgcaggtgcccgtcacctctggcgccaggctgcggacgctcaactacgtggccaccgtgggcatcggcggcggcgaggccacggtgatcgtggacacggccagcgagctcacctgggtgcagtgcaagccctgcgacgcctgccacgaccagcaggagccgctcttcgacccgtcggcgtcgccgtcctacgccgccgtgccgtgcaactcctcctcctgcgacgcgctgcgggtggccaccgggatgtccggcggccaggcgtgcgaccagccggcggcctgcagctacgcgctcagctaccgcgacgggtcctactcccgcggcgtgctggcgcacgacaggctgagcctggccggcgaggacatcgagggcttcgtgttcggctgcggcaccagcaaccagggcccgttcgggggcacgtcggggctgatggggctcggccggagcccgctctcgctgatatcccagaccacggagcagttcggcggcgtgttctcctactgcctgccgccgaaggagtccggctcgtcgggctccctcgtcctcggcgacgacgcctcggcgtaccgcaactccacgccgatcgtgtacaccgcgatggtcaccgacccgctgcaggggcccttctacatggtcaacctgaccgggatcagcgtgggcggcgaggaggtgcagtccccgggcttctcggccggcggcggcggcggcgggagggccatcgtggactcgggcacgatcatcacgagcctggtgccgtcggtgtacgcggcggtgcggggcgagttcgtgaggcagctggcggagtacccgcgggcgccggccttctccatcctggacacctgcttcgacctgacggggctgagggaggtgcaggtgccgagcctgaggctggcgttcgacggcggcgcggaggtggaggtggactccaagggcgtgctgtacgtggtcgccggcgacgcctcccaggtgtgcctggccctggccgccctcgggtccgaggacgacaccccgatcatcggcaactaccagcagaagaacctgcgggtggtcttcgacaccgccgcgtcccagatcgggttcgcgcaggagacctgtgattacatttgatttgaccgtggatcatcgggagctgcgtgtgcgtgtgtgcgcgtgtgaatatcctatagttggggatttgttttggaatcacctctggtgattggcttttttatttttatttttttgagttgtggtgatcggcaattggcaatacggtatttagttattggcaaatgtacaagcgtttgtagc

SEQ ID NO: 12695 - protein, 462 aa, Triticum aestivum
  misc_feature (1)..(462): Ceres Seq. ID no. 14303092
MARGGARAVAPAALLLLLLLAAGGGVHCLRSRAESGATVLELRHHASLGSGGRSGSAEEARGVLASDAARVSSLQRRIGSYGLIRSSDAASKLAQVPVTSGARLRTLNYVATVGIGGGEATVIVDTASELTWVQCKPCDACHDQQEPLFDPSASPSYAAVPCNSSSCDALRVATGMSGGQACDQPAACSYALSYRDGSYSRGVLAHDRLSLAGEDIEGFVFGCGTSNQGPFGGTSGLMGLGRSPLSLISQTTEQFGGVFSYCLPPKESGSSGSLVLGDDASAYRNSTPIVYTAMVTDPLQGPFYMVNLTGISVGGEEVQSPGFSAGGGGGGRAIVDSGTIITSLVPSVYAAVRGEFVRQLAEYPRAPAFSILDTCFDLTGLREVQVPSLRLAFDGGAEVEVDSKGVLYVVAGDASQVCLALAALGSEDDTPIIGNYQQKNLRVVFDTAASQIGFAQETCDYI

SEQ ID NO: 12696 - protein, 287 aa, Triticum aestivum
  misc_feature (1)..(287): Ceres Seq. ID no. 14303093
MSGGQACDQPAACSYALSYRDGSYSRGVLAHDRLSLAGEDIEGFVFGCGTSNQGPFGGTSGLMGLGRSPLSLISQTTEQFGGVFSYCLPPKESGSSGSLVLGDDASAYRNSTPIVYTAMVTDPLQGPFYMVNLTGISVGGEEVQSPGFSAGGGGGGRAIVDSGTIITSLVPSVYAAVRGEFVRQLAEYPRAPAFSILDTCFDLTGLREVQVPSLRLAFDGGAEVEVDSKGVLYVVAGDASQVCLALAALGSEDDTPIIGNYQQKNLRVVFDTAASQIGFAQETCDYI

SEQ ID NO: 12697 - DNA, 1542 bp, Triticum aestivum
  misc_feature (1)..(1542): Ceres Seq. ID no. 14303097
cccggcctctccaacgagtctcaacttccttatccaacgatccgctggacgggactaactaggctgtcacatcccttccatctaccacaaccaacggcgtcggcgataatggccgccttgccgcagctgcttctgatcctcttccccgcggaggttgccgtcctgaccctgctgctggcctcggcggcgggagcgcgggctcacgcctcctcgtcctcgtcatcggcgacgtaccgctgcggctggtgcccgcgcaggtccaccgcgtccatcctccctcccggcgccggcgcactgaccggtgccgcctgcgggtatggtggccaggcggcggagatggccgtcgacggggggttccacattgcggccgtcagcgccagtttcttccgcggtggccgggcctgcggcgcctgctaccagctgatgtgcaggggacggagcgcgtgcgcggcgggcggcgtcaaggtcgtcgtcgtcgccgacgtggcagagacgaacatgaccggtggtggtgccggtgggcggtttctgctcagcaaggacgccttcgccgccttggcgacgccagaccgtaacgccgagctcgcggacgcagacgtcgacgtggacttcaggaggattccctgcgtgtacaagagcaagaacttggcggttaaagtggaggagacgagcagcagggaccggggttacctcgccctccgcttcctctaccagggcggccagaccgacatcgccgccgtcgaggtcgcgcaggcggtcaccggttccagcggcaccaacaacgacgcagcaccgttgcagacatcctggcagtacatgacccggcgcgaggcgtccccgtcgatgtggcgcacgtcgcgcgtgccggccggtctgctgcagctccggcttgtggtcaccgcgggctccggcggcaagtggctgcgcgccgacggggcggtgctccccgcgaattggcagcccggcgcggtctacgacaccggcctgcgcgtcaccgacgtcgccgcaagcacctgcggcggcgcctcctgttcctccacggacgagggcgacgacgccgagcagctccgatgacacgcttcccggcatgcatgatgcatccaccacggaccgatcgatggtccattggagccggcccgcacgtcaacggcgacgccgcgcatgcagatctgcaccggccagccgccggaatatcggtcgatgctgcatgtacactgtacagagacgtgtacatcgcaacgtacgacatgcatgcatgtgtgcacggccgacgacgagttccggttaggacaaaacctccatggtcccgctctaaacagaggatgttggcgcgtagcttcacgtgtggagggaagggactaatgcagagaagaacatgtagatggctctgttcaggtcttggaatcacatgacagcactactgttttggctgctcgtcctcttcctctttggaatagtaggagagtattattgtaggttgattgcatgggctgattaagattgatcagttgccgactaagactaagttaactgtattgcatt

SEQ ID NO: 12698 - protein, 357 aa, Triticum aestivum
  misc_feature (1)..(357): Ceres Seq. ID no. 14303098
PGLSNESQLPYPTIRWTGLTRLSHPFHLPQPTASAIMAALPQLLLILFPAEVAVLTLLLASAAGARAHASSSSSSATYRCGWCPRRSTASILPPGAGALTGAACGYGGQAAEMAVDGGFHIAAVSASFFRGGRACGACYQLMCRGRSACAAGGVKVVVVADVAETNMTGGGAGGRFLLSKDAFAALATPDRNAELADADVDVDFRRIPCVYKSKNLAVKVEETSSRDRGYLALRFLYQGGQTDIAAVEVAQAVTGSSGTNNDAAPLQTSWQYMTRREASPSMWRTSRVPAGLLQLRLVVTAGSGGKWLRADGAVLPANWQPGAVYDTGLRVTDVAASTCGGASCSSTDEGDDAEQLR

SEQ ID NO: 12699 - protein, 321 aa, Triticum aestivum
  misc_feature (1)..(321): Ceres Seq. ID no. 14303099
MAALPQLLLILFPAEVAVLTLLLASAAGARAHASSSSSSATYRCGWCPRRSTASILPPGAGALTGAACGYGGQAAEMAVDGGFHIAAVSASFFRGGRACGACYQLMCRGRSACAAGGVKVVVVADVAETNMTGGGAGGRFLLSKDAFAALATPDRNAELADADVDVDFRRIPCVYKSKNLAVKVEETSSRDRGYLALRFLYQGGQTDIAAVEVAQAVTGSSGTNNDAAPLQTSWQYMTRREASPSMWRTSRVPAGLLQLRLVVTAGSGGKWLRADGAVLPANWQPGAVYDTGLRVTDVAASTCGGASCSSTDEGDDAEQLR

SEQ ID NO: 12700 - protein, 245 aa, Triticum aestivum
  misc_feature (1)..(245): Ceres Seq. ID no. 14303100
MAVDGGFHIAAVSASFFRGGRACGACYQLMCRGRSACAAGGVKVVVVADVAETNMTGGGAGGRFLLSKDAFAALATPDRNAELADADVDVDFRRIPCVYKSKNLAVKVEETSSRDRGYLALRFLYQGGQTDIAAVEVAQAVTGSSGTNNDAAPLQTSWQYMTRREASPSMWRTSRVPAGLLQLRLVVTAGSGGKWLRADGAVLPANWQPGAVYDTGLRVTDVAASTCGGASCSSTDEGDDAEQLR

SEQ ID NO: 12701 - DNA, 2009 bp, Triticum aestivum
  misc_feature (1)..(2009): Ceres Seq. ID no. 14303109
agcaattattctcctccgctacctccgcggtggccagcacaccacaccacaccacgcttcccttgccttgctcccccacctccacacccatctcattcccccctctccccatccccaatggcgccgacctccgagccctagatagatcccccgcgcgcagccgcatggcggagcacgccgcccgccacctccgccgccgcggccccgtcgccggctggtgctgctccttcgccggcgtcccgcccagccccgaccaccgcctccacccccaccgcaccctctcccacgccgccgcgccgccaaccgcaggatctgtgtgcaccggcggcgagggcccgcggaagcaaccacagctgccgcccaaatccccctcctccttccacggctctccctcctccaagctggcgggcctcatcgactacccgcgccggatcctctccccgggccgcgtctcccccatcgaccccgacgcccacccccctcctcctccgacccccaaccccaccgaccagccgcagcacccggagcagcagcagccgccgccgatggccccgttcgtcgcggtgcgggaggaggaggaggaggggcagggggacgggctggatctgaggctctgcctccgcgggagggacggcgccaccggctgcgtcatggacctcgactccgccgtgctctgcgggagcagcgccttcttcgccgccatggcgcccgagcccaacgcctctggtgccggggcccggaggatcgaggtcgacggggtcgacaacgtcgccgccttcagggacgccgtcgagctcatgttccatgccgacgctccgcggtggctcgccagggccggcgtctcgcgagccatcgccgtcctcgaggtggcttcctcgattatgtttgacaaaggaatcagatcatgtttggagtacattgaagcagttccatggaatgagaatgaggaagagaagctaaagcacctctttgctagatgcactttcgatgaagcgttatcaaaagatgtattggcaagattgcaaacacaaccgtctagcagctcggaagacctgactggtcagctcatccaatctgtcaccagcagcacaaacaacagtgcaagaaaagatatgcagtctttgatcaatggtcttctaagcaagagctcagtatatcaaaaggatttgtctggattaaacaaaaggagcctataccagatttgctgctcgtgtctaaacctactggtggaactttttaaggaagactcggagccaaaatgcggcacagaccaggcactgaaagttaggcacaataataaacccatgattgaaagagtgagcaagcaaagtgagaacctcagctggctatttgagatcctggtcaacaatgatatggcagagaatttcgtcgtgctgtgggccggacaagacgatctcatcaggatgcacgagcaagcatcgccaatgttcaggtacgagctaagccggatatcagcgggcgtgttcatcgctctcgggcaagggaaagtgcagtgcccgagcgatctgaggagccaactgttccggggatggttcacgccgatgttaaccgatttcggttggctccaaaggtgctccaaggggctggatgcgagagcgctggaggatagcctggggcaagcccttctcaccctcccgctccgggagcagcagagcctgttcgaggaatggttccagtgcttcgcgtctagtggcgcggaatgcccgaaccttagccgagccttccaggtatggtggcgaaggtcattcgctagatagatttgtcggtagagcccctgcagcagcagaagcctatgagatattgcttggtccgcgtgagttatatcggtatttgtagtgtgtgtatgaatgtaagataagatgaattcctgttagcctgtagagttgaatttttgtttatgatcttggctcggttcttcccagtgtatgcactacttgacaaaaccacaattcccagagtcagcaatagaattgttgtagaattgcttc

SEQ ID NO: 12702 - protein, 591 aa, Triticum aestivum
  misc_feature (1)..(591): Ceres Seq. ID no. 14303110
QLFSSATSAVASTPHHTTLPLPCSPTSTPISFPPLPIPNGADLRALDRSPARSRMAEHAARHLRRRGPVAGWCCSFAGVPPSPDHRLHPHRTLSHAAAPPTAGSVCTGGEGPRKQPQLPPKSPSSFHGSPSSKLAGLIDYPRRILSPGRVSPIDPDAHPPPPPTPNPTDQPQHPEQQQPPPMAPFVAVREEEEEGQGDGLDLRLCLRGRDGATGCVMDLDSAVLCGSSAFFAAMAPEPNASGAGARRIEVDGVDNVAAFRDAVELMFHADAPRWLARAGVSRAIAVLEVASSIMFDKGIRSCLEYIEAVPWNENEEEKLKHLFARCTFDEALSKDVLARLQTQPSSSSEDLTGQLIQSVTSSTNNSARKDMQSLINGLLSKSSVYQKDLSGLNKRSLYQICCSCLNLLVELFKEDSEPKCGTDQALKVRHNNKPMIERVSKQSENLSWLFEILVNNDMAENFVVLWAGQDDLIRMHEQASPMFRYELSRISAGVFIALGQGKVQCPSDLRSQLFRGWFTPMLTDFGWLQRCSKGLDARALEDSLGQALLTLPLREQQSLFEEWFQCFASSGAECPNLSRAFQVWWRRSFAR

SEQ ID NO: 12703 - protein, 537 aa, Triticum aestivum
  misc_feature (1)..(537): Ceres Seq. ID no. 14303111
MAEHAARHLRRRGPVAGWCCSFAGVPPSPDHRLHPHRTLSHAAAPPTAGSVCTGGEGPRKQPQLPPKSPSSFHGSPSSKLAGLIDYPRRILSPGRVSPIDPDAHPPPPPTPNPTDQPQHPEQQQPPPMAPFVAVREEEEEGQGDGLDLRLCLRGRDGATGCVMDLDSAVLCGSSAFFAAMAPEPNASGAGARRIEVDGVDNVAAFRDAVELMFHADAPRWLARAGVSRAIAVLEVASSIMFDKGIRSCLEYIEAVPWNENEEEKLKHLFARCTFDEALSKDVLARLQTQPSSSSEDLTGQLIQSVTSSTNNSARKDMQSLINGLLSKSSVYQKDLSGLNKRSLYQICCSCLNLLVELFKEDSEPKCGTDQALKVRHNNKPMIERVSKQSENLSWLFEILVNNDMAENFVVLWAGQDDLIRMHEQASPMFRYELSRISAGVFIALGQGKVQCPSDLRSQLFRGWFTPMLTDFGWLQRCSKGLDARALEDSLGQALLTLPLREQQSLFEEWFQCFASSGAECPNLSRAFQVWWRRSFAR

SEQ ID NO: 12704 - protein, 410 aa, Triticum aestivum
  misc_feature (1)..(410): Ceres Seq. ID no. 14303112
MAPFVAVREEEEEGQGDGLDLRLCLRGRDGATGCVMDLDSAVLCGSSAFFAAMAPEPNASGAGARRIEVDGVDNVAAFRDAVELMFHADAPRWLARAGVSRAIAVLEVASSIMFDKGIRSCLEYIEAVPWNENEEEKLKHLFARCTFDEALSKDVLARLQTQPSSSSEDLTGQLIQSVTSSTNNSARKDMQSLINGLLSKSSVYQKDLSGLNKRSLYQICCSCLNLLVELFKEDSEPKCGTDQALKVRHNNKPMIERVSKQSENLSWLFEILVNNDMAENFVVLWAGQDDLIRMHEQASPMFRYELSRISAGVFIALGQGKVQCPSDLRSQLFRGWFTPMLTDFGWLQRCSKGLDARALEDSLGQALLTLPLREQQSLFEEWFQCFASSGAECPNLSRAFQVWWRRSFAR

SEQ ID NO: 12705 - DNA, 1217 bp, Triticum aestivum
  misc_feature (1)..(1217): Ceres Seq. ID no. 14303126
tcacgagattttctaggctgaactgtacatgatatggcagaattagtagctcattagaagtacccttgtgattagagcaacactagcttcaaatgcatctttttctcaatcttttgtgcatagtaattaatgatgcaaaggccagggcccaaccttttctctaaaaaaatacataaaagaattctggggaacaaaaaattatcccattaaagtgcatctgaaccccattgtagtactactggttaatgaaactatcccattataataattatcacaagagctttacacacacacaaagagggctgattccttagacttatttccatcgaaacacatgaattaaaacttgcacgtaccagcttactagtatatataggatatcgcttggctgcagctttgcttttcccccggtttttataggctgtttctgggacagaaatgaccatctttgcattgcattgcattgcattgcattgcatactgaaatgaaatgaaacagggttcgatgtggaggagacttcggttgacggccccgacgacgtccaagggctggacgcatccgccgcacacatagcaaacctgctatcgtccgagccctctgatgtgaggcttgggataggcggtttcagcatgggagccgccactgcgctccactctgccgcatgttatgctcatggaaggttctcaaacggtgttgcctaccctattaccctcagcgctatcattgggttgagcggctggcttccctgctccaggaccctgaggaccaagattgagagctcacagactgctttcaggagggctgctgccttgccgataatgcttggccatggaagaggcgacgaggtagtcacgtacaggaacggcgagaggtcgtccgagtttctgcggaattcgggcttttcgtacctgaatttcaaagcctacaacggactgggccatcacaccatccctgaggaaatggacgatgtctccaagtggctcagggcaaggctcgggcttgatcgctcttgcggctaattaagtggagaagcttgtgccttggtggctgacacatgacatgagagaaatgtattgacactatagaggaggagaaggttgatatatataggttaatcatatgaagagatcacgaccggcatgtgttgatatataactcctcactactgaatttcatgttacacttatattgtactactaagagttgtaccccagct

SEQ ID NO: 12706 - protein, 129 aa, Triticum aestivum
  misc_feature (1)..(129): Ceres Seq. ID no. 14303127
MGAATALHSAACYAHGRFSNGVAYPITLSAIIGLSGWLPCSRTLRTKIESSQTAFRRAAALPIMLGHGRGDEVVTYRNGERSSEFLRNSGFSYLNFKAYNGLGHHTIPEEMDDVSKWLRARLGLDRSCG

SEQ ID NO: 12707 - protein, 66 aa, Triticum aestivum
  misc_feature (1)..(66): Ceres Seq. ID no. 14303128
MLGHGRGDEVVTYRNGERSSEFLRNSGFSYLNFKAYNGLGHHTIPEEMDDVSKWLRARLGLDRSCG

SEQ ID NO: 12708 - DNA, 1975 bp, Triticum aestivum
  misc_feature (1)..(1975): Ceres Seq. ID no. 14303141
cttttgaagccccgccctccttccacaggcccatgacgaagccaacctagctagcttgcaccacgtaccgtgtggcattatatatacgcccaccggccctccgtgccatcccggtctccatcgccatggcgacgacggggagggtgaggccttctcctctcctcgcggcgtggctggctctcggctttgcgtggcattgcgcgcttcaccatgctccggcggcggccgtgacgctgtcgacggcgtcccggtgggtcgtggacgaggccggggaccgcgtgaagctggcgtgcgtgaactggccgtcgcacctggagccgatgctggcggaggggctgggcaagcggcccgtgggcgccatcgccggggacgtggccaccatggggttcaactgcgtccggctcacctggcccacgttcctggtgaccaacgcctcctactcgtccctcaccgtcgagcagtccttccagaggctcaacctcaccgagtcgctcgccggcatcagggccaacaaccccgccgtcgtcgacctcaagctcatcgacgcgttcaaggccgtggtgagcagcctcggtgagaacaacgtcatggtgatcctggacaaccacgtgagcaagcccgggtggtgctgcgacaacgcggacggcaacgggttcttcggcgacggctacttcgagccggacgtctgggtcgacggcctcaccaagatggccaccatgttcgccggcgtcccccacgtcgtcggcatgagcctcaggaacgagctccgaggccccaggcagaactcaaacgactggtacaagtacatgcagcgcggcgcggaggcggtgcacgcggcgaacccgcgggtgctggtgatcctctcgggcctcagcttcgacaacgacctggcgttcctcaactcgcggcaggtgagcctgagcttcgcccggaaggcggcgttcgaggtgcactggtacagcttctccaacggccaggagtgggcggcggggaaccccaacgaggtgtgcgcgcggatcggggccagcgtgtcccgccgcgcgctctacctgctcgactagggctggccggtcttcctcagcgagttcggcgtcgacaaccgcggcgggaacgccaacgacaaccgctactacggctgcgccgccgccgtcgccgccgacctcgacctcgactgggcgctctggacgctgcaggggagctactacctccgccagggcgtgctggacctcgacgaggtctacggcgtgctcgaccgggcctggtccaggccacgcaacgtcaccgcgctccgcagggtccagcccctgcagcgcccgctccgagggcctggctacgcggaggcggcgccgtacacggtgctgttccacccggcgacggggctgtgcgtgctgcggcggtcgctggcgcagccactggagctgggcgcgtgcgccgggacggaggcctgggagtacgcgccgcagcaggggcggctggcgctgcgggacggcccgctgatgtgcctccacgcgcagggcgccggccggcccgtgcgcctcggcacgccttgcgacgacgacatgtcccggtggcgcctcgtgtcggactccaagctgcacgtcgccgtcaacgcatcgtcttcgtcgtcatccggctccggcgatggccgtggcatgctctgcctggacgtcggcgcggacggccagagcgtggtcaccaacccgtgccgctgcctgagcgcggacaacagctgcgacccggagagccagtggttcaagatggtgagcagcacgaggagcgtcgccgccaatagcatgctcgcggagctgcctgtgaagctcgggagctcgaagattcgctcgctttgatcggcgccagtaggaccgacatatataattgtataggtgcacgcatccgttgtactagctgcaaaggcgccgggatggacgagagaagctgctctagaaccggaataatatccttcagagttcagatg

SEQ ID NO: 12709 - protein, 311 aa, Triticum aestivum
  misc_feature (1)..(311): Ceres Seq. ID no. 14303142
MATTGRVRPSPLLAAWLALGFAWHCALHHAPAAAVTLSTASRWVVDEAGDRVKLACVNWPSHLEPMLAEGLGKRPVGAIAGDVATMGFNCVRLTWPTFLVTNASYSSLTVEQSFQRLNLTESLAGIRANNPAVVDLKLIDAFKAVVSSLGENNVMVILDNHVSKPGWCCDNADGNGFFGDGYFEPDVWVDGLTKMATMFAGVPHVVGMSLRNELRGPRQNSNDWYKYMQRGAEAVHAANPRVLVILSGLSFDNDLAFLNSRQVSLSFARKAAFEVHWYSFSNGQEWAAGNPNEVCARIGASVSRRALYLLD

SEQ ID NO: 12710 - protein, 246 aa, Triticum aestivum
  misc_feature (1)..(246): Ceres Seq. ID no. 14303143
MLAEGLGKRPVGAIAGDVATMGFNCVRLTWPTFLVTNASYSSLTVEQSFQRLNLTESLAGIRANNPAVVDLKLIDAFKAVVSSLGENNVMVILDNHVSKPGWCCDNADGNGFFGDGYFEPDVWVDGLTKMATMFAGVPHVVGMSLRNELRGPRQNSNDWYKYMQRGAEAVHAANPRVLVILSGLSFDNDLAFLNSRQVSLSFARKAAFEVHWYSFSNGQEWAAGNPNEVCARIGASVSRRALYLLD

SEQ ID NO: 12711 - protein, 226 aa, Triticum aestivum
  misc_feature (1)..(226): Ceres Seq. ID no. 14303144
MGFNCVRLTWPTFLVTNASYSSLTVEQSFQRLNLTESLAGIRANNPAVVDLKLIDAFKAVVSSLGENNVMVILDNHVSKPGWCCDNADGNGFFGDGYFEPDVWVDGLTKMATMFAGVPHVVGMSLRNELRGPRQNSNDWYKYMQRGAEAVHAANPRVLVILSGLSFDNDLAFLNSRQVSLSFARKAAFEVHWYSFSNGQEWAAGNPNEVCARIGASVSRRALYLLD

SEQ ID NO: 12712 - DNA, 1529 bp, Triticum aestivum
  misc_feature (1)..(1529): Ceres Seq. ID no. 14303161
ctttaacagcataccctaaactggttacctatattcatcccattgcatctatctctattcaagggtgccaacacactccaaataaattgtagtacaatgcatcaaacaatgattcaaatactttccataatccaccacaggttaggttaattttttaggaatacattgcatgtcaaatgattcaaatattatcagagctctttatggtgaatgctgatagttatgcaagttagtttaagtaattttaccacatgcatggagatggtagcatcagctgcatgacgcataccttctgaattatgtaattcctccattgcggttgtcccctagttcttttagatatttcataccttattttgttgtccagccattttttgtattaagatctcattagttgttagggtttagttggtacctcaacacaaagtcggtcagcactgagtaaagttcatcatatcatcaattggcttgttaactgccactgttttgattgtttagaatgctgtatcgctgtcttttattcactcttcaccgcttgcaggtacctgagaaacatggcagtggtggccatttaagttactttcttgttgtatgcgcaattggtggagtggtaactgtctattgtatgcttgaaaaaactcagtatgtggatgttgatgaagatgtagtacttcctgactttgttgactggtctgctgcgcctgcatttgttgatatggttcatccaagctacaatttccattgcggttccttctgggctgtcgttgctgttaaatccattgaggcggagtatgccataaaaaatggtgtggttttgaatttgtcagttcaacaagttatagactgtgctgccattgagggctgcaaaggttcttcccttatgaaggcctatagatacatcaaggttgctggcttgaccactgaagagtcatatcctggcccaccatccccaggcaggtcatttttgcatggtctgtttcgtggttattgccggatggagggcaagcctgttgctgtgagaattgaaggtgttcagagggtacgggccacggaggatcacttgatgagagctcttcaatcttcccctgttgctgtgtatgttaacgtaaatgaccgatttagaaaataccgcggggagggttatcttgatatcaatgactgcccacctcgttctgtaaagcctgggggaaggcatgttcttttgctagtaggctatggcaccgacagcgatggcaccaaatactggaaggtaatgaatacttgggggacatggtggggtaagcatggttacggcaagtttatcagggatggtcacccacacggtgtggcaggtatcaccgagtacaatgggtttaggcccgtgctcagcaagagctgttgcaagtaggttggttttaggcaagtagtttggttttaggcctgtgctcagcaagagctgttgcaagtagtttggttttaggtgcaaccctagaagtctgaatatgtaactctgacagccttttactgtgagcggcaaatataacctgctg

SEQ ID NO: 12713 - protein, 295 aa, Triticum aestivum
  misc_feature (1)..(295): Ceres Seq. ID no. 14303162
MLYRCLLFTLHRLQVPEKHGSGGHLSYFLVVCAIGGVVTVYCMLEKTQYVDVDEDVVLPDFVDWSAAPAFVDMVHPSYNFHCGSFWAVVAVKSIEAEYAIKNGVVLNLSVQQVIDCAAIEGCKGSSLMKAYRYIKVAGLTTEESYPGPPSPGRSFLHGLFRGYCRMEGKPVAVRIEGVQRVRATEDHLMRALQSSPVAVYVNVNDRFRKYRGEGYLDINDCPPRSVKPGGRHVLLLVGYGTDSDGTKYWKVMNTWGTWWGKHGYGKFIRDGHPHGVAGITEYNGFRPVLSKSCCK

SEQ ID NO: 12714 - protein, 253 aa, Triticum aestivum
  misc_feature (1)..(253): Ceres Seq. ID no. 14303163
MLEKTQYVDVDEDVVLPDFVDWSAAPAFVDMVHPSYNFHCGSFWAVVAVKSIEAEYAIKNGVVLNLSVQQVIDCAAIEGCKGSSLMKAYRYIKVAGLTTEESYPGPPSPGRSFLHGLFRGYCRMEGKPVAVRIEGVQRVRATEDHLMRALQSSPVAVYVNVNDRFRKYRGEGYLDINDCPPRSVKPGGRHVLLLVGYGTDSDGTKYWKVMNTWGTWWGKHGYGKFIRDGHPHGVAGITEYNGFRPVLSKSCCK

SEQ ID NO: 12715 - protein, 223 aa, Triticum aestivum
  misc_feature (1)..(223): Ceres Seq. ID no. 14303164
MVHPSYNFHCGSFWAVVAVKSIEAEYAIKNGVVLNLSVQQVIDCAAIEGCKGSSLMKAYRYIKVAGLTTEESYPGPPSPGRSFLHGLFRGYCRMEGKPVAVRIEGVQRVRATEDHLMRALQSSPVAVYVNVNDRFRKYRGEGYLDINDCPPRSVKPGGRHVLLLVGYGTDSDGTKYWKVMNTWGTWWGKHGYGKFIRDGHPHGVAGITEYNGFRPVLSKSCCK

SEQ ID NO: 12716 - DNA, 1582 bp, Triticum aestivum
  misc_feature (1)..(1582): Ceres Seq. ID no. 14303165
atttcgagacaattatgctgtgctggtccgtcgcactcgcacggaagaaaaggcccggagcgcagagacggccaaatgagttgctcataattccgtctcgctgctggttcgtttagcgccattctcccaggctgctacgaaactcagggccgcgtccgcgtcaatggcttcttgctgctgcccaatcattgcctggttcgtctctttcctcctcgtcttccccgtcctcgtctcctccgcgacggcgggcaatggcagcacattcggggaggagcagctcgggctccggcggatgaaggcccggctcgccagggtcagggaagcctctgtcaagacgatccagagccccgacggcgacgtcatagactgcgtgccctctcacctgcagcccgcgttcgatcatcccaggctgagaggccagaaaccagaggacgaacctgcggcgcggccagggaatgccggcgccgtggcagacgacgaggaggaggtcttgccgcagacgtggaggagctccggcgagtggtgccccaaggggacgataccggttaggcgggcgacggagggcgacctgctcagggccagctccgtccggaggttcgggatgaagccccggagtgccgcggcacggcgggactccaccagcaacggccatgagcacgcggtggggtacgtgagcggcgggcagttctacggcgccaaggcgagcctgaacgtgtggccggcgcacgtgtcgtcgccggcggagttcagcctgtcccagatctgggtcatctccggctccttcggcaacgacctcaacaccatcgaggccggctggcaggtcagccctgagctgtacggggacaacagccccaggttcttcacctactggaccaacgacgcgtaccaggagacggggtgctacaacctgcactgcgcggggttcgtgcagaccaacggccgggtggtgatcggcgccgccatcacgccggtgtcggcctacggcggccggcagttcgacatcacgctcatgatctggaaggaccccaagaagggcaactggtggctgcagctgggcccgtcgggcgcgctcgtgggctactggccgtcctccctcttcacccacctgggcgcgcgcggccgcggcggcgccgacatggtgcagttcggcggcgaggcggtcaacacgcggccgtccgggtcgcacacgcccacgcagatgggcagcggccggttccccggcgaagggtacggccgcgcggcctacttccggaacgtgcaggtcgtggactgggacaacaacctcatcccggcggccgggctacggctcctcgccgaccacccggggtgctacgacatcgccggcggccagggcggcgcgtggggcagctacttctactacggcgggcctggcaggaacgtccggtgcccctagaaccgatactgcttactcaggccacagatgctaattccagcaaaattaatataccacaaaagtctttagttataatttctttgcatgcatgcttgtttatgatcatagatagagtttttttgcactcgaatttatttgaaaggagggacattgactcgcattgcacgc

SEQ ID NO: 12717 - protein, 416 aa, Triticum aestivum
  misc_feature (1)..(416): Ceres Seq. ID no. 14303166
MASCCCPIIAWFVSFLLVFPVLVSSATAGNGSTFGEEQLGLRRMKARLARVREASVKTIQSPDGDVIDCVPSHLQPAFDHPRLRGQKPEDEPAARPGNAGAVADDEEEVLPQTWRSSGEWCPKGTIPVRRATEGDLLRASSVRRFGMKPRSAAARRDSTSNGHEHAVGYVSGGQFYGAKASLNVWPAHVSSPAEFSLSQIWVISGSFGNDLNTIEAGWQVSPELYGDNSPRFFTYWTNDAYQETGCYNLHCAGFVQTNGRVVIGAAITPVSAYGGRQFDITLMIWKDPKKGNWWLQLGPSGALVGYWPSSLFTHLGARGRGGADMVQFGGEAVNTRPSGSHTPTQMGSGRFPGEGYGRAAYFRNVQVVDWDNNLIPAAGLRLLADHPGCYDIAGGQGGAWGSYFYYGGPGRNVRCP

SEQ ID NO: 12718 - protein, 373 aa, Triticum aestivum
  misc_feature (1)..(373): Ceres Seq. ID no. 14303167
MKARLARVREASVKTIQSPDGDVIDCVPSHLQPAFDHPRLRGQKPEDEPAARPGNAGAVADDEEEVLPQTWRSSGEWCPKGTIPVRRATEGDLLRASSVRRFGMKPRSAAARRDSTSNGHEHAVGYVSGGQFYGAKASLNVWPAHVSSPAEFSLSQIWVISGSFGNDLNTIEAGWQVSPELYGDNSPRFFTYWTNDAYQETGCYNLHCAGFVQTNGRVVIGAAITPVSAYGGRQFDITLMIWKDPKKGNWWLQLGPSGALVGYWPSSLFTHLGARGRGGADMVQFGGEAVNTRPSGSHTPTQMGSGRFPGEGYGRAAYFRNVQVVDWDNNLIPAAGLRLLADHPGCYDIAGGQGGAWGSYFYYGGPGRNVRCP

SEQ ID NO: 12719 - protein, 270 aa, Triticum aestivum
  misc_feature (1)..(270): Ceres Seq. ID no. 14303168
MKPRSAAARRDSTSNGHEHAVGYVSGGQFYGAKASLNVWPAHVSSPAEFSLSQIWVISGSFGNDLNTIEAGWQVSPELYGDNSPRFFTYWTNDAYQETGCYNLHCAGFVQTNGRVVIGAAITPVSAYGGRQFDITLMIWKDPKKGNWWLQLGPSGALVGYWPSSLFTHLGARGRGGADMVQFGGEAVNTRPSGSHTPTQMGSGRFPGEGYGRAAYFRNVQVVDWDNNLIPAAGLRLLADHPGCYDIAGGQGGAWGSYFYYGGPGRNVRCP

SEQ ID NO: 12720 - DNA, 2231 bp, Triticum aestivum
  misc_feature (1)..(2231): Ceres Seq. ID no. 14303173
acctcgctcactccccaagctcactctcacacccacttcaaacccctccaccccaaaccccagccacccacccaccatggccgcccaccccaccgggaccaagaagcggagcggcagcggccatggggccgccgcggccctcgtcgtcgccgccctcctcgtcctctgctccaccgcgtccatggcgctcaccccggacggcgaggcgctgctggagctcaagctggcattcaacgccacggcggggcagcggctgggcagctggcgggccgccgaccccaacccctgcggctgggagggcgtctcctgctccttcccggacctcagggtccatgccataaatctgccctacatgcagctcgggggcatcatctcgcccagcatcggcaggctcaccaagctgcagagactagctctgcaccagaacagcctgcacggccccatccccgccgagatcaggaactgcaccgagctcagagccatttacctgagagccaactacctgcaaggcggcatccctccggggatcggcgacctcactcacctcaccatcctggacctgtccagcaatctgctgcggggtgcaataccggcgacgatcgggagcctaactcatttgcggttcctgaacctctccaccaacttcttctcgggagagatcccgaatgtcggcgtcctcggaaccttcaagagcagctcgtatgtcggaaatctggagctttgtgggctgcccatacagaaaggttgccgcggaaccctcgggttccctgcggtgctgccgcactctgaccccctctcctcctctggtgtttctccaatcaccaacaataataaaacctcacactttctgaatggcgttgtgatcggttcaatgtcaaccatggccatcgcgctggtcgcggtgctaggcttcctctgggtatgcttgctgtccaggaagaagaatggtgtgaactatgagaaaatggacaagcaaactgtcccggatggtgcaaagcttgtgacataccagtggaaccttccgtattcgtcgggcgagatcattagaaggctggagctgcttgatgaagaggatgtggttggttgcggcgggtttggtacggtgtacaagatggtgatggatgatggcacggcgtttgccgtcaagagggttgacctcaatcgagagaggcgagacaagacttttgagaaggagctcgagatcctgggcagcattaggcatatcaaccttgtcaatctgcaaggatactgccggctctccacggccaaactactcatatatgatttcatggagctgggcagcttggatagctacctccatggagatgcacaggaggatcagccattgaactggaatgcgcgtatgaagatcgccctgggctctgcccgcggtttggcatatctgcaccatgattgctcgccggggatcgtccaccgggacatcaaagccagcaacatccttctggacagatgcttggagccgcgcgtgtctgatttcggcctcgcgaggctgctggtggacaatgagacccatgtaaccactgtcgtggcgggtaccttcgggtacctagcaccagagtacctgcaaaatgggcattcgaccgagaaatcagacgtgtatagctttggggtgcttttgctggaactggtgaccggaaagaggcctacggattcttgcttcctcaacaagggtctcaacatcgtcggctggctgaacacgctgagcggggagcatcgcctggaggagatcctggactcgcggtcgggcgacgcggaggtggaggcggtggaggggatcctggacatcgcggccatgtgcacggacgcggacccggggcagcggccgtccatgggcgcggtgctcaagatgctggaggaggagatcctgtcgccctgcctcagcgagctctactacgagcagcacctggagctctgagagccttgagtgtaggtgagtgagtggacagtgccagttgtgcaggtactgctgctcatgatcgaccgatgatggcctggatctggattgaagaagctcaagttttgtagatacgcttgatgatgaaccaccaccgtgtgtgtaggatggactgtgttggcatctctagactagcgagtggttcttgggtcagaaccaggaccaatgcagcaatcggctgtgctttttgtacatagggttggagacctttgagccttttctttcatcccctttttccgacgtggttgcttcttcg

SEQ ID NO: 12721 - protein, 644 aa, Triticum aestivum
  misc_feature (1)..(644): Ceres Seq. ID no. 14303174
PRSLPKLTLTPTSNPSTPNPSHPPTMAAHPTGTKKRSGSGHGAAAALVVAALLVLCSTASMALTPDGEALLELKLAFNATAGQRLGSWRAADPNPCGWEGVSCSFPDLRVHAINLPYMQLGGIISPSIGRLTKLQRLALHQNSLHGPIPAEIRNCTELRAIYLRANYLQGGIPPGIGDLTHLTILDLSSNLLRGAIPATIGSLTHLRFLNLSTNFFSGEIPNVGVLGTFKSSSYVGNLELCGLPIQKGCRGTLGFPAVLPHSDPLSSSGVSPITNNNKTSHFLNGVVIGSMSTMAIALVAVLGFLWVCLLSRKKNGVNYEKMDKQTVPDGAKLVTYQWNLPYSSGEIIRRLELLDEEDVVGCGGFGTVYKMVMDDGTAFAVKRVDLNRERRDKTFEKELEILGSIRHINLVNLQGYCRLSTAKLLIYDFMELGSLDSYLHGDAQEDQPLNWNARMKIALGSARGLAYLHHDCSPGIVHRDIKASNILLDRCLEPRVSDFGLARLLVDNETHVTTVVAGTFGYLAPEYLQNGHSTEKSDVYSFGVLLLELVTGKRPTDSCFLNKGLNIVGWLNTLSGEHRLEEILDSRSGDAEVEAVEGILDIAAMCTDADPGQRPSMGAVLKMLEEEILSPCLSELYYEQHLEL

SEQ ID NO: 12722 - protein, 619 aa, Triticum aestivum
  misc_feature (1)..(619): Ceres Seq. ID no. 14303175
MAAHPTGTKKRSGSGHGAAAALVVAALLVLCSTASMALTPDGEALLELKLAFNATAGQRLGSWRAADPNPCGWEGVSCSFPDLRVHAINLPYMQLGGIISPSIGRLTKLQRLALHQNSLHGPIPAEIRNCTELRAIYLRANYLQGGIPPGIGDLTHLTILDLSSNLLRGAIPATIGSLTHLRFLNLSTNFFSGEIPNVGVLGTFKSSSYVGNLELCGLPIQKGCRGTLGFPAVLPHSDPLSSSGVSPITNNNKTSHFLNGVVIGSMSTMAIALVAVLGFLWVCLLSRKKNGVNYEKMDKQTVPDGAKLVTYQWNLPYSSGEIIRRLELLDEEDVVGCGGFGTVYKMVMDDGTAFAVKRVDLNRERRDKTFEKELEILGSIRHINLVNLQGYCRLSTAKLLIYDFMELGSLDSYLHGDAQEDQPLNWNARMKIALGSARGLAYLHHDCSPGIVHRDIKASNILLDRCLEPRVSDFGLARLLVDNETHVTTVVAGTFGYLAPEYLQNGHSTEKSDVYSFGVLLLELVTGKRPTDSCFLNKGLNIVGWLNTLSGEHRLEEILDSRSGDAEVEAVEGILDIAAMCTDADPGQRPSMGAVLKMLEEEILSPCLSELYYEQHLEL

SEQ ID NO: 12723 - protein, 584 aa, Triticum aestivum
  misc_feature (1)..(584): Ceres Seq. ID no. 14303176
MALTPDGEALLELKLAFNATAGQRLGSWRAADPNPCGWEGVSCSFPDLRVHAINLPYMQLGGIISPSIGRLTKLQRLALHQNSLHGPIPAEIRNCTELRAIYLRANYLQGGIPPGIGDLTHLTILDLSSNLLRGAIPATIGSLTHLRFLNLSTNFFSGEIPNVGVLGTFKSSSYVGNLELCGLPIQKGCRGTLGFPAVLPHSDPLSSSGVSPITNNNKTSHFLNGVVIGSMSTMAIALVAVLGFLWVCLLSRKKNGVNYEKMDKQTVPDGAKLVTYQWNLPYSSGEIIRRLELLDEEDVVGCGGFGTVYKMVMDDGTAFAVKRVDLNRERRDKTFEKELEILGSIRHINLVNLQGYCRLSTAKLLIYDFMELGSLDSYLHGDAQEDQPLNWNARMKIALGSARGLAYLHHDCSPGIVHRDIKASNILLDRCLEPRVSDFGLARLLVDNETHVTTVVAGTFGYLAPEYLQNGHSTEKSDVYSFGVLLLELVTGKRPTDSCFLNKGLNIVGWLNTLSGEHRLEEILDSRSGDAEVEAVEGILDIAAMCTDADPGQRPSMGAVLKMLEEEILSPCLSELYYEQHLEL

SEQ ID NO: 12724 - DNA, 1618 bp, Triticum aestivum
  misc_feature (1)..(1618): Ceres Seq. ID no. 14303177
cccaccaccccgcgcatttattcccctcccgtcctccccccgcgccatgccgtcgcgcccctcctctcctcccacgcccgcctccccgcccgtccgacaccgcccgtcccacgctggcgccgccccccgccgccgtcgccgtcgccgcaacgatgccggagcctgacgacgagggggcggggcagcagcagccaaaggcggggcccgcgctcgagggcctcgtggtggggagctactgccacgacgtgctcctccagggcggccgcgtcgtgggcgagacgctcggcggggcggcggccttcgtctccaccgtgctcgacgccgcctcgcccccggaggcctccttctccgtcgtgtccaaggtcgggcccgacttcgcctacgcctccgcgccggcgcccgcgcggcaccccccgctgctctgccccgcgcggcccaccacctccttccacgcccggttctccgacgccgccgcgtccgcgcacgcgcccgacaggcagctcaggcgcgtccacgcctgcgatccgatctaccccgatgacctccccgaccgccgcttcgcctacggcctcgccgtcggcgtcgccggggaggtgctgccggagacgctcgagcggatgattcggctctgccgcgcggtgctcgtggacgcgcaggcgctgatccgggccttcggcgccgagggcgacggcagcggcgctgccgtccgccacgtggcgctggagggcacgccgtacgcgcggcttctgcagcgggtggcgttcctcaaggcgtcgtcggaggaggcgccgtacgtgggggtggagacggcgagacggcgctgctgcgtgatcgtgacggaggggagggacgggtgccggctttattgggacggcggggaggcacgcgtggcgccgttccccgccgtccaggtggatcctacaggtgccggagacagctatctcgccggtttcgcggccggtctgctttgggggctctcagctacggacgccgcgctgcttggtaacttcttcggcgcagctgctgtctcccaagtcggcgttcccaccttccatcccaagatgttgcaggctgtcaaacggatactcgaggacaaggcgataccatggtctagtccatgtataaacggcaccaccttcaccttccagagatcgattatgcacgatgagctacacgcgtccctggaagaagcggcgaggctgatgcgcgagcagtcaccaccagcaactgagaatggtgatggtattctctcggcacaagagccgacttcaccgccaagtggatgctgacctgaagttcactgcgaaataatgggaaactgccctcccagattttacattgagatctgtacagccaacagacgaaatagattgctcggccagagcttacactcatgaactgtgttgaatagggttctactcagacagtttctcatttgtcaggcaaagcaaaagagcgagttagcatatggagcaccattctgtaatactgagattgagcttgtttcggctgggctgtacataccgccccttcaagttccccctataattttgtagttcatgagatccaacaaaagtactcgtattatggaggcaaatttacacatggttttaaagtt

SEQ ID NO: 12725 - protein, 428 aa, Triticum aestivum
  misc_feature (1)..(428): Ceres Seq. ID no. 14303178
HHPAHLFPSRPPPAPCRRAPPLLPRPPPRPSDTARPTLAPPPAAVAVAATMPEPDDEGAGQQQPKAGPALEGLVVGSYCHDVLLQGGRVVGETLGGAAAFVSTVLDAASPPEASFSVVSKVGPDFAYASAPAPARHPPLLCPARPTTSFHARFSDAAASAHAPDRQLRRVHACDPIYPDDLPDRRFAYGLAVGVAGEVLPETLERMIRLCRAVLVDAQALIRAFGAEGDGSGAAVRHVALEGTPYARLLQRVAFLKASSEEAPYVGVETARRRCCVIVTEGRDGCRLYWDGGEARVAPFPAVQVDPTGAGDSYLAGFAAGLLWGLSATDAALLGNFFGAAAVSQVGVPTFHPKMLQAVKRILEDKAIPWSSPCINGTTFTFQRSIMHDELHASLEEAARLMREQSPPATENGDGILSAQEPTSPPSGC

SEQ ID NO: 12726 - protein, 378 aa, Triticum aestivum
  misc_feature (1)..(378): Ceres Seq. ID no. 14303179
MPEPDDEGAGQQQPKAGPALEGLVVGSYCHDVLLQGGRVVGETLGGAAAFVSTVLDAASPPEASFSVVSKVGPDFAYASAPAPARHPPLLCPARPTTSFHARFSDAAASAHAPDRQLRRVHACDPIYPDDLPDRRFAYGLAVGVAGEVLPETLERMIRLCRAVLVDAQALIRAFGAEGDGSGAAVRHVALEGTPYARLLQRVAFLKASSEEAPYVGVETARRRCCVIVTEGRDGCRLYWDGGEARVAPFPAVQVDPTGAGDSYLAGFAAGLLWGLSATDAALLGNFFGAAAVSQVGVPTFHPKMLQAVKRILEDKAIPWSSPCINGTTFTFQRSIMHDELHASLEEAARLMREQSPPATENGDGILSAQEPTSPPSGC

SEQ ID NO: 12727 - protein, 223 aa, Triticum aestivum
  misc_feature (1)..(223): Ceres Seq. ID no. 14303180
MIRLCRAVLVDAQALIRAFGAEGDGSGAAVRHVALEGTPYARLLQRVAFLKASSEEAPYVGVETARRRCCVIVTEGRDGCRLYWDGGEARVAPFPAVQVDPTGAGDSYLAGFAAGLLWGLSATDAALLGNFFGAAAVSQVGVPTFHPKMLQAVKRILEDKAIPWSSPCINGTTFTFQRSIMHDELHASLEEAARLMREQSPPATENGDGILSAQEPTSPPSGC

SEQ ID NO: 12728 - DNA, 1582 bp, Triticum aestivum
  misc_feature (1)..(1582): Ceres Seq. ID no. 14303185
ctggccagaccgagctgctcttcctcctccagttcagacgtggcggtttgactttctgacctcggaaacgatcgaaggcgccttccgtgggaaaaatcccggggcgattcctggagaagaagccgcggattcaggggcggtagaggagagcgcgcctcgccgttaccaggattttcgcccccgccctcgctccgatcgaggagaactttattaactactgaagataactggtagcggaatgaaggcaccatcactgcttgttcagtgtttccctggcttgcttccaagcaaggccactagttgtgtgccgattatatcagagagggatctgcatctaccatcaccagctgttgaactaatcccttcaaagagtgctcatccttacaaatatgctggagagaaggtcgatgtccaaggtcttgatgttttcaaggggaaggtcagtgtagcagatatgatagccttttccccttctgaagtagcatcatcaaagcatgatggtagtctcaaatattgggagagttccatcactattgtgaatattattaagaatgagatccgtgatgggcagctgagcttcaggggcaagcgagttctagagcttggatgtggatctggccttgctgggatttttgcctgcttgaagggtgcgtctatagttcacttccaggacacaaatgcagaaaccataagatgcagaacaatgcccaatgtgcttgcgaatcttgagcaggctcgggacagacagaacagaccatcagagagcccagttacaccatccagacagttgttagctcccgttgtccatttctatgccggggagtgggatgagctccccacaattctctcagttgtgcatccacctgcacaaccaacaaaccttagcttctctgaggatgattttatggatggctgcagtagccatgacggaagcagtatagttggtcaggaccccaggcgatcgaggaagctttctggcagccgtgcatgggagagggccagtgagactgacccagcagatggaggatacgatgtaattttgatttctgagatccctaatgcggtgaactctctaaggaagctctatgcccttatcactaagtgcctacgccctccttatggagtcttgtatgtggcttcaaagaagaacttggttggttcaaacggcggcgcaaggcagcttaaaagtttgatggaggaggaaggtgtccttggtggtcacttcttgactgagatatctgaccgggagatatggaagttctttttcaagtaaaccggcaaatgttggagctgaaaaagatgatcctggccatggcctcgtatacaaaaagaattcgtttgtctactcgcagcgctgtacataccgcgaagcttagttcgattaattctttggtgataggtccaagtatgcgtctcagttgttaaacctgcaaatgtgttggcattttaacccttttgtagatctcctatctcctaggtaactgttgagcttttgcataccgaatctatggtgctggcctatcacagcacgctatcagcaatatgtacaaatggaaatggttactgtacttgcttgtcggcc

SEQ ID NO: 12729 - protein, 344 aa, Triticum aestivum
  misc_feature (1)..(344): Ceres Seq. ID no. 14303186
MKAPSLLVQCFPGLLPSKATSCVPIISERDLHLPSPAVELIPSKSAHPYKYAGEKVDVQGLDVFKGKVSVADMIAFSPSEVASSKHDGSLKYWESSITIVNIIKNEIRDGQLSFRGKRVLELGCGSGLAGIFACLKGASIVHFQDTNAETIRCRTMPNVLANLEQARDRQNRPSESPVTPSRQLLAPVVHFYAGEWDELPTILSVVHPPAQPTNLSFSEDDFMDGCSSHDGSSIVGQDPRRSRKLSGSRAWERASETDPADGGYDVILISEIPNAVNSLRKLYALITKCLRPPYGVLYVASKKNLVGSNGGARQLKSLMEEEGVLGGHFLTEISDREIWKFFFK

SEQ ID NO: 12730 - protein, 272 aa, Triticum aestivum
  misc_feature (1)..(272): Ceres Seq. ID no. 14303187
MIAFSPSEVASSKHDGSLKYWESSITIVNIIKNEIRDGQLSFRGKRVLELGCGSGLAGIFACLKGASIVHFQDTNAETIRCRTMPNVLANLEQARDRQNRPSESPVTPSRQLLAPVVHFYAGEWDELPTILSVVHPPAQPTNLSFSEDDFMDGCSSHDGSSIVGQDPRRSRKLSGSRAWERASETDPADGGYDVILISEIPNAVNSLRKLYALITKCLRPPYGVLYVASKKNLVGSNGGARQLKSLMEEEGVLGGHFLTEISDREIWKFFFK

SEQ ID NO: 12731 - protein, 189 aa, Triticum aestivum
  misc_feature (1)..(189): Ceres Seq. ID no. 14303188
MPNVLANLEQARDRQNRPSESPVTPSRQLLAPVVHFYAGEWDELPTILSVVHPPAQPTNLSFSEDDFMDGCSSHDGSSIVGQDPRRSRKLSGSRAWERASETDPADGGYDVILISEIPNAVNSLRKLYALITKCLRPPYGVLYVASKKNLVGSNGGARQLKSLMEEEGVLGGHFLTEISDREIWKFFFK

SEQ ID NO: 12732 - DNA, 1740 bp, Triticum aestivum
  misc_feature (1)..(1740): Ceres Seq. ID no. 14303197
ccatatctccgactcctctgccctgccgcgcgggcccaactcggcgccaaaaaatccatctcgcatctcacgctcttctagctctctccccccgccatggaagaccggcaagccaccggcggcgccggcgccgcgaccaaggtccgcgtgaacggcacgacggccgaagcgacactctccaccacaggcggctgccccgagctccggtggcgctgcgctagggccacggcggagaggagcctctcgctggaggccgacgtgctcggagccgaggcgagcggcaaggaggtcgtcgtcagggccttcgtggcggaggatgccgcgagaccgccgtcgcgcgccaaggcgagagggaagaggcgcaggagggagtacgtcttcgagatggccgacggcgagggcgcggccgcggcctggggcgagacgctacggggctgcttggactcgatagggcggcccaagagattgttcgtcctcatcaacccctacggaggcaaaagacgggcgagcaagatctacgaggcagaaatcaaacccctgttcgaagccgccggcgtcgaagtcacaatgcaagagacccggtaccgggggcatgcccgggaggtggcgtcctctctcgaccttgcaagatacgacgggatcgtctgcgtcagcggcgatggcgtcctcgtggagcttgtgaatgggattctgcaaagatcagactgggaggaagcaataaagatgccaattggcatagttccagctggcacaggaaacggcatggccaaatcacttctccatgctgccagcgagacgtgctcagtttcagacgccgtatttgccattatcacaggtcacaagcaggccttggatgtctgcaccatagtgcaaggggaaaaaaccgttttcagcgtgctgtcaactacttggggtttggtggccgatgttgacatcgagtctgagaaatacaggtggatggggagcgcacggttcgacttttatgctctggttcgcataatgaacttgcgccgataccgcggaagcgtccactttgtgcctgccccgggctacgaggcatacggagatcctgtcaagcaagccgagactcccatcgtggagcgaaacggggaatctcaggtgtgctcttatcaaggccctacggccgagtttcaatgttcagactggagatccatcgatggcccatttgtgggtgtgtgcgtctacaacgtgccatgggctgctgaaaacgccatggcagctcctgaagccaagttctcagatggctacatggacgcggtcatactgaaagactgtccgaaggccgatcttttggctctgctgctgaagatgagcgatgggagctacgtgaaatcgccacatgttacatatttcaaggtgaaatccttccggttatcgccggggcagctcatggaggatcccaaaaggggcggcatcgtagacgtggacggcgaggtggttgccagaggagaaggaacgtacggcatgaaccaggatcaagatttgatggcctatggcccttctgttcagctgaccgtgcaccagggcttggccactgtatactgtcccaaatgatcctaccttgccttctcctctcaccagagattgtccctttgtgtcaattgctttattcttgttcatatttaaaaaagtactctattgtattcaaaacaagattctttcaagaaaaggtcacacgtctctgagcaaaaaaaaaaaaaaaaaaaaaaaaaaaaaaat

SEQ ID NO: 12733 - protein, 492 aa, Triticum aestivum
  misc_feature (1)..(492): Ceres Seq. ID no. 14303198
MEDRQATGGAGAATKVRVNGTTAEATLSTTGGCPELRWRCARATAERSLSLEADVLGAEASGKEVVVRAFVAEDAARPPSRAKARGKRRRREYVFEMADGEGAAAAWGETLRGCLDSIGRPKRLFVLINPYGGKRRASKIYEAEIKPLFEAAGVEVTMQETRYRGHAREVASSLDLARYDGIVCVSGDGVLVELVNGILQRSDWEEAIKMPIGIVPAGTGNGMAKSLLHAASETCSVSDAVFAIITGHKQALDVCTIVQGEKTVFSVLSTTWGLVADVDIESEKYRWMGSARFDFYALVRIMNLRRYRGSVHFVPAPGYEAYGDPVKQAETPIVERNGESQVCSYQGPTAEFQCSDWRSIDGPFVGVCVYNVPWAAENAMAAPEAKFSDGYMDAVILKDCPKADLLALLLKMSDGSYVKSPHVTYFKVKSFRLSPGQLMEDPKRGGIVDVDGEVVARGEGTYGMNQDQDLMAYGPSVQLTVHQGLATVYCPK

SEQ ID NO: 12734 - protein, 396 aa, Triticum aestivum
  misc_feature (1)..(396): Ceres Seq. ID no. 14303199
MADGEGAAAAWGETLRGCLDSIGRPKRLFVLINPYGGKRRASKIYEAEIKPLFEAAGVEVTMQETRYRGHAREVASSLDLARYDGIVCVSGDGVLVELVNGILQRSDWEEAIKMPIGIVPAGTGNGMAKSLLHAASETCSVSDAVFAIITGHKQALDVCTIVQGEKTVFSVLSTTWGLVADVDIESEKYRWMGSARFDFYALVRIMNLRRYRGSVHFVPAPGYEAYGDPVKQAETPIVERNGESQVCSYQGPTAEFQCSDWRSIDGPFVGVCVYNVPWAAENAMAAPEAKFSDGYMDAVILKDCPKADLLALLLKMSDGSYVKSPHVTYFKVKSFRLSPGQLMEDPKRGGIVDVDGEVVARGEGTYGMNQDQDLMAYGPSVQLTVHQGLATVYCPK

SEQ ID NO: 12735 - protein, 335 aa, Triticum aestivum
  misc_feature (1)..(335): Ceres Seq. ID no. 14303200
MQETRYRGHAREVASSLDLARYDGIVCVSGDGVLVELVNGILQRSDWEEAIKMPIGIVPAGTGNGMAKSLLHAASETCSVSDAVFAIITGHKQALDVCTIVQGEKTVFSVLSTTWGLVADVDIESEKYRWMGSARFDFYALVRIMNLRRYRGSVHFVPAPGYEAYGDPVKQAETPIVERNGESQVCSYQGPTAEFQCSDWRSIDGPFVGVCVYNVPWAAENAMAAPEAKFSDGYMDAVILKDCPKADLLALLLKMSDGSYVKSPHVTYFKVKSFRLSPGQLMEDPKRGGIVDVDGEVVARGEGTYGMNQDQDLMAYGPSVQLTVHQGLATVYCPK

SEQ ID NO: 12736 - DNA, 2019 bp, Triticum aestivum
  misc_feature (1)..(2019): Ceres Seq. ID no. 14303201
tttttttccttcttccctttctctgggtttcaagctctggttcgttctcgtcaggctcaggggtcagggcaagaggaagcaactggttggctggctgctgctgatccatgaacgtcccggtgggcttcatcgccaagctctggagcctcgtgtcattcttgcccttcttcgtcctcctcctgctgctcggctccgccaaagctcttttgatcggcccggtcgtcgcggccatcgttttcctcggcgattcagccgtcatcatcggcctgtggcctgcgcatttcgtctggacgtactgctgcgtgctagccacgaagcgaattgggccggttctgaagatccttgccgtggtattcctgccactgccgttgctcctgttgccggtgcttggcattgtagggagccttctggttggtatcggttatggagtgttcactcccctcatggcgacttttgaggctgttggcgagggtgtcgcggacaagctctctcattgctttttggatggtactgctagcacaataaggggagcttgtatggtggtgcgtgatgttaccgacttctgcttccactcatacttctccttcatggacgagctttccgagaaaatgggggatgacgaagaacctactgacatcaagttgtcttatctaccgcggagcttccttgttgcgctggttgccgttcctctggatgtattgatgattactggggtggcattgtggaaaagcccctgcatgttgttgaaaggatggcaaagactctgcgaggatctagtagggagggaagggccttttctagagactgtttgtgtccctttcgctggtttggccattatattgtggccgcttgccgtcattgcaggagtgattgcatcatttcttagcagcttcttctttggcctccatgctggattaattgcttatcaggaggcttcatttcaaatggggctatcatacatgatctctgcagtagcattgtatgatgaatacacaaatgatcttctttatttgagagaaggttcttgtttgccaaggcccaagtaccggaaagcgggttctgcgaagtatgagaccggccgcaacaaagatgagcacaacgttacagctgcatctgcagagaagcaacatcaaggccagcgtaagcataggagggttctacaccggtcaaagacattcatggaaactatccaaagactaagacccattcaaatatgggattggctcttccgatcttgcgagataaatgggaggatattactgagcgagggactgataagctctgaagatatagaggaatttataaccaaaggaaagggaaagaagctgagcataaaactacctgcctggtgcatccttcactgtctgatacgatccgcgaaacacgacacgcacggtttgctcatatctgatgacgttgaggtgaccaacttcaattggccaaaggacaaggtgttcgactggatgctcggaccactgctggttctgaaggagcagatgaagaaactggagctcaccgaagacgaggagctgtgcttgcagaagctcatcatgacgaacgcgaacgaaaaaccgtcggattgggacgactgcggtttcccgtcaagcgacggcgtgaagagagctcagctacaggcgatcatcagaaggttgcaagggatcgtggccaatatgtcccggataccgagcttcaggagacggttcatgagcctggccagggcactgtacctggaggcgatcgacgcgggcaccatcgacgggtcgcggaaggtggagcgcaaggtcaaggctgacatcgcctccgaggaacttcagagcagagatgtcggagatacgaagggttcatcgaatgggacgtctgtggacgttgacatggtctgatgttgttgtgctgtgcaaacatattcttttgcagaactctctacctgctgcgatgtgcattagttgttttattagacgttggtaacacacatcacgcaacgcgtggacacgatggatgactgtgcctgctgggatcaag

SEQ ID NO: 12737 - protein, 590 aa, Triticum aestivum
  misc_feature (1)..(590): Ceres Seq. ID no. 14303202
MNVPVGFIAKLWSLVSFLPFFVLLLLLGSAKALLIGPVVAAIVFLGDSAVIIGLWPAHFVWTYCCVLATKRIGPVLKILAVVFLPLPLLLLPVLGIVGSLLVGIGYGVFTPLMATFEAVGEGVADKLSHCFLDGTASTIRGACMVVRDVTDFCFHSYFSFMDELSEKMGDDEEPTDIKLSYLPRSFLVALVAVPLDVLMITGVALWKSPCMLLKGWQRLCEDLVGREGPFLETVCVPFAGLAIILWPLAVIAGVIASFLSSFFFGLHAGLIAYQEASFQMGLSYMISAVALYDEYTNDLLYLREGSCLPRPKYRKAGSAKYETGRNKDEHNVTAASAEKQHQGQRKHRRVLHRSKTFMETIQRLRPIQIWDWLFRSCEINGRILLSEGLISSEDIEEFITKGKGKKLSIKLPAWCILHCLIRSAKHDTHGLLISDDVEVTNFNWPKDKVFDWMLGPLLVLKEQMKKLELTEDEELCLQKLIMTNANEKPSDWDDCGFPSSDGVKRAQLQAIIRRLQGIVANMSRIPSFRRRFMSLARALYLEAIDAGTIDGSRKVERKVKADIASEELQSRDVGDTKGSSNGTSVDVDMV

SEQ ID NO: 12738 - protein, 478 aa, Triticum aestivum
  misc_feature (1)..(478): Ceres Seq. ID no. 14303203
MATFEAVGEGVADKLSHCFLDGTASTIRGACMVVRDVTDFCFHSYFSFMDELSEKMGDDEEPTDIKLSYLPRSFLVALVAVPLDVLMITGVALWKSPCMLLKGWQRLCEDLVGREGPFLETVCVPFAGLAIILWPLAVIAGVIASFLSSFFFGLHAGLIAYQEASFQMGLSYMISAVALYDEYTNDLLYLREGSCLPRPKYRKAGSAKYETGRNKDEHNVTAASAEKQHQGQRKHRRVLHRSKTFMETIQRLRPIQIWDWLFRSCEINGRILLSEGLISSEDIEEFITKGKGKKLSIKLPAWCILHCLIRSAKHDTHGLLISDDVEVTNFNWPKDKVFDWMLGPLLVLKEQMKKLELTEDEELCLQKLIMTNANEKPSDWDDCGFPSSDGVKRAQLQAIIRRLQGIVANMSRIPSFRRRFMSLARALYLEAIDAGTIDGSRKVERKVKADIASEELQSRDVGDTKGSSNGTSVDVDMV

SEQ ID NO: 12739 - protein, 447 aa, Triticum aestivum
  misc_feature (1)..(447): Ceres Seq. ID no. 14303204
MVVRDVTDFCFHSYFSFMDELSEKMGDDEEPTDIKLSYLPRSFLVALVAVPLDVLMITGVALWKSPCMLLKGWQRLCEDLVGREGPFLETVCVPFAGLAIILWPLAVIAGVIASFLSSFFFGLHAGLIAYQEASFQMGLSYMISAVALYDEYTNDLLYLREGSCLPRPKYRKAGSAKYETGRNKDEHNVTAASAEKQHQGQRKHRRVLHRSKTFMETIQRLRPIQIWDWLFRSCEINGRILLSEGLISSEDIEEFITKGKGKKLSIKLPAWCILHCLIRSAKHDTHGLLISDDVEVTNFNWPKDKVFDWMLGPLLVLKEQMKKLELTEDEELCLQKLIMTNANEKPSDWDDCGFPSSDGVKRAQLQAIIRRLQGIVANMSRIPSFRRRFMSLARALYLEAIDAGTIDGSRKVERKVKADIASEELQSRDVGDTKGSSNGTSVDVDMV

SEQ ID NO: 12740 - DNA, 1572 bp, Triticum aestivum
  misc_feature (1)..(1572): Ceres Seq. ID no. 14303205
acacaaacttgttttcgattcctgctgctgtaggctgtagctcccccaaatctcatccaccggccggccctaatggcgctcccagatgaacttctggaggagatcttcctccgcctccccgcggccgccgacctcgcccgcgcctccacggcctgcgtctccttccgccgcgtcatcaccggccatcccttcctccgccggttccgcaccctccacccgccgtccctcctcggcatcctctgcggcggcctcatccccgcccagccgccccacccttccgccgcagcggcagccacctacgccgacgccgacttgtcgtgctcctttatgcccccaccccgcgaccgctggcgccaccgcgacggccgcgcccttttctcccccgccctcgaggggatcggcggcgactacagccctagccacctggtcacggagttcgccgtctgcgaccccctgcaccgtcgttacctcctgctgcctgccctccccgaccttctagtcggtcaagtccataggccggacatcgtggactgcgaggccttcctcgctcctcctggccctgacgacgttggggctgactggtcgtcattcagagtcatgtacttggtgcgttgcacagccaagctcttgctcttcgtcttctccacctgcgccggacaatggctcgctaatcctgttacagttgacgtgtttcgatgcggggcggcgttgcaccgcttctacgcccatggctgcttctattgggaggttttccggtctaacaagttgctcgtgctcgatgcgcgcaggatagagttctccactgttgacctcccgcctccacctggccctgatgtgcgaaagatggccattgtagaggcaggaggaggaaggcttgggatgcttactatctctgagcatcctgaacctggtgcagatcatctcctgtatgccgtacagtctaaggatgtgaatggcagaaaccagtggcaatccaagtcagtaatttatttgccggaaaattatcgctatggcatcatgggtgtagctggtggatacttactcctaactgggtatccagaagacgacatgccaatcagctatttttcactgaatctccagaattttcaggttgagtgcttctgtcagactggtgataaagtcatttttggtgacctgtatgccgatctcccaccgtccttgtccccaccaactctttgaactggacctcccagagaatgcgctgatggcaaagactcgcaagcgtgactaatgtcatgttaaggagaataaatgtaagaacttttgaaagggtgaaagtggtttgcactcgacagcaacttgcagctaagagaagaagaaggcagaagttgttgatgaccggcgcatccaccattttttcttgttaaaattctcacgacgtttctgctttttgttgcagtacttttatgcctggcaagagactagactatcttattatgccgctttgtttgaactgagtgctaggtaagctttgcggcttcagcaaccctggaaatagtttgcttttggtggtgtatgattctagtatcagtatgtatgtatggcataccc

SEQ ID NO: 12741 - protein, 375 aa, Triticum aestivum
  misc_feature (1)..(375): Ceres Seq. ID no. 14303206
MALPDELLEEIFLRLPAAADLARASTACVSFRRVITGHPFLRRFRTLHPPSLLGILCGGLIPAQPPHPSAAAAATYADADLSCSFMPPPRDRWRHRDGRALFSPALEGIGGDYSPSHLVTEFAVCDPLHRRYLLLPALPDLLVGQVHRPDIVDCEAFLAPPGPDDVGADWSSFRVMYLVRCTAKLLLFVFSTCAGQWLANPVTVDVFRCGAALHRFYAHGCFYWEVFRSNKLLVLDARRIEFSTVDLPPPPGPDVRKMAIVEAGGGRLGMLTISEHPEPGADHLLYAVQSKDVNGRNQWQSKSVIYLPENYRYGIMGVAGGYLLLTGYPEDDMPISYFSLNLQNFQVECFCQTGDKVIFGDLYADLPPSLSPPTL

SEQ ID NO: 12742 - protein, 290 aa, Triticum aestivum
  misc_feature (1)..(290): Ceres Seq. ID no. 14303207
MPPPRDRWRHRDGRALFSPALEGIGGDYSPSHLVTEFAVCDPLHRRYLLLPALPDLLVGQVHRPDIVDCEAFLAPPGPDDVGADWSSFRVMYLVRCTAKLLLFVFSTCAGQWLANPVTVDVFRCGAALHRFYAHGCFYWEVFRSNKLLVLDARRIEFSTVDLPPPPGPDVRKMAIVEAGGGRLGMLTISEHPEPGADHLLYAVQSKDVNGRNQWQSKSVIYLPENYRYGIMGVAGGYLLLTGYPEDDMPISYFSLNLQNFQVECFCQTGDKVIFGDLYADLPPSLSPPTL

SEQ ID NO: 12743 - protein, 200 aa, Triticum aestivum
  misc_feature (1)..(200): Ceres Seq. ID no. 14303208
MYLVRCTAKLLLFVFSTCAGQWLANPVTVDVFRCGAALHRFYAHGCFYWEVFRSNKLLVLDARRIEFSTVDLPPPPGPDVRKMAIVEAGGGRLGMLTISEHPEPGADHLLYAVQSKDVNGRNQWQSKSVIYLPENYRYGIMGVAGGYLLLTGYPEDDMPISYFSLNLQNFQVECFCQTGDKVIFGDLYADLPPSLSPPTL

SEQ ID NO: 12744 - DNA, 1673 bp, Triticum aestivum
  misc_feature (1)..(1673): Ceres Seq. ID no. 14303209
aaaaaacaaaccgagtctgcagttgcaattcctatacgacctcgatccccctcctcccccaacaagtcgaatccgcccgcgttgaggaaggatgtgctcccaagcccccaaatccctagacctagacctcgacctcgacccctccccagtccccagatccctagacctcgaccccgaatcccaaccctgccccggcgtgacgacgacggccgagctccccgacgaagcggagaacccctgcttgtcgcggtttcgccaccggcgactcctcgccttcctctcgcgccagcgctacgatgtcgccttcaacgggctgatgctacaggcgagtgagcccttctgcttggagcgtctgcaggggctcgtgaggaagggcctgtgggaggatgccatcgactaccttgatggcttcctgcctgccggccccaggagcctccacgcccacgccttccgcaacttcctcttgatgcaccactacttggccagcatcgccgccggggatgagtccgccatggacaagctccgggcccaccattggatgcaacacgtcgttgatgcctggaaaacgaaagcgaaccacacatttcctcgtgtcatggcccaagccctgctctcgtcggagcagctccgggcgtccatggactgggatggagtgaggagggaggctgcgtacatcctctccaggttagcttcgaggaccccagagctcaacaggccgctcacattgccgacttgctacaccaagccgcaccaagtgcttcccattgacgttgcctctggattgtgcaggcggcggcgcgtgaaggaacagcgtccccatctacaaccagctgctgttgccagggccatccttttcagggggagtcagcgttacacaagatctctagccaactcaagtttcgaattcattgagaatgcaaaggaatggtttgcgactatcatggatgaaagcttacgagctggttcaggtaaagcgacttccctgctccaacaaattatgaaggaaggtgctcctgttgctccagtttcactgataagtcctgctaaaagttctggtacctcgtcattgacaaatgcaggtgctcctgtttcttcagtgtgccagactctgaacatgacaagagacgctgaaaactatggtatctcatcagtgacaagtccaggcccagaaaagagtcaagaaggtgcctgcggtggtttcaatcccagaaagaatccacgggcagaattggcaactattgatgaatatttggattcaaaaaggcaacgtactactgggacttttggggaagcaagtatggtgccggtgaatgaagtttgggctgaagctcactagctggctggtgaagtcaaccacctagattcataaccgagatatggtgacaatggtggtggtggtggtgtacctgctaactcgcacttcatttatgctttgaacttggatgttaattatacaactttgtttccaagtgcctactatgagctagtacttcataagtaattctgctagtgttggttaatcaggctgcttactgccagcattttctatcactgaaatgaaaattaatcagattattggatcatatcattcagtaacagtattgccaaaagatacacgtaagtgtgacctcaagcattgctttatgaagttgctcagaaaaaaaaaaaaaaac

SEQ ID NO: 12745 - protein, 414 aa, Triticum aestivum
  misc_feature (1)..(414): Ceres Seq. ID no. 14303210
MCSQAPKSLDLDLDLDPSPVPRSLDLDPESQPCPGVTTTAELPDEAENPCLSRFRHRRLLAFLSRQRYDVAFNGLMLQASEPFCLERLQGLVRKGLWEDAIDYLDGFLPAGPRSLHAHAFRNFLLMHHYLASIAAGDESAMDKLRAHHWMQHVVDAWKTKANHTFPRVMAQALLSSEQLRASMDWDGVRREAAYILSRLASRTPELNRPLTLPTCYTKPHQVLPIDVASGLCRRRRVKEQRPHLQPAAVARAILFRGSQRYTRSLANSSFEFIENAKEWFATIMDESLRAGSGKATSLLQQIMKEGAPVAPVSLISPAKSSGTSSLTNAGAPVSSVCQTLNMTRDAENYGISSVTSPGPEKSQEGACGGFNPRKNPRAELATIDEYLDSKRQRTTGTFGEASMVPVNEVWAEAH

SEQ ID NO: 12746 - protein, 339 aa, Triticum aestivum
  misc_feature (1)..(339): Ceres Seq. ID no. 14303211
MLQASEPFCLERLQGLVRKGLWEDAIDYLDGFLPAGPRSLHAHAFRNFLLMHHYLASIAAGDESAMDKLRAHHWMQHVVDAWKTKANHTFPRVMAQALLSSEQLRASMDWDGVRREAAYILSRLASRTPELNRPLTLPTCYTKPHQVLPIDVASGLCRRRRVKEQRPHLQPAAVARAILFRGSQRYTRSLANSSFEFIENAKEWFATIMDESLRAGSGKATSLLQQIMKEGAPVAPVSLISPAKSSGTSSLTNAGAPVSSVCQTLNMTRDAENYGISSVTSPGPEKSQEGACGGFNPRKNPRAELATIDEYLDSKRQRTTGTFGEASMVPVNEVWAEAH

SEQ ID NO: 12747 - protein, 289 aa, Triticum aestivum
  misc_feature (1)..(289): Ceres Seq. ID no. 14303212
MHHYLASIAAGDESAMDKLRAHHWMQHVVDAWKTKANHTFPRVMAQALLSSEQLRASMDWDGVRREAAYILSRLASRTPELNRPLTLPTCYTKPHQVLPIDVASGLCRRRRVKEQRPHLQPAAVARAILFRGSQRYTRSLANSSFEFIENAKEWFATIMDESLRAGSGKATSLLQQIMKEGAPVAPVSLISPAKSSGTSSLTNAGAPVSSVCQTLNMTRDAENYGISSVTSPGPEKSQEGACGGFNPRKNPRAELATIDEYLDSKRQRTTGTFGEASMVPVNEVWAEAH

SEQ ID NO: 12748 - DNA, 1170 bp, Triticum aestivum
  misc_feature (1)..(1170): Ceres Seq. ID no. 14303294
atttccgtacctgtctgctccgtccgcctcccaagctttgcggctccagggtttagctagggttctacccacgaccaccgccgccgcccgccccgccgccgccgcagccatggccggcgccggcgccggagaggaggacgcggcgtgggagcgcgccatcagcgcggccgtcaagagcgcgccgctctcccccttctccgcccccaaaaccctaaccctcgacggcgccatcaagtcctccaccggccgcctcccctcgccggcgctcttcgaccgcttcccctcgctcgaggagctctccgtcgcgggcgcccgcctctcctcgctcgccggcctgccccgcctcccggccctccgccgcctctccctccccgacaaccgcctcgcgggggccggctccctcgccgccgtcgccgagtcctgcggcgggaccatccgccacctcgacctcggcaacaaccgcttcgccgcggtcgaggagctcgccccgctcgcaccgctcggggtcgagtcgctggacctgtaccagtgccccgtcaccaagctcaaggggtacagggagaaggtgtttgcgctggtccccagcttgaagtacctggatggcgtcgatgccgagggcaatgaccgcctggagtccgatgaggacgaggaggaggatgaggatgaggatgaggaaggggatgaagagggggcggaggacggcgaaggggaaggggacgaagaggaagaggaaggagatgaagaagaagatggcgaggaagaggagggagatgaagaggaagaggaaggcgacgaggctgaagacgaagaggatgaggctgaggacgacgaaccggagtcaggcgcggccgagaaaagcgaggtggtcaacggaaacaagtccgcaggatctgccctgccaagcaagaggaaaagggacaatgaagatggggccaacggcgacaactgaatttgatctcgatttaaggtttgttggttcgtctttgcacgcttttcagagggttccgtgcgggaggtgtagtagaagcaagcaacctttgtactagttttgtgcaaggattttctgagaggttttcaaattttattcaagacgcgcggtggatcctcggacctgctccttcatgtgaaatttctggtactataaaccgaggcgctggctcggatcatgac

SEQ ID NO: 12749 - protein, 315 aa, Triticum aestivum
  misc_feature (1)..(315): Ceres Seq. ID no. 14303295
FPYLSAPSASQALRLQGLARVLPTTTAAARPAAAAAMAGAGAGEEDAAWERAISAAVKSAPLSPFSAPKTLTLDGAIKSSTGRLPSPALFDRFPSLEELSVAGARLSSLAGLPRLPALRRLSLPDNRLAGAGSLAAVAESCGGTIRHLDLGNNRFAAVEELAPLAPLGVESLDLYQCPVTKLKGYREKVFALVPSLKYLDGVDAEGNDRLESDEDEEEDEDEDEEGDEEGAEDGEGEGDEEEEEGDEEEDGEEEEGDEEEEEGDEAEDEEDEAEDDEPESGAAEKSEVVNGNKSAGSALPSKRKRDNEDGANGDN

SEQ ID NO: 12750 - protein, 279 aa, Triticum aestivum
  misc_feature (1)..(279): Ceres Seq. ID no. 14303296
MAGAGAGEEDAAWERAISAAVKSAPLSPFSAPKTLTLDGAIKSSTGRLPSPALFDRFPSLEELSVAGARLSSLAGLPRLPALRRLSLPDNRLAGAGSLAAVAESCGGTIRHLDLGNNRFAAVEELAPLAPLGVESLDLYQCPVTKLKGYREKVFALVPSLKYLDGVDAEGNDRLESDEDEEEDEDEDEEGDEEGAEDGEGEGDEEEEEGDEEEDGEEEEGDEEEEEGDEAEDEEDEAEDDEPESGAAEKSEVVNGNKSAGSALPSKRKRDNEDGANGDN

SEQ ID NO: 12751 - DNA, 2068 bp, Triticum aestivum
  misc_feature (1)..(2068): Ceres Seq. ID no. 14303297
accaaaccagcacacgtcaacggaacagcttagcaaaatccccaccaaggtgtagaatattccccaaaaccccacgtcccctccctctgccgccgctcccactccaccagtgtgccacccggatcgatcgatcgattgacagcgatggacacccacatcggctccgtcgacgggccgtcgccggcggcggtgaacggcgcggtcggctgcccggcgtccgcgccggggtgcccgatcatgtcctcccaccccgtggtcttcgccgtgcccggggacttcaacctcacgctgctcgaccacctcgtcgacgagcccgggctgcgcctcgtcggctgctgcaacgagctcaacgctggctacgcggccgacggctacgcgcgggcccgcggcgtcggcgcctgcgcggtcaccttcaccgtcggcggcctcagcgtgctcaacgccatcgccggcgcctacagcgagaacctgcccgtcatctgcatcgccggcgggcccaactccaacgactacggcaccaaccgcatcctccaccacaccatcggcatcccggacttctcgcaggagctgcgctgcttccagaccgtcacctgccaccaggcggtggtgaccaacctggacgacgcgcacgagcagatcgacacggccatcgccacggcgctcagggagagcaagccggtgtacctcagcatcagctgcaacctccccgggctacctcaccccaccttcacccgtgacccagtccctttcttcctcgcccccaagatgagcaacaagatggggctcgaggctgcagtggaggcaaccgtcgagttcctgaacaaggcggtgaagccagtgcttgtcgccggccccaaactgcgcgtggccaaggcggggaaggccttcgtcgaccttgtggacgccagtggctatgcctatgctataatgccatcggccaagggctttgtgccagagacgcacccccacttcctcggcacctactggggcgccgtcagcacggccttctgcgccgagatcgtcgagtcggccgacgcctacctcttcgcaggccccatcttcaacgactacagctctgttggctactcgttcctgctcaagaaggacaaggccatcatcgtgcagcctgagcgtgtcatcgtcgggaacggcccggcattcggctgcgtcatgatgaaggagtacctgtctgcattggccaagcgggttcagaagaacaccaccgcctacgagaactacaagaggatcttcgtgcctgagggccatccgctgaagggcgaggcgaacgagccgctgcgtgtcaatgtgctcttcaagcacatccaggacatgctgacgggtgatagtgcagtgctcgctgagaccggtgactcctggttcaactgccagaagctcaagctgcccgagggctgcgggtatgaattccaaatgcagtatggctcgattggatggtcagtgggtgcattgctcgggtacgcgcaaggggcgagtgacaagcgtgtcatagcctgcattggtgatgggagcttccaggtgacagcacaggatgtgtcaactatgctgcggtgcgaacagaacagcataatcttcctgatcaacaatggcgggtacacgatcgaggtggagatccacgacgggccttacaatgtcatcaagaactggaactacaccgcccttgtggaggccatccacaacggggagggcaaatgctggactgccaaggtgaagtgcgaggaggagctgacggcggcgatagagacggcgctgggggagaagaaggactctctgtgcttcatcgaggtgatcgcgcacaaggacgacaccagcaaagagcttctggaatggggctccagggtctctgctgccaactccaggccacccaacccccagtagaccaagcacgcctgcatcactagtagtcgcatccagcagcacgttgccatcaaataatgttgaacagtttatctttgctcttctgttatgttcttagttttgtgcctactagttacttgtgagctgtggccatcgcctgtgttctatcctgccaatgctaagaagatcatgagat

SEQ ID NO: 12752 - protein, 582 aa, Triticum aestivum
  misc_feature (1)..(582): Ceres Seq. ID no. 14303298
MDTHIGSVDGPSPAAVNGAVGCPASAPGCPIMSSHPVVFAVPGDFNLTLLDHLVDEPGLRLVGCCNELNAGYAADGYARARGVGACAVTFTVGGLSVLNAIAGAYSENLPVICIAGGPNSNDYGTNRILHHTIGIPDFSQELRCFQTVTCHQAVVTNLDDAHEQIDTAIATALRESKPVYLSISCNLPGLPHPTFTRDPVPFFLAPKMSNKMGLEAAVEATVEFLNKAVKPVLVAGPKLRVAKAGKAFVDLVDASGYAYAIMPSAKGFVPETHPHFLGTYWGAVSTAFCAEIVESADAYLFAGPIFNDYSSVGYSFLLKKDKAIIVQPERVIVGNGPAFGCVMMKEYLSALAKRVQKNTTAYENYKRIFVPEGHPLKGEANEPLRVNVLFKHIQDMLTGDSAVLAETGDSWFNCQKLKLPEGCGYEFQMQYGSIGWSVGALLGYAQGASDKRVIACIGDGSFQVTAQDVSTMLRCEQNSIIFLINNGGYTIEVEIHDGPYNVIKNWNYTALVEAIHNGEGKCWTAKVKCEEELTAAIETALGEKKDSLCFIEVIAHKDDTSKELLEWGSRVSAANSRPPNPQ

SEQ ID NO: 12753 - protein, 551 aa, Triticum aestivum
  misc_feature (1)..(551): Ceres Seq. ID no. 14303299
MSSHPVVFAVPGDFNLTLLDHLVDEPGLRLVGCCNELNAGYAADGYARARGVGACAVTFTVGGLSVLNAIAGAYSENLPVICIAGGPNSNDYGTNRILHHTIGIPDFSQELRCFQTVTCHQAVVTNLDDAHEQIDTAIATALRESKPVYLSISCNLPGLPHPTFTRDPVPFFLAPKMSNKMGLEAAVEATVEFLNKAVKPVLVAGPKLRVAKAGKAFVDLVDASGYAYAIMPSAKGFVPETHPHFLGTYWGAVSTAFCAEIVESADAYLFAGPIFNDYSSVGYSFLLKKDKAIIVQPERVIVGNGPAFGCVMMKEYLSALAKRVQKNTTAYENYKRIFVPEGHPLKGEANEPLRVNVLFKHIQDMLTGDSAVLAETGDSWFNCQKLKLPEGCGYEFQMQYGSIGWSVGALLGYAQGASDKRVIACIGDGSFQVTAQDVSTMLRCEQNSIIFLINNGGYTIEVEIHDGPYNVIKNWNYTALVEAIHNGEGKCWTAKVKCEEELTAAIETALGEKKDSLCFIEVIAHKDDTSKELLEWGSRVSAANSRPPNPQ

SEQ ID NO: 12754 - protein, 375 aa, Triticum aestivum
  misc_feature (1)..(375): Ceres Seq. ID no. 14303300
MSNKMGLEAAVEATVEFLNKAVKPVLVAGPKLRVAKAGKAFVDLVDASGYAYAIMPSAKGFVPETHPHFLGTYWGAVSTAFCAEIVESADAYLFAGPIFNDYSSVGYSFLLKKDKAIIVQPERVIVGNGPAFGCVMMKEYLSALAKRVQKNTTAYENYKRIFVPEGHPLKGEANEPLRVNVLFKHIQDMLTGDSAVLAETGDSWFNCQKLKLPEGCGYEFQMQYGSIGWSVGALLGYAQGASDKRVIACIGDGSFQVTAQDVSTMLRCEQNSIIFLINNGGYTIEVEIHDGPYNVIKNWNYTALVEAIHNGEGKCWTAKVKCEEELTAAIETALGEKKDSLCFIEVIAHKDDTSKELLEWGSRVSAANSRPPNPQ

SEQ ID NO: 12755 - DNA, 1342 bp, Triticum aestivum
  misc_feature (1)..(1342): Ceres Seq. ID no. 14303313
accaaaccctcgtcgcgctcgtctctcccctctcgtgctctcaccccggccagcggcatctgagattcgcgcctcgccggcggccatgggcggcgactggcaggagctggcccagtcggcggtcatcggcctcatcttcgccttcctcgtcgccaagctcatctccgtcgtcctcgccttcaaggaggacaacctccgcatcacccgctccgcccccgcccccgccccctcgcccgacgccactgcccccgcgctcgacggcggcacgagcggcggcgacggcgacagcgacggcgactgggagggcgtggagagcacggagctcgacgaggacttcagcgccgcctccgccttcgtcgcggcctccgccgccggcgtccccgaggaggcgcagctccgcctctacggcctctacaagatcgccaccgagggcccctgcaccgcgccgcagccctccgccctcaagctcaaggcccgcgccaagtggaatgcttggaataaattgggtgctatgccaacagaagaagctatggaggagtacataacaattgttgatgagatattccctaactgggctgatggctcgaaaaagaaagatggggaaaccacaatgtctgcatcaggttcgaagggaccaatgggacctgtatttagcagtttaatgtacgaggaagatcaaggaaatgaatcagaacttggtgacatccatgtttctgcaagggaaggagcaatcgaagacgttaaaaagcatcttgctgctggtgtacaaatcaacttaagagatagcgaagagagaactccgttgcactgggctgtggaccggggtcatctagatgctgttgaggttcttgtcaactcaaatgcggacgtgaatgctcaggacaacgaagggcagacagcgctccactacgccgtcctctgcgagagggaggacatcgccgaactgctcgtcaagcaccacgcggatctccagatcaaggacggcgacgggaacaccgcccgggacttgtgctcctcggcctggccgttcatgaagccggcaaactgacggcacaatgaacccgatgatacagagttgacgcctgctgctgctactaccactagtgccgagaaactatacacaccgtgcttggttagctgaatcggatgagccgttttaccaacctcatcgaatacactgtcaaaaggtaactcagcgcagggtagacatcttgtagtggtattttgcctgtttcatagtgtgtttgtgctgcaggccaactgtttggcaggaaatatatcagtgtcaggattcaggcctcgcggcctcatactgtcaatatgcatacatgttaagagcatc

SEQ ID NO: 12756 - protein, 348 aa, Triticum aestivum
  misc_feature (1)..(348): Ceres Seq. ID no. 14303314
PNPRRARLSPLVLSPRPAASEIRASPAAMGGDWQELAQSAVIGLIFAFLVAKLISVVLAFKEDNLRITRSAPAPAPSPDATAPALDGGTSGGDGDSDGDWEGVESTELDEDFSAASAFVAASAAGVPEEAQLRLYGLYKIATEGPCTAPQPSALKLKARAKWNAWNKLGAMPTEEAMEEYITIVDEIFPNWADGSKKKDGETTMSASGSKGPMGPVFSSLMYEEDQGNESELGDIHVSAREGAIEDVKKHLAAGVQINLRDSEERTPLHWAVDRGHLDAVEVLVNSNADVNAQDNEGQTALHYAVLCEREDIAELLVKHHADLQIKDGDGNTARDLCSSAWPFMKPAN

SEQ ID NO: 12757 - protein, 320 aa, Triticum aestivum
  misc_feature (1)..(320): Ceres Seq. ID no. 14303315
MGGDWQELAQSAVIGLIFAFLVAKLISVVLAFKEDNLRITRSAPAPAPSPDATAPALDGGTSGGDGDSDGDWEGVESTELDEDFSAASAFVAASAAGVPEEAQLRLYGLYKIATEGPCTAPQPSALKLKARAKWNAWNKLGAMPTEEAMEEYITIVDEIFPNWADGSKKKDGETTMSASGSKGPMGPVFSSLMYEEDQGNESELGDIHVSAREGAIEDVKKHLAAGVQINLRDSEERTPLHWAVDRGHLDAVEVLVNSNADVNAQDNEGQTALHYAVLCEREDIAELLVKHHADLQIKDGDGNTARDLCSSAWPFMKPAN

SEQ ID NO: 12758 - protein, 180 aa, Triticum aestivum
  misc_feature (1)..(180): Ceres Seq. ID no. 14303316
QTLVALVSPLSCSHPGQRHLRFAPRRRPWAATGRSWPSRRSSASSSPSSSPSSSPSSSPSRRTTSASPAPPPPPPPRPTPLPPRSTAARAAATATATATGRAWRARSSTRTSAPPPPSSRPPPPASPRRRSSASTASTRSPPRAPAPRRSPPPSSSRPAPSGMLGINWVLCQQKKLWRST

SEQ ID NO: 12759 - DNA, 1416 bp, Triticum aestivum
  misc_feature (1)..(1416): Ceres Seq. ID no. 14303528
gaaaaaaaaaaagactagacggtggcggaaaatggcgtgcggtctcctgccgctgctccacggccccctctcctctccgcctcgtcccctcgtcccctcccgctccccctccctcctcgcgcccgggaccctgcccctagcccctcgccggagcagggtttcgcgtcacctgtcccctgcccctccgcgcgcgctcccggacattgccgcggcggcggcgggcctccgggacgcggtcgccggcgccttccaggcgtccccgcctacgtggagctcggctgccacaaccaacgtcgccatcttcgtcgcgggcacgccgctgctcctctccggcctctccgcctccggcatcgcggccgcctacgtcctcggcaccctcacgtggcgcgcatttggggcccgggcttacctcctcgtcgccgcctacttcgtggtgggcacagcagtgaccaagttaaagataaaacaaaaagaagctttgggagtggctgagaaaaaaggaggaaggagaggtcctggtagtgttattggttctagtgctgctggttgtgtctgtgctctcctatcagtatataatgtgggcaggggagcattcgcggaactctggacacttggctttgttgcaagtttctgtactaaactcagtgatacagtttccagtgaaatagggaaggcatatggaagaacaacttacctagtgacaacatttaagattgttccaagaggtacagaaggtgcagtcagtgttgagggcactcttgctggaattgtagcatcaacgtttctggcagggattggttatattttggggcaggtaaatctaccacagggtgtgctatgtgttcttgcatcccagattgcaaattttggcgagagtttgattggcgcaacgctgcaggataaggaaggttttgaatggctgaacaatgatgttgtcaacgtggtcaatatctcggccggcgccgttttggctgctctaatgcagcagctgctagtgagctggcgctcatgatctttgtttcctgacttttctccagtgcatccgctctcgtagtttcttagcggtataagcagctggcatttgcttgtggaactctcaagtcgcaattgagtggatgcacgtgcttctcctttgtgacacatcttcctgtacttctaattctagcttaaggcctgttcccgttcgctccactccgcggagctccaggagctcggtttgagctgctccgtggaaataagctgcagtttcctccgctccgggggcgcagtccagggatcggagaggaaccgaacaggcctttagtaacattgatttgtggaagtaaaacactctctgccagagcatcatatgttcaagaaatactgagctggctggcgtgctactagctactactccaaacaatgatcattctacac

SEQ ID NO: 12760 - protein, 336 aa, Triticum aestivum
  misc_feature (1)..(336): Ceres Seq. ID no. 14303529
KKKKTRRWRKMACGLLPLLHGPLSSPPRPLVPSRSPSLLAPGTLPLAPRRSRVSRHLSPAPPRALPDIAAAAAGLRDAVAGAFQASPPTWSSAATTNVAIFVAGTPLLLSGLSASGIAAAYVLGTLTWRAFGARAYLLVAAYFVVGTAVTKLKIKQKEALGVAEKKGGRRGPGSVIGSSAAGCVCALLSVYNVGRGAFAELWTLGFVASFCTKLSDTVSSEIGKAYGRTTYLVTTFKIVPRGTEGAVSVEGTLAGIVASTFLAGIGYILGQVNLPQGVLCVLASQIANFGESLIGATLQDKEGFEWLNNDVVNVVNISAGAVLAALMQQLLVSWRS

SEQ ID NO: 12761 - protein, 326 aa, Triticum aestivum
  misc_feature (1)..(326): Ceres Seq. ID no. 14303530
MACGLLPLLHGPLSSPPRPLVPSRSPSLLAPGTLPLAPRRSRVSRHLSPAPPRALPDIAAAAAGLRDAVAGAFQASPPTWSSAATTNVAIFVAGTPLLLSGLSASGIAAAYVLGTLTWRAFGARAYLLVAAYFVVGTAVTKLKIKQKEALGVAEKKGGRRGPGSVIGSSAAGCVCALLSVYNVGRGAFAELWTLGFVASFCTKLSDTVSSEIGKAYGRTTYLVTTFKIVPRGTEGAVSVEGTLAGIVASTFLAGIGYILGQVNLPQGVLCVLASQIANFGESLIGATLQDKEGFEWLNNDVVNVVNISAGAVLAALMQQLLVSWRS

SEQ ID NO: 12762 - DNA, 1568 bp, Triticum aestivum
  misc_feature (1)..(1568): Ceres Seq. ID no. 14303531
aatataatttcgtaatcgccgaccgttgcctctcctccccccttccccgctccaccctgcccagccaacggctaccgtctccacgagagaaaagggggagatggcggcggagagccctagatccgcgccacggcggacaccggccgccaagagcggcgcgggcctgctcagcccccggttccgctcggcggcggagctggccggctgggacgaggagtccatcctcctcgctgcgctcgtcgtcgaggacaccccggtccgcgagtcccgccgcaagaggcggccctccggctcctccaccgcgggcggcagcgccggatctaacaccaggaagcggaggtcgcggaggcagtcggcggatgaggcaccgataccgcccgtggcgcttgtgctcgacgacgacgagaagccgaatgacaatgaagttgccaagaaggaggtgaagcaggcggaggaggagaaggagaaggtttctgtcgtggagggaaaggagaagtccggatctaccaaggaaggagaagcagcggcgaccggcgagctgccgtgcatggatcggctaagggaggagctatcttgcgctatttgcttggatgtctgctttcagccaagtaccacgccttgtggtcacagcttttgcatgcaatgcttaaaacatgccgcctctaagtgtggaaagcggtgcccaaaatgccgtcagttaatcagtaattcaagatcttgcactatcaacacagtactttggaacaccatccaactcctatttcctagcgaagttgaggcgaggaagagctccatggcctcatcctcagcaagcaaggacgatgtgaagcaaagcctgccaagaagcaacaactatacacaagttggcattaggaacaccagtggcagtagcagcttcaccacacaggactacactagaataggcaacagcaccaggagctccttagcagcagacggcagaagaagtatgccggtcccaggaaccatgaacaccagcagtgggagctttgacacacagggtaggagcacaagaagcagagacagtggcagaggctttgtccgggcgtcagagttggttggcaccaggagttcagcgcggtcaggccaatctgacgacgcttcacttgcatacaggttgcagcaggaggagttcatgacggctttcgataatgatgggggagagaggcagccacagaacaccatatctactgcccgagcaaatttgagagctatggcttcccgggccgagagggcagttctccttcgtgctcgtggctggcctctttagttttgactgattttcagtttcccagtacctgaatctttctctggaagaatgtagcataagtaccatggtgtgatcaatcacttgtattgtgtgaaagtaaaacgatgacaagccagccatatgtgtttcctgtaatacacacaaatttagattgctttactagataatggtcgtatagccctgcattttctctagctggattaaggaatttctcgatccggtagttagatcaaagaactcttttacatttttggaattataaaggaagctatttttttgg

SEQ ID NO: 12763 - protein, 395 aa, Triticum aestivum
  misc_feature (1)..(395): Ceres Seq. ID no. 14303532
MAAESPRSAPRRTPAAKSGAGLLSPRFRSAAELAGWDEESILLAALVVEDTPVRESRRKRRPSGSSTAGGSAGSNTRKRRSRRQSADEAPIPPVALVLDDDEKPNDNEVAKKEVKQAEEEKEKVSVVEGKEKSGSTKEGEAAATGELPCMDRLREELSCAICLDVCFQPSTTPCGHSFCMQCLKHAASKCGKRCPKCRQLISNSRSCTINTVLWNTIQLLFPSEVEARKSSMASSSASKDDVKQSLPRSNNYTQVGIRNTSGSSSFTTQDYTRIGNSTRSSLAADGRRSMPVPGTMNTSSGSFDTQGRSTRSRDSGRGFVRASELVGTRSSARSGQSDDASLAYRLQQEEFMTAFDNDGGERQPQNTISTARANLRAMASRAERAVLLRARGWPL

SEQ ID NO: 12764 - protein, 246 aa, Triticum aestivum
  misc_feature (1)..(246): Ceres Seq. ID no. 14303533
MDRLREELSCAICLDVCFQPSTTPCGHSFCMQCLKHAASKCGKRCPKCRQLISNSRSCTINTVLWNTIQLLFPSEVEARKSSMASSSASKDDVKQSLPRSNNYTQVGIRNTSGSSSFTTQDYTRIGNSTRSSLAADGRRSMPVPGTMNTSSGSFDTQGRSTRSRDSGRGFVRASELVGTRSSARSGQSDDASLAYRLQQEEFMTAFDNDGGERQPQNTISTARANLRAMASRAERAVLLRARGWPL

SEQ ID NO: 12765 - protein, 216 aa, Triticum aestivum
  misc_feature (1)..(216): Ceres Seq. ID no. 14303534
MQCLKHAASKCGKRCPKCRQLISNSRSCTINTVLWNTIQLLFPSEVEARKSSMASSSASKDDVKQSLPRSNNYTQVGIRNTSGSSSFTTQDYTRIGNSTRSSLAADGRRSMPVPGTMNTSSGSFDTQGRSTRSRDSGRGFVRASELVGTRSSARSGQSDDASLAYRLQQEEFMTAFDNDGGERQPQNTISTARANLRAMASRAERAVLLRARGWPL

SEQ ID NO: 12766 - DNA, 1734 bp, Triticum aestivum
  misc_feature (1)..(1734): Ceres Seq. ID no. 14303539
acggtttccaccagatgtgtactcgtgcggtgtgtgcccgcgcacttctggcagcactgcgcacagcgcacgtagagcgtcgttcatcggcacatcaacttttcatggctctgtatgtctccggaatctaccatggcacactgtcacagaagatcaacatcctctgattgcccgatccagcgtgccagcaaaagagcaaagcgtcatcctaggtacaggcgtacagccattagccagacaccactccttgcttccagttccaccccgcgctcgtagaagcacctcccaacggagaccgatggccgctgctaagccagcctgctccgctcccgccaattccgccgacgcagccaaaccggcggcggcgccagaacccgagcagcagctgctggaggtggcggaggaggaggtggtcgtctacttcaagcccaacgccaagtgccgcgtcgacctccgcctccgctcgctgcacccgacgctccccgtcgccttcaaggtgcagacctcctccccgctcaagttcctcgtcagcccgccgcgcggcgccctgcagccgctctccacggccaccatccgcgtcgtgctccgcccgcagccgcacgcgccgccgtccttcccgcgctcccgcgccgaccgcttcctcgtcctctcctccctctccgccgcgcacctcgactccgcggcctccgtgcccggcggcgccggcgtcggcatcggcgccatccgcctccgcgtgttcttcggcgggccctacctgctccgcctcgccgcggacgccggggactccgcggccgtgcgcctcatcctgcgccggcagccgcacctcctgccggttctcgaccccgaggcggccgtgccggacgccgagccgtgggcgccgctgcacgcggctgccgcgcggggcgactgcggagaggtgaggaggctggggcaggaggcgctcgcggcgcgcgacaaggacggcaggacggctctgcacgttgcggccgccgccggggaagcagaggccgtggcagagctggtggacatgggcgccgactccgccgcggccgacgcgcgcgggcggactccgctggacgtggcacgagagaagggctacaaggaggtggtggacgtgctgcagcggtgggagcaggtgatgacggcggcgaggcggggcgacctccggagcctggagttcctcctcagcaagcgcacgggcctccgcggccgcgaccagtacgggctgacggcgctccacgtggccgccatcaagggccactgcgacgccatcgccctgctggcggggtcggggtgcatggacgtggagtgcgaggacgtggaagggcaccggccgctgcacctcgccgtcgagggcggctgcgccgacgccgtcgacctgctgctcgacatgggcgccgacgcccacgccaggaccaagcggggcgccacgccgctccagatggccgacaccatgggctatgacgacatctcgaagctgctgcgcgcccggggcgccgacgaggcggcggcggcggcggcggcaggtgacgcgcagctgtgcatcgcgtcgtcgtcttcctcgtcgatatcctgtgcataaggcctggtttgcgtctcccattcagagttgatcgcaaagacaatgttaatactgcactgtataggtgacagaagtgattactgttttttttctgtggctgttgatatggacttaacaataagatgggactttgcgttcccctgagcagttct

SEQ ID NO: 12767 - protein, 526 aa, Triticum aestivum
  misc_feature (1)..(526): Ceres Seq. ID no. 14303540
RFPPDVYSCGVCPRTSGSTAHSARRASFIGTSTFHGSVCLRNLPWHTVTEDQHPLIARSSVPAKEQSVILGTGVQPLARHHSLLPVPPRARRSTSQRRPMAAAKPACSAPANSADAAKPAAAPEPEQQLLEVAEEEVVVYFKPNAKCRVDLRLRSLHPTLPVAFKVQTSSPLKFLVSPPRGALQPLSTATIRVVLRPQPHAPPSFPRSRADRFLVLSSLSAAHLDSAASVPGGAGVGIGAIRLRVFFGGPYLLRLAADAGDSAAVRLILRRQPHLLPVLDPEAAVPDAEPWAPLHAAAARGDCGEVRRLGQEALAARDKDGRTALHVAAAAGEAEAVAELVDMGADSAAADARGRTPLDVAREKGYKEVVDVLQRWEQVMTAARRGDLRSLEFLLSKRTGLRGRDQYGLTALHVAAIKGHCDAIALLAGSGCMDVECEDVEGHRPLHLAVEGGCADAVDLLLDMGADAHARTKRGATPLQMADTMGYDDISKLLRARGADEAAAAAAAGDAQLCIASSSSSSISCA

SEQ ID NO: 12768 - protein, 427 aa, Triticum aestivum
  misc_feature (1)..(427): Ceres Seq. ID no. 14303541
MAAAKPACSAPANSADAAKPAAAPEPEQQLLEVAEEEVVVYFKPNAKCRVDLRLRSLHPTLPVAFKVQTSSPLKFLVSPPRGALQPLSTATIRVVLRPQPHAPPSFPRSRADRFLVLSSLSAAHLDSAASVPGGAGVGIGAIRLRVFFGGPYLLRLAADAGDSAAVRLILRRQPHLLPVLDPEAAVPDAEPWAPLHAAAARGDCGEVRRLGQEALAARDKDGRTALHVAAAAGEAEAVAELVDMGADSAAADARGRTPLDVAREKGYKEVVDVLQRWEQVMTAARRGDLRSLEFLLSKRTGLRGRDQYGLTALHVAAIKGHCDAIALLAGSGCMDVECEDVEGHRPLHLAVEGGCADAVDLLLDMGADAHARTKRGATPLQMADTMGYDDISKLLRARGADEAAAAAAAGDAQLCIASSSSSSISCA

SEQ ID NO: 12769 - DNA, 1720 bp, Triticum aestivum
  misc_feature (1)..(1720): Ceres Seq. ID no. 14303546
acttgctatccagctcctgctaccctaacaatggcagtggctggtgccccacctgttctccagctcctgccccaacaatggcagctgattctagccatcctcctcgtcccactcggcttcctcctccttcggggaaggtcgggctccggcctgaagctcccaccgggccccatgaggctgcctttcgtgggcaacctgcaccagatcgggccactgccgcaccggagcctggctgcgctggcccggcggcatgggcctgtgatgatgctgcggctgggcatggtgccgacggtggtgctgacatcgccagaggcggcccgggaagccctcaagaccaaggatgatgactgcagcagccgtcccctgtcggcagggccagggctgctgtcttacggctacaaggacgtggccttctcgccgtggagcgactacgtccgcgagatgcgcaagttgttcatcatcgagctgctcagcaggcggcgcgtgcagtctgcctactacgcgagggatgcacagatcgacaagctgattgagaccctcaccgtggtggggccgaacccggtacccctggaggcccacatcttcgccaccatggaccggattgtgggcttgttcgcgttcggcgagagctacgcgggggagcagttcaaggggcagtttgtgcccttactcaacgcaaccatggacatgttgggtagcttctctgcccaagacttcttccccaacgccgttggccgcctcatcgaccgcatcaccggcgtcaaagcccaccgccagagggtctttcgtcagctcgaccgcttctttgagcatatcatcgagcagtgcgatgggagaaaggccaccggcggcggcggatcggacctggtgcaggagctgctggacatcatgaaaaggcccgccgcctccgctgcaggaaccttcaccagagatcatgtcaaggccattctcatgaacacattcattggtagcattgacaccaccacagtgaccataacctgggcaatggcagagctgatccggaaaccaagggttctgcaaagggcacaacttgagattaggactgccgctggaggaggcagcagagtgcaccaagctgacatgcccaaaatgagctacctgaggatggtgctgtccgagaccctacggctgcatcccccagcaacactactcgtaccgagagagacgctgcggccgatccaggtggctggctacgacatcccagccaagacccaggtcattgtcaatgcgtgggccatcagcagggacccttccgcgtggaaggaccccgaggagtttaacccggagcggttccaggacactgacgtggacttcaacggcagccacttcgagttcatccccttcggcgcgggccgccggatctgccccgggctggccatgggggtggcaaacgccgagtacatccttgccaacttgctctactgcttcaactgggcgctgcccaacggggtgagccgggagggtgtgaacatggaggaggaaggggtgctcacttaccggaagaagacctcactcatgctcgtgccaacaccttaccacccagcccaggagaaagaggaggagtattagtactcacttatttttctatatattctgttcctcgtgcattatcatttgttgttgttgttgttgttgttgttgttgtttattttaataaatcaatatgaataaaattctcaaattccgttccccgtacatc

SEQ ID NO: 12770 - protein, 529 aa, Triticum aestivum
  misc_feature (1)..(529): Ceres Seq. ID no. 14303547
TCYPAPATLTMAVAGAPPVLQLLPQQWQLILAILLVPLGFLLLRGRSGSGLKLPPGPMRLPFVGNLHQIGPLPHRSLAALARRHGPVMMLRLGMVPTVVLTSPEAAREALKTKDDDCSSRPLSAGPGLLSYGYKDVAFSPWSDYVREMRKLFIIELLSRRRVQSAYYARDAQIDKLIETLTVVGPNPVPLEAHIFATMDRIVGLFAFGESYAGEQFKGQFVPLLNATMDMLGSFSAQDFFPNAVGRLIDRITGVKAHRQRVFRQLDRFFEHIIEQCDGRKATGGGGSDLVQELLDIMKRPAASAAGTFTRDHVKAILMNTFIGSIDTTTVTITWAMAELIRKPRVLQRAQLEIRTAAGGGSRVHQADMPKMSYLRMVLSETLRLHPPATLLVPRETLRPIQVAGYDIPAKTQVIVNAWAISRDPSAWKDPEEFNPERFQDTDVDFNGSHFEFIPFGAGRRICPGLAMGVANAEYILANLLYCFNWALPNGVSREGVNMEEEGVLTYRKKTSLMLVPTPYHPAQEKEEEY

SEQ ID NO: 12771 - protein, 519 aa, Triticum aestivum
  misc_feature (1)..(519): Ceres Seq. ID no. 14303548
MAVAGAPPVLQLLPQQWQLILAILLVPLGFLLLRGRSGSGLKLPPGPMRLPFVGNLHQIGPLPHRSLAALARRHGPVMMLRLGMVPTVVLTSPEAAREALKTKDDDCSSRPLSAGPGLLSYGYKDVAFSPWSDYVREMRKLFIIELLSRRRVQSAYYARDAQIDKLIETLTVVGPNPVPLEAHIFATMDRIVGLFAFGESYAGEQFKGQFVPLLNATMDMLGSFSAQDFFPNAVGRLIDRITGVKAHRQRVFRQLDRFFEHIIEQCDGRKATGGGGSDLVQELLDIMKRPAASAAGTFTRDHVKAILMNTFIGSIDTTTVTITWAMAELIRKPRVLQRAQLEIRTAAGGGSRVHQADMPKMSYLRMVLSETLRLHPPATLLVPRETLRPIQVAGYDIPAKTQVIVNAWAISRDPSAWKDPEEFNPERFQDTDVDFNGSHFEFIPFGAGRRICPGLAMGVANAEYILANLLYCFNWALPNGVSREGVNMEEEGVLTYRKKTSLMLVPTPYHPAQEKEEEY

SEQ ID NO: 12772 - protein, 472 aa, Triticum aestivum
  misc_feature (1)..(472): Ceres Seq. ID no. 14303549
MRLPFVGNLHQIGPLPHRSLAALARRHGPVMMLRLGMVPTVVLTSPEAAREALKTKDDDCSSRPLSAGPGLLSYGYKDVAFSPWSDYVREMRKLFIIELLSRRRVQSAYYARDAQIDKLIETLTVVGPNPVPLEAHIFATMDRIVGLFAFGESYAGEQFKGQFVPLLNATMDMLGSFSAQDFFPNAVGRLIDRITGVKAHRQRVFRQLDRFFEHIIEQCDGRKATGGGGSDLVQELLDIMKRPAASAAGTFTRDHVKAILMNTFIGSIDTTTVTITWAMAELIRKPRVLQRAQLEIRTAAGGGSRVHQADMPKMSYLRMVLSETLRLHPPATLLVPRETLRPIQVAGYDIPAKTQVIVNAWAISRDPSAWKDPEEFNPERFQDTDVDFNGSHFEFIPFGAGRRICPGLAMGVANAEYILANLLYCFNWALPNGVSREGVNMEEEGVLTYRKKTSLMLVPTPYHPAQEKEEEY

SEQ ID NO: 12773 - DNA, 1684 bp, Triticum aestivum
  misc_feature (1)..(1684): Ceres Seq. ID no. 14303557
caccctcccccgctcctcctcctcgggctccgccgcccccgcctccgcctccccgaatcccagccctagcggccggcgagcgcggcgatgggcgccgtcgcctccacggtggcggcgcgcttcgccttcttcccgccctccccgccgtcgtacggcgtcgagcccccgccctcgccggccgcggccgccgcggacggcgcggtggtggagctcagcggggtgccccggcggggcggcgtggaggcgcggcggctgccgaccaagcgcggctcggaggtggtggccatgtacgtgcgccagcccggggcgcgcctcacgctgctctactcccacggcaacgcggccgacctgggccagatgtacgagctcttcgtcgagctcagctcgcacctcaacgtcaacctcatgggttatgattattctggatatgggcaatcatctgggaagccaagtgagcagaacacttatgcagacatagaggccgcttataggtgtctcatagaaacttatggggcctccgaggaaaacatcattctgtatggtcaatcagttggcagtggccctactttagatttggcatctcgtttgcctcatttgagagcagtggttctacatagcccaatttcgtctggcttgagagtaatgtatcctgtgaaacatacatactggtttgacatatataagaacattgacaaagttgcattggtcaaatgccccgtgttagtaatccatggtacggctgatgatgttgttgactgttctcatgggagagcactgtgggaactatccaaagtgaagtatgagcctttgtgggtcaaaggtgggaaccattgtaatttggaactctatcccgaatacattaagcacctaaagaagttcatcacagccatagagaagtccccaccactgaaagatgattctccagaaagttcaggcccttcagatcttgaaacaggatctgaaagtatggagagttcaagaaaaagcacggatgtgagggacaaatcaaggtcaagcactgatcacaggcggagtacagatcgacgggagaaaccaaggagcagcatagataggaaggataaaggcagaaagagtgtagatcatcctgacaaaccacgggctagtgtggatcaatctgataagccacggaaaagcattgaccgctttggagggatgatgaggtcggttaaattgtgcaatattgactgcttcaaagtaacttccacttccgggagctgaaaatagtggaaggttagttttgatagtatctgtatttatttcatctgtataatctattcaattgggtgtttttagttttgctgtggaaggtgtattgatttgggtgagggttatgcacactgaattgtttcgtgagaagaaatgatcattcattcccgaccccctgagttttcaaagccattcatttggcacatcaacaatgctactcccacggagtatgaagcaacaccattgttacactgtacataagttgttgtatcattacactgtcttagtttttctttttcatagaaacatttgatagataactaaactgggaatttgtgtcttccctctggaaagaagttctcttcaaaaatggatttctgtcacttgattgctttgtcatggagcttgaacttgaaatgaatcactggatcattcaatgtaatcatcatctttgttc

SEQ ID NO: 12774 - protein, 383 aa, Triticum aestivum
  misc_feature (1)..(383): Ceres Seq. ID no. 14303558
MGAVASTVAARFAFFPPSPPSYGVEPPPSPAAAAADGAVVELSGVPRRGGVEARRLPTKRGSEVVAMYVRQPGARLTLLYSHGNAADLGQMYELFVELSSHLNVNLMGYDYSGYGQSSGKPSEQNTYADIEAAYRCLIETYGASEENIILYGQSVGSGPTLDLASRLPHLRAVVLHSPISSGLRVMYPVKHTYWFDIYKNIDKVALVKCPVLVIHGTADDVVDCSHGRALWELSKVKYEPLWVKGGNHCNLELYPEYIKHLKKFITAIEKSPPLKDDSPESSGPSDLETGSESMESSRKSTDVRDKSRSSTDHRRSTDRREKPRSSIDRKDKGRKSVDHPDKPRASVDQSDKPRKSIDRFGGMMRSVKLCNIDCFKVTSTSGS

SEQ ID NO: 12775 - protein, 317 aa, Triticum aestivum
  misc_feature (1)..(317): Ceres Seq. ID no. 14303559
MYVRQPGARLTLLYSHGNAADLGQMYELFVELSSHLNVNLMGYDYSGYGQSSGKPSEQNTYADIEAAYRCLIETYGASEENIILYGQSVGSGPTLDLASRLPHLRAVVLHSPISSGLRVMYPVKHTYWFDIYKNIDKVALVKCPVLVIHGTADDVVDCSHGRALWELSKVKYEPLWVKGGNHCNLELYPEYIKHLKKFITAIEKSPPLKDDSPESSGPSDLETGSESMESSRKSTDVRDKSRSSTDHRRSTDRREKPRSSIDRKDKGRKSVDHPDKPRASVDQSDKPRKSIDRFGGMMRSVKLCNIDCFKVTSTSGS

SEQ ID NO: 12776 - protein, 293 aa, Triticum aestivum
  misc_feature (1)..(293): Ceres Seq. ID no. 14303560
MYELFVELSSHLNVNLMGYDYSGYGQSSGKPSEQNTYADIEAAYRCLIETYGASEENIILYGQSVGSGPTLDLASRLPHLRAVVLHSPISSGLRVMYPVKHTYWFDIYKNIDKVALVKCPVLVIHGTADDVVDCSHGRALWELSKVKYEPLWVKGGNHCNLELYPEYIKHLKKFITAIEKSPPLKDDSPESSGPSDLETGSESMESSRKSTDVRDKSRSSTDHRRSTDRREKPRSSIDRKDKGRKSVDHPDKPRASVDQSDKPRKSIDRFGGMMRSVKLCNIDCFKVTSTSGS

SEQ ID NO: 12777 - DNA, 1353 bp, Triticum aestivum
  misc_feature (1)..(1353): Ceres Seq. ID no. 14303564
attaccagttgccgaagagtgagagtgagtaccgagcagttggtgcgctgctctgtcctgacattgcacgcgcttgccaccgagctctgcattgcgtctactagcagctatcctcgatggggctgccgggatgcatcgccgtcattgtgctccttctgatttcatggagagagggggaggcggcgatgttcacgttcgtcaaccggtgcgccgacacggtgtggccgggcgtcctgtccaacgctggcacggctcggctcggcaccacggggttcgagctcccgccgggcgcgtcgcgcgctgtgccggcgccctcggcctggtccggccgcctctgggcccgcaccggatgcgcgcaggacggcgccacggggcggctcgtctgcgccaccggcgactgcggctccggcacggccgagtgcgccggggccggcgcggcgcccccagcgacgctggccgagttcacgctcgacggcacgggcgggctggacttctacgacgtcagcctggtggacgggtacaacctgccggtgctggtggagccgtcctccggggagcgccccggcggcgcgtcgaccgctgggtcctgcgcttcggcggggtgcgcggcggacctgaacgcgatgtgccccgccgagctccggtccggcggcggcgcggcctgccggagcgcgtgcgacgcgttcgggcggcccgagtactgctgcagcggcgcctacgccaaccccgggacgtgccggccgacgtcctactcgcaggtgttcaagatggcctgcccgcgctcctacagctacgccttcgacgaccccacctccaccttcacctgcgccggcggccccgactacaccgtcaccttctgccccggcgccaccccgagccagaagtcgaccacggtgccggcggccacaacgccgacgcaaacgacccccacgccgacgacggtgcctgtgacggatacgccggcgatgatgccggggatgacgttcacggacgccaaccaggacagcatgccgatgccgatgggcggcgaggccgggactggtggtggcggcagcatccaggggcagggcgtgatcctcgggggcaccagcagcgacgcctggctcgccaacatggccaccggcgacgcgacgggcgcggcagcggcagcggcagcctccgggcggctagtcgccgcgccattggtactgctcgcgctccatctgctgcgatagatggaggtcggcggagcactgattgatcggtgcaatgtgtacgggtgaaaagagagattggttgtagggttagattcggagaaaaccattgtaacattccgtgttgatgggattttgttgtacgtagattgttggttag

SEQ ID NO: 12778 - protein, 369 aa, Triticum aestivum
  misc_feature (1)..(369): Ceres Seq. ID no. 14303565
MHRRHCAPSDFMERGGGGDVHVRQPVRRHGVAGRPVQRWHGSARHHGVRAPAGRVARCAGALGLVRPPLGPHRMRAGRRHGAARLRHRRLRLRHGRVRRGRRGAPSDAGRVHARRHGRAGLLRRQPGGRVQPAGAGGAVLRGAPRRRVDRWVLRFGGVRGGPERDVPRRAPVRRRRGLPERVRRVRAARVLLQRRLRQPRDVPADVLLAGVQDGLPALLQLRLRRPHLHLHLRRRPRLHRHLLPRRHPEPEVDHGAGGHNADANDPHADDGACDGYAGDDAGDDVHGRQPGQHADADGRRGRDWWWRQHPGAGRDPRGHQQRRLARQHGHRRRDGRGSGSGSLRAASRRAIGTARAPSAAIDGGRRSTD

SEQ ID NO: 12779 - protein, 365 aa, Triticum aestivum
  misc_feature (1)..(365): Ceres Seq. ID no. 14303566
MGLPGCIAVIVLLLISWREGEAAMFTFVNRCADTVWPGVLSNAGTARLGTTGFELPPGASRAVPAPSAWSGRLWARTGCAQDGATGRLVCATGDCGSGTAECAGAGAAPPATLAEFTLDGTGGLDFYDVSLVDGYNLPVLVEPSSGERPGGASTAGSCASAGCAADLNAMCPAELRSGGGAACRSACDAFGRPEYCCSGAYANPGTCRPTSYSQVFKMACPRSYSYAFDDPTSTFTCAGGPDYTVTFCPGATPSQKSTTVPAATTPTQTTPTPTTVPVTDTPAMMPGMTFTDANQDSMPMPMGGEAGTGGGGSIQGQGVILGGTSSDAWLANMATGDATGAAAAAAASGRLVAAPLVLLALHLLR

SEQ ID NO: 12780 - protein, 358 aa, Triticum aestivum
  misc_feature (1)..(358): Ceres Seq. ID no. 14303567
MERGGGGDVHVRQPVRRHGVAGRPVQRWHGSARHHGVRAPAGRVARCAGALGLVRPPLGPHRMRAGRRHGAARLRHRRLRLRHGRVRRGRRGAPSDAGRVHARRHGRAGLLRRQPGGRVQPAGAGGAVLRGAPRRRVDRWVLRFGGVRGGPERDVPRRAPVRRRRGLPERVRRVRAARVLLQRRLRQPRDVPADVLLAGVQDGLPALLQLRLRRPHLHLHLRRRPRLHRHLLPRRHPEPEVDHGAGGHNADANDPHADDGACDGYAGDDAGDDVHGRQPGQHADADGRRGRDWWWRQHPGAGRDPRGHQQRRLARQHGHRRRDGRGSGSGSLRAASRRAIGTARAPSAAIDGGRRSTD

SEQ ID NO: 12781 - DNA, 1786 bp, Triticum aestivum
  misc_feature (1)..(1786): Ceres Seq. ID no. 14303568
acccgacagtgaacagacagcgcacggcaacgacgcaccatcagtcacgcaccctccacccaagtcgccgactcccgccgtcgcgatcgcggcggccgccggcaatgtcttggctcgcgcgctccatcgccaactccctcctatcccccgacagccccgaggccgacggcgaagacccccgcgcctccgactccacctccccgggctcaccccctcgcggcgtccgcgaggatctctcggagctcactgacgccctcgcccaccggttccagggccttgcctccttcctcgcggcgcccactcccgcaggaagcggcggcgcaccccgcgggctgaacccgtccgagattgcggggcgcttccgcctggggctcgcgcggctcccgggccgccaggccgtggcagatctcgccaagaacgcgtcctctctactgcacccggacgaatactggggcgggtcggaggccgccggggctaccgaggacgtggtcgccttcgcgcgggacgccgccatgcggcccgagctctggctggacttcccccttctccccgacgacgcggactcggacgattttgacattagtgatgcgcagcaagatcacgcgctggccgtcgagagcatggcgccggagctggcagatctgaggatcgaactctgcccaagccacatgagcgagggctgcttctggaagatatactttgtgctactgcaccctaagctcacaaaggaggaagccgagcttctttctactcctcagattttggaagctagagggaagttgtcacaaaattcgcaacatcggacaaagctagagagcaacgaagacacagtggctctgactttcagtaatggagatggtactgtacctatacctgtagaggtggtcagcgtagtaaaagatcaagatgcttccggcaggcccacagctttgggcaatgtagattatggtatacttgaatcgattcctctggaagagctagcaaaagatacagtcagtgatgctggagctgttccttcagataaaatcagcagtggcgtgcctgtacagctattgccggtattaagagatgccactgagttctcagtctcacaatcaaggatgggagaaaccattcacactccctctaaagaacatcccactgggttctcacaatctagcattgaagaaagaacacccgactcaattacagatgatgttgtagcaaatgagcagtgtgtaccatttgtagacagtgctccatcggaagaagatcaacataaatggtcattgagtgacctcagcgagcaatcaagagttgtcactcaaaagtcccataacgatggcactgatgatgatggggatgaatggctggaagaggacacggctggtccaggaagcacgcacattccaatagtaggcgacgatgaggatatatctttcagtgatctggaggaagatgactgatgtagcatgatatcaatggcgagcttggtcatcaccgtcttggtgcttctggttcgaagcgatatgtatatgtgggtttgggttctgtccactgtatggtctcatggatctgctatgatcaatgcccactgcagcaggattgttcaccttctgctcatatctctgtgccgccaagatcagttttgcggtctagttctcccttgtggcaactatgcctgttgtacagtgtgtagagagcacatacttgtgcatgtggttgtttggatcaacactttgattcttggatcaagcgtgtgtcctgacaatgatgatgggaactcgagtattcttatgtttcggtg

SEQ ID NO: 12782 - protein, 480 aa, Triticum aestivum
  misc_feature (1)..(480): Ceres Seq. ID no. 14303569
PTVNRQRTATTHHQSRTLHPSRRLPPSRSRRPPAMSWLARSIANSLLSPDSPEADGEDPRASDSTSPGSPPRGVREDLSELTDALAHRFQGLASFLAAPTPAGSGGAPRGLNPSEIAGRFRLGLARLPGRQAVADLAKNASSLLHPDEYWGGSEAAGATEDVVAFARDAAMRPELWLDFPLLPDDADSDDFDISDAQQDHALAVESMAPELADLRIELCPSHMSEGCFWKIYFVLLHPKLTKEEAELLSTPQILEARGKLSQNSQHRTKLESNEDTVALTFSNGDGTVPIPVEVVSVVKDQDASGRPTALGNVDYGILESIPLEELAKDTVSDAGAVPSDKISSGVPVQLLPVLRDATEFSVSQSRMGETIHTPSKEHPTGFSQSSIEERTPDSITDDVVANEQCVPFVDSAPSEEDQHKWSLSDLSEQSRVVTQKSHNDGTDDDGDEWLEEDTAGPGSTHIPIVGDDEDISFSDLEEDD

SEQ ID NO: 12783 - protein, 446 aa, Triticum aestivum
  misc_feature (1)..(446): Ceres Seq. ID no. 14303570
MSWLARSIANSLLSPDSPEADGEDPRASDSTSPGSPPRGVREDLSELTDALAHRFQGLASFLAAPTPAGSGGAPRGLNPSEIAGRFRLGLARLPGRQAVADLAKNASSLLHPDEYWGGSEAAGATEDVVAFARDAAMRPELWLDFPLLPDDADSDDFDISDAQQDHALAVESMAPELADLRIELCPSHMSEGCFWKIYFVLLHPKLTKEEAELLSTPQILEARGKLSQNSQHRTKLESNEDTVALTFSNGDGTVPIPVEVVSVVKDQDASGRPTALGNVDYGILESIPLEELAKDTVSDAGAVPSDKISSGVPVQLLPVLRDATEFSVSQSRMGETIHTPSKEHPTGFSQSSIEERTPDSITDDVVANEQCVPFVDSAPSEEDQHKWSLSDLSEQSRVVTQKSHNDGTDDDGDEWLEEDTAGPGSTHIPIVGDDEDISFSDLEEDD

SEQ ID NO: 12784 - protein, 310 aa, Triticum aestivum
  misc_feature (1)..(310): Ceres Seq. ID no. 14303571
MRPELWLDFPLLPDDADSDDFDISDAQQDHALAVESMAPELADLRIELCPSHMSEGCFWKIYFVLLHPKLTKEEAELLSTPQILEARGKLSQNSQHRTKLESNEDTVALTFSNGDGTVPIPVEVVSVVKDQDASGRPTALGNVDYGILESIPLEELAKDTVSDAGAVPSDKISSGVPVQLLPVLRDATEFSVSQSRMGETIHTPSKEHPTGFSQSSIEERTPDSITDDVVANEQCVPFVDSAPSEEDQHKWSLSDLSEQSRVVTQKSHNDGTDDDGDEWLEEDTAGPGSTHIPIVGDDEDISFSDLEEDD

SEQ ID NO: 12785 - DNA, 1752 bp, Triticum aestivum
  misc_feature (1)..(1752): Ceres Seq. ID no. 14303572
agttgtcgttccaaaggaaaaggaaaattggcagctggttgtggtgttcgctgctcgccaccgactttcccggcgccaccgcaccgtgcaccggccccaccggcggcgacgatgggtaactcacaggcctctcccttgtccgcctcctctgccagcttcgtcatggcctccagggccttctcgaagcaggcgctggacgaactgcgcgcgcacttctcctcgctcgccgcgcagtcggggacccaggggcgcgccatatcccgccccgttttccttgattatttcggggtacgtggggcgctcggcgataggctattccagttggtggcgaaggagagcagcgtggaagatggagtcaccttcgagggtttgattatcaccaaagcaacatatgaaaggggaactaaagatgaagccgatgagttcatttttcaactgtgcgatgtgatgggagatagtatcttaacaaggtctgatctggaagctgtatttgtgtccattcatgaaaccatatttgcagataataatgaagccaaggaaggttctaacaagagtacatttgaagcatttctcaactctgcggtattttcgaaggatgctgaaggggtctctgagaagtctatgtcattatcagactttagaaactggtgtattgtcatgccaaaactgaggaaattccttggaagtttgttgatgccccctgactcaggcagagccggcttccagatacctctacttcattatccagaaaacatctcctccgagttgctactcttaaataaagagtatgcttggcatataggaggtggcttctctcaacatgatgtgcaagagtggaagcttctatatcacagttctcttcatggacaaagcttcaacactttcttaggcaatgtgacgaatggagatgtacagactgttttggttattaaagatgcagaaggttccatttatggtgcatatgcatcacaaccatgggaaaggcacagtgatttttatggtgacatgaagacattccttttcaagttatatcccgaagcgtccatattttgccctacaggagcaaacaaaagtttgcaatggtgtgctgtaaacttcacctctgagaacattccaaatggcatcggctttggaggcaagccacatcactttggcctcttcctctctgcgggtttcgatcaagggcactcatttacctccagcacattcaccaatcctcccctttccaacacgagcaggttcagaccagaagttattgaatgttgggggatacaagtgaagggatcaaatgatgaaaagccggagcttgtcaaggggacggtccttgagagattcaaggaggatcggaacatgctgaagctgattggtatggcgagtgcgagtgactgagcactgaaaaaaatcacaatagcagatatttggaggttgtgtacagcactctttttatgggaaataataccttacttgtatctggttgctactcttgagttttatttagctcttggagcttttttgtttcacatccagagtgatacaaggttagctgcatggagttgttggtttatactgtatggatccaggacgtcattttctgcccagttcgagagcagggagtaactgtctgttcatttgtcaagatggatcttcgaaagctggctgctgattaaaggatgtatgaaatgtgttctaaaactaaatcagtgtagcatgtattggggtggataaagtaatgagtggatacagttcagttcg

SEQ ID NO: 12786 - protein, 462 aa, Triticum aestivum
  misc_feature (1)..(462): Ceres Seq. ID no. 14303573
SCRSKGKGKLAAGCGVRCSPPTFPAPPHRAPAPPAATMGNSQASPLSASSASFVMASRAFSKQALDELRAHFSSLAAQSGTQGRAISRPVFLDYFGVRGALGDRLFQLVAKESSVEDGVTFEGLIITKATYERGTKDEADEFIFQLCDVMGDSILTRSDLEAVFVSIHETIFADNNEAKEGSNKSTFEAFLNSAVFSKDAEGVSEKSMSLSDFRNWCIVMPKLRKFLGSLLMPPDSGRAGFQIPLLHYPENISSELLLLNKEYAWHIGGGFSQHDVQEWKLLYHSSLHGQSFNTFLGNVTNGDVQTVLVIKDAEGSIYGAYASQPWERHSDFYGDMKTFLFKLYPEASIFCPTGANKSLQWCAVNFTSENIPNGIGFGGKPHHFGLFLSAGFDQGHSFTSSTFTNPPLSNTSRFRPEVIECWGIQVKGSNDEKPELVKGTVLERFKEDRNMLKLIGMASASD

SEQ ID NO: 12787 - protein, 425 aa, Triticum aestivum
  misc_feature (1)..(425): Ceres Seq. ID no. 14303574
MGNSQASPLSASSASFVMASRAFSKQALDELRAHFSSLAAQSGTQGRAISRPVFLDYFGVRGALGDRLFQLVAKESSVEDGVTFEGLIITKATYERGTKDEADEFIFQLCDVMGDSILTRSDLEAVFVSIHETIFADNNEAKEGSNKSTFEAFLNSAVFSKDAEGVSEKSMSLSDFRNWCIVMPKLRKFLGSLLMPPDSGRAGFQIPLLHYPENISSELLLLNKEYAWHIGGGFSQHDVQEWKLLYHSSLHGQSFNTFLGNVTNGDVQTVLVIKDAEGSIYGAYASQPWERHSDFYGDMKTFLFKLYPEASIFCPTGANKSLQWCAVNFTSENIPNGIGFGGKPHHFGLFLSAGFDQGHSFTSSTFTNPPLSNTSRFRPEVIECWGIQVKGSNDEKPELVKGTVLERFKEDRNMLKLIGMASASD

SEQ ID NO: 12788 - protein, 408 aa, Triticum aestivum
  misc_feature (1)..(408): Ceres Seq. ID no. 14303575
MASRAFSKQALDELRAHFSSLAAQSGTQGRAISRPVFLDYFGVRGALGDRLFQLVAKESSVEDGVTFEGLIITKATYERGTKDEADEFIFQLCDVMGDSILTRSDLEAVFVSIHETIFADNNEAKEGSNKSTFEAFLNSAVFSKDAEGVSEKSMSLSDFRNWCIVMPKLRKFLGSLLMPPDSGRAGFQIPLLHYPENISSELLLLNKEYAWHIGGGFSQHDVQEWKLLYHSSLHGQSFNTFLGNVTNGDVQTVLVIKDAEGSIYGAYASQPWERHSDFYGDMKTFLFKLYPEASIFCPTGANKSLQWCAVNFTSENIPNGIGFGGKPHHFGLFLSAGFDQGHSFTSSTFTNPPLSNTSRFRPEVIECWGIQVKGSNDEKPELVKGTVLERFKEDRNMLKLIGMASASD

SEQ ID NO: 12789 - DNA, 1860 bp, Triticum aestivum
  misc_feature (1)..(1860): Ceres Seq. ID no. 14303588
aacccagcccagccattgtaggcttcctgatcagttgtgtggaccacatggctcttgaagcagcgaaccactacctgcagctcgccggcctccatggcgcatccacgccggcagtactgctcaccgtcctcctgctactcatcattcgactagcatgggtgaggaccacaaccgcgtcaacaagattcggcaagcagcaacagctcccgccttcacctccaggcaagctgcccatcatcggccacctccacctcctcggctcccagacacacatatccatccgggacctcgatgccaagcatggccgcaatggcctcttgctcctccgcatcggtgccgtacccaccttgttcgtgtcctcgccgagcgccgccgaggccgtcctgcgcacccacgaccaaatctttgcgtcgcggccgccatccatggccgccaacatcattcgctatgggccaacagacatcgcgtttgcaccctatggcgagtactggcggcaggccaggaagctcttaaccacacatatgctcagcgccaaggtggtgcactccttccgccatggtcgtcaagaagaggtgcgcctcattatcaacaagatccgtgcggcggccaccagaggcacggcggtggacatgagcgagctcctgtccggctacaccaatgacgtcgtatgccgtgcggtcctaggagaatcccaccgcaaggaaggccggaacaggcttttcagcgagctcacagagatcaatgtctcccttcttggtgggttcagcctcgagaattacatccccccaaatatggtaatggcggatgcgctcttgaggctggtttccgtcaaggctcagcgactcaacaagaggtgggacgacttgttcaacgagatcatcgaggaacacctacaccccagcaaaccatcatctggcgagcagcaagcagcagatttcatagatcttctgctctctctcaaggaagagtacggtctcactactgataacatcaaggccattttggtggacatgtttgaggcaggcatagaaacatcttatctgacgttggaatacggcatggctgagctcatgaacaacagacacattctgacaaaattacaggaggaggtaagatcccaaggcaaaaagttagacatgataacggaggaggaccttagcagcatggcctacctaagggcaaccatcaaggagacgctgcgcatgcacccaccagcacccttcctcctcccacacttctccaccgctgactgcaagatcgacggatacttgatacccgccaacacacgtgtccttgtgaatgcttgggccctagggagggatccatcgtcttgggagaggccagaggatttctggcctgagaggtttctgcaggatcaagatggtgatgtggacacccaaatgaggggtaaggatcttaggttcctgccatttgggttcgggcggaggatttgtccagggatgaattttgggttcgccaccatggaggttatgttagcaaatctcatgtaccattttgattgggatgttccaaatatggtgggtaccggcgcaggggttgatatggctgagtcgttcgggttaacgcttcgccgaaaggagaagcttcaacttgttcctcagattccctaaacctactatgtgtaagtttatttcgaatgagcacaagaataaaggcaaggaataaaatgactaataatgtagtactgtttatcagttattattactatgtactccctccatctcaaaataagtgtctaaactttgttctagctctagatggatgagaagttaatttattacacagatcatatatgatgtaccacaggtgcatacataaagaataaagcaatttgcatac

SEQ ID NO: 12790 - protein, 542 aa, Triticum aestivum
  misc_feature (1)..(542): Ceres Seq. ID no. 14303589
PSPAIVGFLISCVDHMALEAANHYLQLAGLHGASTPAVLLTVLLLLIIRLAWVRTTTASTRFGKQQQLPPSPPGKLPIIGHLHLLGSQTHISIRDLDAKHGRNGLLLLRIGAVPTLFVSSPSAAEAVLRTHDQIFASRPPSMAANIIRYGPTDIAFAPYGEYWRQARKLLTTHMLSAKVVHSFRHGRQEEVRLIINKIRAAATRGTAVDMSELLSGYTNDVVCRAVLGESHRKEGRNRLFSELTEINVSLLGGFSLENYIPPNMVMADALLRLVSVKAQRLNKRWDDLFNEIIEEHLHPSKPSSGEQQAADFIDLLLSLKEEYGLTTDNIKAILVDMFEAGIETSYLTLEYGMAELMNNRHILTKLQEEVRSQGKKLDMITEEDLSSMAYLRATIKETLRMHPPAPFLLPHFSTADCKIDGYLIPANTRVLVNAWALGRDPSSWERPEDFWPERFLQDQDGDVDTQMRGKDLRFLPFGFGRRICPGMNFGFATMEVMLANLMYHFDWDVPNMVGTGAGVDMAESFGLTLRRKEKLQLVPQIP

SEQ ID NO: 12791 - protein, 527 aa, Triticum aestivum
  misc_feature (1)..(527): Ceres Seq. ID no. 14303590
MALEAANHYLQLAGLHGASTPAVLLTVLLLLIIRLAWVRTTTASTRFGKQQQLPPSPPGKLPIIGHLHLLGSQTHISIRDLDAKHGRNGLLLLRIGAVPTLFVSSPSAAEAVLRTHDQIFASRPPSMAANIIRYGPTDIAFAPYGEYWRQARKLLTTHMLSAKVVHSFRHGRQEEVRLIINKIRAAATRGTAVDMSELLSGYTNDVVCRAVLGESHRKEGRNRLFSELTEINVSLLGGFSLENYIPPNMVMADALLRLVSVKAQRLNKRWDDLFNEIIEEHLHPSKPSSGEQQAADFIDLLLSLKEEYGLTTDNIKAILVDMFEAGIETSYLTLEYGMAELMNNRHILTKLQEEVRSQGKKLDMITEEDLSSMAYLRATIKETLRMHPPAPFLLPHFSTADCKIDGYLIPANTRVLVNAWALGRDPSSWERPEDFWPERFLQDQDGDVDTQMRGKDLRFLPFGFGRRICPGMNFGFATMEVMLANLMYHFDWDVPNMVGTGAGVDMAESFGLTLRRKEKLQLVPQIP

SEQ ID NO: 12792 - protein, 401 aa, Triticum aestivum
  misc_feature (1)..(401): Ceres Seq. ID no. 14303591
MAANIIRYGPTDIAFAPYGEYWRQARKLLTTHMLSAKVVHSFRHGRQEEVRLIINKIRAAATRGTAVDMSELLSGYTNDVVCRAVLGESHRKEGRNRLFSELTEINVSLLGGFSLENYIPPNMVMADALLRLVSVKAQRLNKRWDDLFNEIIEEHLHPSKPSSGEQQAADFIDLLLSLKEEYGLTTDNIKAILVDMFEAGIETSYLTLEYGMAELMNNRHILTKLQEEVRSQGKKLDMITEEDLSSMAYLRATIKETLRMHPPAPFLLPHFSTADCKIDGYLIPANTRVLVNAWALGRDPSSWERPEDFWPERFLQDQDGDVDTQMRGKDLRFLPFGFGRRICPGMNFGFATMEVMLANLMYHFDWDVPNMVGTGAGVDMAESFGLTLRRKEKLQLVPQIP

SEQ ID NO: 12793 - DNA, 1624 bp, Triticum aestivum
  misc_feature (1)..(1624): Ceres Seq. ID no. 14303592
cataagcgcccagccatcggtcagctcacaccaccctagctctccggcgaacgaccgataagtacccgtcgggatgggcgaggcaagctccgacgccgccgccaaggctgcggccgtgcgggctgtcgcagtctcccgggtcgcgccctcggtgctgggggaggtgcagcgcgttgaactttccttcttcgattcgccgtgggtcgtgctgccgccgatccagcgggtgttcctgtacgagcttggggatgccgacggcttcccgacggtggtggagcggctcaagcgcgctctcgcggacaccctggcgcactacctgcccctggcggggatgctcgagtacgcggtggagaccggggacgccttcgtggactgcactcacgccggggtcgccttcctggaggccgagggcgatatggacgtgcagcgtctagccggcgacgaggcgcacgacatcctggcattcctgagcctggtgccggagctggatgcccgggtgctcccggcgcccgtgctgtcagtgcaggccactcgtctaagcggcggcctggcggtgggcctgtccgtgcaccacgtagtcgcggacggacgcgccgtttggcgattcatggaggcctggtcttccgcttcccgcgagggctccccggtcaccaaggtcctcggcccgccgcactacggccgggaggtcatccagcaccccaacggcgacgagctcgcccgcgacatgctaaagaccgtcgcgcccaatctccctgtggtgagggggcagtacgatttcagccagcggttcctgcgggcgcgccggacattctacctcggcgccgacgacatccagtcgctcaggcggcggatcgacgacctcgcctcggacgagtctgctaccggtggcgacgcgcccaagccgaaaccggtgtcgacgttcgtggcgctggcggcactgagctggacggcgttcgttcgatccaaggggctcggcgcaggggacgacacgtacctcatgttcctcgccgacctgcgctcccgcctcgacccgccagtcagcgaggcttacctgggcaactgcgtgcgcgcgtgcctggcgagctgcgccgacgcggcggacctcctcggccagtccggcatcctccgcgcggcgcgggccgtgcaggcggcggtggccgagatggaggcggcgccgctgtccgggacggacaaggggtggatgcagatgctgatgcggctgccgtttcagcggatgaccaacgtggcggcgagccctcggttccgggcctacgaggcggccgacttcgggttcgggaagcccgcgcgcgtggagctggtgtccatgaaccacgacggcgagatggtgctagtcggcggccggcgcgacggcgaggtgcaagcctccgtgtccatcgacccggcgcacatggacgcattcaaggcctgcatcctcggctagacaaactcaaaaaattagctagtagccacgtccgtacgccgtcgaacttgcatagatccaataaatacaacaagtagcatgagtcatgcaccaattctgtttccattcctgtaatgatcgatcgtttatcgtcgtttcgactatttgggttctagttcaccggatgaattgtcacaagaaagg

SEQ ID NO: 12794 - protein, 455 aa, Triticum aestivum
  misc_feature (1)..(455): Ceres Seq. ID no. 14303593
MGEASSDAAAKAAAVRAVAVSRVAPSVLGEVQRVELSFFDSPWVVLPPIQRVFLYELGDADGFPTVVERLKRALADTLAHYLPLAGMLEYAVETGDAFVDCTHAGVAFLEAEGDMDVQRLAGDEAHDILAFLSLVPELDARVLPAPVLSVQATRLSGGLAVGLSVHHVVADGRAVWRFMEAWSSASREGSPVTKVLGPPHYGREVIQHPNGDELARDMLKTVAPNLPVVRGQYDFSQRFLRARRTFYLGADDIQSLRRRIDDLASDESATGGDAPKPKPVSTFVALAALSWTAFVRSKGLGAGDDTYLMFLADLRSRLDPPVSEAYLGNCVRACLASCADAADLLGQSGILRAARAVQAAVAEMEAAPLSGTDKGWMQMLMRLPFQRMTNVAASPRFRAYEAADFGFGKPARVELVSMNHDGEMVLVGGRRDGEVQASVSIDPAHMDAFKACILG

SEQ ID NO: 12795 - protein, 369 aa, Triticum aestivum
  misc_feature (1)..(369): Ceres Seq. ID no. 14303594
MLEYAVETGDAFVDCTHAGVAFLEAEGDMDVQRLAGDEAHDILAFLSLVPELDARVLPAPVLSVQATRLSGGLAVGLSVHHVVADGRAVWRFMEAWSSASREGSPVTKVLGPPHYGREVIQHPNGDELARDMLKTVAPNLPVVRGQYDFSQRFLRARRTFYLGADDIQSLRRRIDDLASDESATGGDAPKPKPVSTFVALAALSWTAFVRSKGLGAGDDTYLMFLADLRSRLDPPVSEAYLGNCVRACLASCADAADLLGQSGILRAARAVQAAVAEMEAAPLSGTDKGWMQMLMRLPFQRMTNVAASPRFRAYEAADFGFGKPARVELVSMNHDGEMVLVGGRRDGEVQASVSIDPAHMDAFKACILG

SEQ ID NO: 12796 - protein, 341 aa, Triticum aestivum
  misc_feature (1)..(341): Ceres Seq. ID no. 14303595
MDVQRLAGDEAHDILAFLSLVPELDARVLPAPVLSVQATRLSGGLAVGLSVHHVVADGRAVWRFMEAWSSASREGSPVTKVLGPPHYGREVIQHPNGDELARDMLKTVAPNLPVVRGQYDFSQRFLRARRTFYLGADDIQSLRRRIDDLASDESATGGDAPKPKPVSTFVALAALSWTAFVRSKGLGAGDDTYLMFLADLRSRLDPPVSEAYLGNCVRACLASCADAADLLGQSGILRAARAVQAAVAEMEAAPLSGTDKGWMQMLMRLPFQRMTNVAASPRFRAYEAADFGFGKPARVELVSMNHDGEMVLVGGRRDGEVQASVSIDPAHMDAFKACILG

SEQ ID NO: 12797 - DNA, 1501 bp, Triticum aestivum
  misc_feature (1)..(1501): Ceres Seq. ID no. 14303596
agtttgttaagttaggagcttgtgatcaaggcagcaaggcgagaagctgaagctctagctagctctggcgggcatgtttccggcggaggcgtcgttcgccggcgcggaagcggccatgctgccgcccttcttcgtgggctccatgtggcagtcggcgccaggcggcggcgcggctgccttgtccgaggaggacgaggtagccgccgctgcggctgccgaggcagcgcacgaccgcgcggtggcggcgacgcggaaccaccgcgaggccgagaagcgccgccgcgagcggatcaagtcgcacctcgaccgcctccgcgccgtcctcgcctgcgaccccaagatagacaaggcaacgctgctggccaaggcggtggagagggtgcgggagctgaagcagcgcatggacggcgtcgttggcgaggcggcggcgccggcgagccacctgttccccacggagcacgacgagatcgtggtgctcgcgtcgggaggcggcgccggcggcgcggcggccgtgtttgaggcctccgtctgctgcgacgaccgctccgacctcctcccgggcctcatcgacacgctgcgcgcgctccgcctccgcacgctccgcgccgagatggccaccctcggcggccgcgtccgcaacgtgctcgtcctcgcgcgcgacgccggaggacacgccgacgacgactactccacatcctccgaggacggcggcgccgacttcctcaaggaggccctgagggccctcgtggagaggcagggggctgccgccggcgaccggcccaagaggagacgcgtcgccgacatgaacatgcaagcggctgcttaatgaatcagctagccggccggcggccatagctcatagtatctggtcgatatgattgcatatggcgatggatctcatgcatgccatggtaatggtactactactactactatacagcgtgttaatttgctttcaaggttaattagttttgtgtgatggttaattagttccaattctccatatataccactatatggctagctaactctccttggtgatgccaatatgccatgtataattagggatatatatattactactcttttaccattagggtttgcttgagctttaatcaaatgttgcttcaaagccatggcaaacccagcccctaaaataacagttaatgtcagaatatatgcacaatgcaaagttccagacttgattgccatatgctacatatacattggataactctggaagcatttctgtttacaagatcccacaagtccatttttgatcatgtcagggcatgcagctagctagctagccttatatgcatgcatgcatgtaagacaagtcttcggatcaaacaaagatgtttgcatgcatacatgtagcaatgcatggcaagtcctaagatcaaaacaaagatggttgttccaacgcattgcatagcaatgtagcagcatgcttcctgtctgtccggtcttgtgaatgaatgaaaaaagaatgaatgtc

SEQ ID NO: 12798 - protein, 250 aa, Triticum aestivum
  misc_feature (1)..(250): Ceres Seq. ID no. 14303597
MFPAEASFAGAEAAMLPPFFVGSMWQSAPGGGAAALSEEDEVAAAAAAEAAHDRAVAATRNHREAEKRRRERIKSHLDRLRAVLACDPKIDKATLLAKAVERVRELKQRMDGVVGEAAAPASHLFPTEHDEIVVLASGGGAGGAAAVFEASVCCDDRSDLLPGLIDTLRALRLRTLRAEMATLGGRVRNVLVLARDAGGHADDDYSTSSEDGGADFLKEALRALVERQGAAAGDRPKRRRVADMNMQAAA

SEQ ID NO: 12799 - protein, 236 aa, Triticum aestivum
  misc_feature (1)..(236): Ceres Seq. ID no. 14303598
MLPPFFVGSMWQSAPGGGAAALSEEDEVAAAAAAEAAHDRAVAATRNHREAEKRRRERIKSHLDRLRAVLACDPKIDKATLLAKAVERVRELKQRMDGVVGEAAAPASHLFPTEHDEIVVLASGGGAGGAAAVFEASVCCDDRSDLLPGLIDTLRALRLRTLRAEMATLGGRVRNVLVLARDAGGHADDDYSTSSEDGGADFLKEALRALVERQGAAAGDRPKRRRVADMNMQAAA

SEQ ID NO: 12800 - protein, 227 aa, Triticum aestivum
  misc_feature (1)..(227): Ceres Seq. ID no. 14303599
MWQSAPGGGAAALSEEDEVAAAAAAEAAHDRAVAATRNHREAEKRRRERIKSHLDRLRAVLACDPKIDKATLLAKAVERVRELKQRMDGVVGEAAAPASHLFPTEHDEIVVLASGGGAGGAAAVFEASVCCDDRSDLLPGLIDTLRALRLRTLRAEMATLGGRVRNVLVLARDAGGHADDDYSTSSEDGGADFLKEALRALVERQGAAAGDRPKRRRVADMNMQAAA

SEQ ID NO: 12801 - DNA, 1360 bp, Triticum aestivum
  misc_feature (1)..(1360): Ceres Seq. ID no. 14303608
cccccgtcctctagctcaccgccgccgccgccgccgccgccgccgctttcttccgccatggccagccccgcggagagctctcgccggcgggaagaagaccgcactccatctccttccaggtcttcctcttctcgccccagcaagtgcaggacggcggccgagagactcaccgacgacctcctcgtggaggtcctctcgcgcgtcccggccaagtcgctctgccgcttcaagtgcgtctccaaccactggctcagcgtcatcgaccaccccgaccaccgcaagaagctgccccaaaccctcaccggcttcttccacggtagcagcaacctcgaggattggattctggaatcacctgtcctcttcaccagcgtgtcgccctcccctcccatggacacctcattcgccttcctgcccaaccaccagcagttcgatctgttagacagctgctacggtctcctcctctgccgcttgtacaacgtctcggctgaggttggcaagtgccattatgtggtgtgcaatcctgccacggagaagtgggtcctgttgccggactccggccaggacagtgtcaacgcatgtttgggcttcaacccagccctgtcttcgcatttccatgtgtttgagttggtggaggagcaggataactacatttccggagtggcagtgtattcgtcagaaaccggagtttgggtttacaaggaaaacagatggaacaaacgtgtcatgctcattgagcttcagccatcatttgtatttcttaacggctatctgcattttcaagtcgatggccatgacttttcccgttatctagctgtggtggacacggacggggaaacatggatgaacttcagtgtccctggtggcctgcttaacggttttattcaacattcacaaggccgcttgcattatgccaattttcagagagatgaacatggtggtgtctttcgactagtggtttatgttcttgagaactaccaaagcaaagaatggacattgaagcatagcgttgaaacttcatacatacttggaaggacagattactgcattgatgggtttgattggattgcgattcatccggaatgcaacttgatattcttcactattgggcaggaactcaaactcatgtgctataatatggatcgtcggcaactcaaagtgatctgcaatcttgaaggtgtcacgccgccatatctgtcatatgtgccattgtatgcagagttagaggcactgcacatttgacatcagcagtagttcatatttggtcgcactttatgttgtttgtacttgtttctgtatactatcagtggttctgttcagtgctacctccatgtgctcggttaactttgcaaaatgtttcagc

SEQ ID NO: 12802 - protein, 412 aa, Triticum aestivum
  misc_feature (1)..(412): Ceres Seq. ID no. 14303609
PPSSSSPPPPPPPPPLSSAMASPAESSRRREEDRTPSPSRSSSSRPSKCRTAAERLTDDLLVEVLSRVPAKSLCRFKCVSNHWLSVIDHPDHRKKLPQTLTGFFHGSSNLEDWILESPVLFTSVSPSPPMDTSFAFLPNHQQFDLLDSCYGLLLCRLYNVSAEVGKCHYVVCNPATEKWVLLPDSGQDSVNACLGFNPALSSHFHVFELVEEQDNYISGVAVYSSETGVWVYKENRWNKRVMLIELQPSFVFLNGYLHFQVDGHDFSRYLAVVDTDGETWMNFSVPGGLLNGFIQHSQGRLHYANFQRDEHGGVFRLVVYVLENYQSKEWTLKHSVETSYILGRTDYCIDGFDWIAIHPECNLIFFTIGQELKLMCYNMDRRQLKVICNLEGVTPPYLSYVPLYAELEALHI

SEQ ID NO: 12803 - protein, 393 aa, Triticum aestivum
  misc_feature (1)..(393): Ceres Seq. ID no. 14303610
MASPAESSRRREEDRTPSPSRSSSSRPSKCRTAAERLTDDLLVEVLSRVPAKSLCRFKCVSNHWLSVIDHPDHRKKLPQTLTGFFHGSSNLEDWILESPVLFTSVSPSPPMDTSFAFLPNHQQFDLLDSCYGLLLCRLYNVSAEVGKCHYVVCNPATEKWVLLPDSGQDSVNACLGFNPALSSHFHVFELVEEQDNYISGVAVYSSETGVWVYKENRWNKRVMLIELQPSFVFLNGYLHFQVDGHDFSRYLAVVDTDGETWMNFSVPGGLLNGFIQHSQGRLHYANFQRDEHGGVFRLVVYVLENYQSKEWTLKHSVETSYILGRTDYCIDGFDWIAIHPECNLIFFTIGQELKLMCYNMDRRQLKVICNLEGVTPPYLSYVPLYAELEALHI

SEQ ID NO: 12804 - protein, 283 aa, Triticum aestivum
  misc_feature (1)..(283): Ceres Seq. ID no. 14303611
MDTSFAFLPNHQQFDLLDSCYGLLLCRLYNVSAEVGKCHYVVCNPATEKWVLLPDSGQDSVNACLGFNPALSSHFHVFELVEEQDNYISGVAVYSSETGVWVYKENRWNKRVMLIELQPSFVFLNGYLHFQVDGHDFSRYLAVVDTDGETWMNFSVPGGLLNGFIQHSQGRLHYANFQRDEHGGVFRLVVYVLENYQSKEWTLKHSVETSYILGRTDYCIDGFDWIAIHPECNLIFFTIGQELKLMCYNMDRRQLKVICNLEGVTPPYLSYVPLYAELEALHI

SEQ ID NO: 12805 - DNA, 1449 bp, Triticum aestivum
  misc_feature (1)..(1449): Ceres Seq. ID no. 14303631
acgacgttcttcttccacttcccgccaaagaggagcttgcacaggtaaaacatcttgaaaaatctcaagggtgaacgaagtttcttggcgggcatgcagggcacgagagacatgtctgccaagggcggcaaggccctggtccagtcggacgcggggaagtatgtggcgtggtcgggcgtcgaccagccggagctcgctgcagaggggctcgggtgtggcttgctcctgctcaggccgctctccttcgcgctgccacactacgccgactgccacaagttcggctacgtcctccgaggctccggggtcgccggtgtcctcccggtcgccaccggggacgcctcccccgcggccagggagagggtcgtgcgcctcgaggccggcgacgtcatagccacgcgcactggggaggtctcgtggtggtacaacgacagcgacggcgatgcgggcgacctctcaatcgtgttcatgggcgacacggagcgcgctgtcagcccgggggacatgtcctacttctttctccccggcggcaacagcgtcctaggcggcttcgacgcgggcctcctcgccggggcatggcctggcgtgaccaaggagcaggccgccgccgtgttccggagccagccagccgtcctcctcaccgggctgagcaagaagctgcccggcgtccgcccgcgcgaggacgacaggaaacggctcgtcgtgaacgccggccaagtcgctgcaggaaccctgaagacgctcaccgcggccgacatggcggcgctgggcggcctggggatcagcgtggttctcggccggctcgagcccggcgccgcgcgcgcgccgtgggtgctacgcgagggtgcggcgcagttggtgtacgtggcacgcgggagcgcgcgcgtccaggtgtcttcttccgcgggcggcgagacgctgctgctggacgaggaggtcgccgcggggagcgtgttcgtcgtaccgcggttcgccgtgacgctcatctccgccggcgccgacggcgcacagtgggtctccctcatcaagagcgccaggcccgcggtggagcacctgaccggtgatggctcgatgctcggcggcctgaccgcgcaggtggtgcaggcgtcgctgagcgtggcgccggagttgctggagctgctcggagtccgcagcgccgagccgtcgcactgagcggtcggtgcacgcgttcgcgccgcggcgtccgttcactttccgtggcgtgtgtgtcccgtatgctccgttgacgtgcaccacacgattgtatttttatacgctgttacgtctctatacgtgcttacttacgtgaatgagcaaaataattgtgtgcattgttgtactcatatgagaccacaagtgtgttacccctcggcttgggttatatacgttgttacgtctcttacttacgtgcatgaggaaaataattctgcgcgttgttgtactcatatgtgc

SEQ ID NO: 12806 - protein, 358 aa, Triticum aestivum
  misc_feature (1)..(358): Ceres Seq. ID no. 14303632
MQGTRDMSAKGGKALVQSDAGKYVAWSGVDQPELAAEGLGCGLLLLRPLSFALPHYADCHKFGYVLRGSGVAGVLPVATGDASPAARERVVRLEAGDVIATRTGEVSWWYNDSDGDAGDLSIVFMGDTERAVSPGDMSYFFLPGGNSVLGGFDAGLLAGAWPGVTKEQAAAVFRSQPAVLLTGLSKKLPGVRPREDDRKRLVVNAGQVAAGTLKTLTAADMAALGGLGISVVLGRLEPGAARAPWVLREGAAQLVYVARGSARVQVSSSAGGETLLLDEEVAAGSVFVVPRFAVTLISAGADGAQWVSLIKSARPAVEHLTGDGSMLGGLTAQVVQASLSVAPELLELLGVRSAEPSH

SEQ ID NO: 12807 - protein, 352 aa, Triticum aestivum
  misc_feature (1)..(352): Ceres Seq. ID no. 14303633
MSAKGGKALVQSDAGKYVAWSGVDQPELAAEGLGCGLLLLRPLSFALPHYADCHKFGYVLRGSGVAGVLPVATGDASPAARERVVRLEAGDVIATRTGEVSWWYNDSDGDAGDLSIVFMGDTERAVSPGDMSYFFLPGGNSVLGGFDAGLLAGAWPGVTKEQAAAVFRSQPAVLLTGLSKKLPGVRPREDDRKRLVVNAGQVAAGTLKTLTAADMAALGGLGISVVLGRLEPGAARAPWVLREGAAQLVYVARGSARVQVSSSAGGETLLLDEEVAAGSVFVVPRFAVTLISAGADGAQWVSLIKSARPAVEHLTGDGSMLGGLTAQVVQASLSVAPELLELLGVRSAEPSH

SEQ ID NO: 12808 - protein, 234 aa, Triticum aestivum
  misc_feature (1)..(234): Ceres Seq. ID no. 14303634
MGDTERAVSPGDMSYFFLPGGNSVLGGFDAGLLAGAWPGVTKEQAAAVFRSQPAVLLTGLSKKLPGVRPREDDRKRLVVNAGQVAAGTLKTLTAADMAALGGLGISVVLGRLEPGAARAPWVLREGAAQLVYVARGSARVQVSSSAGGETLLLDEEVAAGSVFVVPRFAVTLISAGADGAQWVSLIKSARPAVEHLTGDGSMLGGLTAQVVQASLSVAPELLELLGVRSAEPSH

SEQ ID NO: 12809 - DNA, 1204 bp, Triticum aestivum
  misc_feature (1)..(1204): Ceres Seq. ID no. 14303652
aaaaccaatcgtacgctcgctcgctcatcaatttcagcagccattccacgaccgcccagagaagactcgcctcctcccgagctcccctctccgtcctcgtcgtctccctctcccgcttccccccacccaaccaacacgctacgccaggcgcgagaggcaccagcggccatgaagggcggcggagccatcaggagcggcggcgggggaggcggcgggctgatgcggacgcggctgcggctccccgtggtgctcctctcctgctccctcttcttcctcgccggcttcctcggctccctcctcttcacccaggatccgcagggggaggaggacgtggagcggccgctgcggagggagcggctcatggaggcggtctggccggagatggcgtacggggagtccggcgagcccacgccctccttgatcccttaccagattttgagctggcaaccccgtgcattatattttccacaatttgcaacagcagaacagtgtgagaatgtagtaaaaactgcgaaggcacggcttaggccatcaacattggccttaaggaaaggagaaagcgaggagactaccaaaggaataaggacaagctcaggcacattccttagtgccgaagaagatccaactggagcccttgcagaaattgaaacgaagattgcaaaggctaccatgatgccaagaagtcatggagagccatttaatgtccttctgtatgagattggacagaagtatgcttcacactatgatgcatttgacccggctcaatatggtccacaaaaaagtcaaagggtggcatctttcttgctctacctcacggatgtcgaggaaggtggagaaaccatgttcccatatgagaatggggataatatgaacataggctacgactacgaacagtgcatcggcttaaaggtgaaaccgaggaagggggatggcctcttgttttactcccttatgctaaatggtaccattgatccgacttcacttcatggaagctgcccagtggtcaaaggagagaaatgggtcgccacaaaatggattagagacagaggctccacgtcctaaatagatcaacacatacatagtaatcatttttttctacaccatcttgtacctgtacattacatttattcaatttccatcggccttcatgaaccagtgaggtaggggaaaaaacaacttgcagtttccatctgctaatttgacg

SEQ ID NO: 12810 - protein, 353 aa, Triticum aestivum
  misc_feature (1)..(353): Ceres Seq. ID no. 14303653
KTNRTLARSSISAAIPRPPREDSPPPELPSPSSSSPSPASPHPTNTLRQAREAPAAMKGGGAIRSGGGGGGGLMRTRLRLPVVLLSCSLFFLAGFLGSLLFTQDPQGEEDVERPLRRERLMEAVWPEMAYGESGEPTPSLIPYQILSWQPRALYFPQFATAEQCENVVKTAKARLRPSTLALRKGESEETTKGIRTSSGTFLSAEEDPTGALAEIETKIAKATMMPRSHGEPFNVLLYEIGQKYASHYDAFDPAQYGPQKSQRVASFLLYLTDVEEGGETMFPYENGDNMNIGYDYEQCIGLKVKPRKGDGLLFYSLMLNGTIDPTSLHGSCPVVKGEKWVATKWIRDRGSTS

SEQ ID NO: 12811 - protein, 297 aa, Triticum aestivum
  misc_feature (1)..(297): Ceres Seq. ID no. 14303654
MKGGGAIRSGGGGGGGLMRTRLRLPVVLLSCSLFFLAGFLGSLLFTQDPQGEEDVERPLRRERLMEAVWPEMAYGESGEPTPSLIPYQILSWQPRALYFPQFATAEQCENVVKTAKARLRPSTLALRKGESEETTKGIRTSSGTFLSAEEDPTGALAEIETKIAKATMMPRSHGEPFNVLLYEIGQKYASHYDAFDPAQYGPQKSQRVASFLLYLTDVEEGGETMFPYENGDNMNIGYDYEQCIGLKVKPRKGDGLLFYSLMLNGTIDPTSLHGSCPVVKGEKWVATKWIRDRGSTS

SEQ ID NO: 12812 - protein, 280 aa, Triticum aestivum
  misc_feature (1)..(280): Ceres Seq. ID no. 14303655
MRTRLRLPVVLLSCSLFFLAGFLGSLLFTQDPQGEEDVERPLRRERLMEAVWPEMAYGESGEPTPSLIPYQILSWQPRALYFPQFATAEQCENVVKTAKARLRPSTLALRKGESEETTKGIRTSSGTFLSAEEDPTGALAEIETKIAKATMMPRSHGEPFNVLLYEIGQKYASHYDAFDPAQYGPQKSQRVASFLLYLTDVEEGGETMFPYENGDNMNIGYDYEQCIGLKVKPRKGDGLLFYSLMLNGTIDPTSLHGSCPVVKGEKWVATKWIRDRGSTS

SEQ ID NO: 12813 - DNA, 1374 bp, Triticum aestivum
  misc_feature (1)..(1374): Ceres Seq. ID no. 14303656
aaaccgccgtcccccgttcgccgtctccgcgccgcgcgacccttcggcccggccgccctccccgaacccccctccgtctgctgcgccgccgcccgcgaatccgggccatggaggcgctgtggaagcaggcctccaggctcaaggagcaggtcgcccgccagggcgtgtttaagcagtttggggctggtggctatggaaattctgataatgcattcacagacgagtcagaagttaaactacatcagagattggaaaaactttacttatccactcgtgctgccaaacattttcaaagggacgtcgtccggggtgtggagggctacatagtgacaggatctaagcaagtggagatagggaacaaattgtctgatgatagccagaaatatggcattgaaaacacatgcacaagtggtaatactttatccagagctgctacatactatggaaaggcgcgttcactgatagaaaaggaacgcgggaacatgctaaaagcatttggtactcaggtggcagagcctctacgggcaatggtaatgggtgcccctctagaggatgctagacatctagcccagagatatgacagagtaaggcaagaagctgatgctcaggtcgttgaagtttcaaggcgtcaaagcagagtaagagaatcagctgggaatagtgacgtgatatcaaagttggaggcagctgagtataaacttgaagaactgaagtcaaacatggtggggttaggaaaggaagcggtttcagctatggctgctgtagaggggcagcagcaaagattgacattacaacgcctcattgcaatggttgaggcggagagaacttatcatcagaaagtcctggagatccttgaccatttggaagaagaaatggtgtctgagcgccaaaaaatcgaagcacctccaccccctgcagcagaaagttatatgtcaccgccgccaccatcatatgacgaagttaatggcatgtttgcctccacttctgctgatcaggcagttaactctgtcgacttcttcctgggagaggcgctcgattccttcgaggctgagagtgagtttgagcttaacttatcagttggcgacatcgttatcgtccggaagatatcaagcaacggttgggcggaaggtgaatgcaaggggaaagcaggatggttcccacatgcctatgtcgaaagacgcgagcgtgttctggcgagcaaagtcccgcatattttctaggggttttgaggaggaacataggttataggtgtttgatttcaatagttgaacagcgtactttcagacttctacagtattcatgtgtatagattgaattttcgtcccgtgagccagtttttgtgaagataatgtacatctgacatttcagaacacc

SEQ ID NO: 12814 - protein, 405 aa, Triticum aestivum
  misc_feature (1)..(405): Ceres Seq. ID no. 14303657
TAVPRSPSPRRATLRPGRPPRTPLRLLRRRPRIRAMEALWKQASRLKEQVARQGVFKQFGAGGYGNSDNAFTDESEVKLHQRLEKLYLSTRAAKHFQRDVVRGVEGYIVTGSKQVEIGNKLSDDSQKYGIENTCTSGNTLSRAATYYGKARSLIEKERGNMLKAFGTQVAEPLRAMVMGAPLEDARHLAQRYDRVRQEADAQVVEVSRRQSRVRESAGNSDVISKLEAAEYKLEELKSNMVGLGKEAVSAMAAVEGQQQRLTLQRLIAMVEAERTYHQKVLEILDHLEEEMVSERQKIEAPPPPAAESYMSPPPPSYDEVNGMFASTSADQAVNSVDFFLGEALDSFEAESEFELNLSVGDIVIVRKISSNGWAEGECKGKAGWFPHAYVERRERVLASKVPHIF

SEQ ID NO: 12815 - protein, 370 aa, Triticum aestivum
  misc_feature (1)..(370): Ceres Seq. ID no. 14303658
MEALWKQASRLKEQVARQGVFKQFGAGGYGNSDNAFTDESEVKLHQRLEKLYLSTRAAKHFQRDVVRGVEGYIVTGSKQVEIGNKLSDDSQKYGIENTCTSGNTLSRAATYYGKARSLIEKERGNMLKAFGTQVAEPLRAMVMGAPLEDARHLAQRYDRVRQEADAQVVEVSRRQSRVRESAGNSDVISKLEAAEYKLEELKSNMVGLGKEAVSAMAAVEGQQQRLTLQRLIAMVEAERTYHQKVLEILDHLEEEMVSERQKIEAPPPPAAESYMSPPPPSYDEVNGMFASTSADQAVNSVDFFLGEALDSFEAESEFELNLSVGDIVIVRKISSNGWAEGECKGKAGWFPHAYVERRERVLASKVPHIF

SEQ ID NO: 12816 - protein, 245 aa, Triticum aestivum
  misc_feature (1)..(245): Ceres Seq. ID no. 14303659
MLKAFGTQVAEPLRAMVMGAPLEDARHLAQRYDRVRQEADAQVVEVSRRQSRVRESAGNSDVISKLEAAEYKLEELKSNMVGLGKEAVSAMAAVEGQQQRLTLQRLIAMVEAERTYHQKVLEILDHLEEEMVSERQKIEAPPPPAAESYMSPPPPSYDEVNGMFASTSADQAVNSVDFFLGEALDSFEAESEFELNLSVGDIVIVRKISSNGWAEGECKGKAGWFPHAYVERRERVLASKVPHIF

SEQ ID NO: 12817 - DNA, 963 bp, Triticum aestivum
  misc_feature (1)..(963): Ceres Seq. ID no. 14303660
accaaatatctctctgattgcattgcctccctgcctggctacatttgacttgcttccatccattcgatccactcaactcaaggaagatctactgcactcccgcccatactagccgaggttcgttgggtaggataagatcatcgatggaggatgtgtggaaggacatgtcgctgtgctccaccccgctcgcgctacagtcctaccacctccactccccggccgccgctccctaccgcggcgccgctgtctacccccaggactacctggccggcgcggttccgcaaccgccccgcacgccgccgccggctcacacggcgctcaccctggagttcacctgccccggggggaccagcgctgccaacacggccaccagctccggcgacgacccagccggctgccactttggcttctccgcgtccggaggcggcagcaggagggccgtggtccagccggcggtgggcggcgaccggcggcagcgccggatggtcaagaaccgggagtcggcggcgcggtcgcgggcgcggaagcaggcccacaccaacgagatggagctggagctggagcagctgcgccgggagaacaggatgcttatccagcgcgagcaggacttcatcaacgatcgcttggcgaaggcggcgcaggtagccgtcccggactgcagcagcagcagcagcagctggaggaggaacactagtagcagtaccctccagcagccgcagaggtgccgctccgcccctgcaccatgatcgtcgcggcggccatcgactctagcagcggcagcttcattccacttactagtacaacggattgattgtccaagctagctagatgacttgattagcattgtactacgcgttaaccaagtactatgtatgtaatctagcagtagcctacttccttgcaaaattaagcaagcatgtagctcgacgatggatggaagttaagctaagctagtactcaacc

SEQ ID NO: 12818 - protein, 200 aa, Triticum aestivum
  misc_feature (1)..(200): Ceres Seq. ID no. 14303661
MEDVWKDMSLCSTPLALQSYHLHSPAAAPYRGAAVYPQDYLAGAVPQPPRTPPPAHTALTLEFTCPGGTSAANTATSSGDDPAGCHFGFSASGGGSRRAVVQPAVGGDRRQRRMVKNRESAARSRARKQAHTNEMELELEQLRRENRMLIQREQDFINDRLAKAAQVAVPDCSSSSSSWRRNTSSSTLQQPQRCRSAPAP

SEQ ID NO: 12819 - protein, 193 aa, Triticum aestivum
  misc_feature (1)..(193): Ceres Seq. ID no. 14303662
MSLCSTPLALQSYHLHSPAAAPYRGAAVYPQDYLAGAVPQPPRTPPPAHTALTLEFTCPGGTSAANTATSSGDDPAGCHFGFSASGGGSRRAVVQPAVGGDRRQRRMVKNRESAARSRARKQAHTNEMELELEQLRRENRMLIQREQDFINDRLAKAAQVAVPDCSSSSSSWRRNTSSSTLQQPQRCRSAPAP

SEQ ID NO: 12820 - protein, 164 aa, Triticum aestivum
  misc_feature (1)..(164): Ceres Seq. ID no. 14303663
MCGRTCRCAPPRSRYSPTTSTPRPPLPTAAPLSTPRTTWPARFRNRPARRRRLTRRSPWSSPAPGGPALPTRPPAPATTQPAATLASPRPEAAAGGPWSSRRWAATGGSAGWSRTGSRRRGRGRGSRPTPTRWSWSWSSCAGRTGCLSSASRTSSTIAWRRRRR

SEQ ID NO: 12821 - DNA, 1504 bp, Triticum aestivum
  misc_feature (1)..(1504): Ceres Seq. ID no. 14303664
ataaaatcggagaaacccagaaaaaaaaggactaaacgagatactgagagccgaagacctaaattccgtagagaaaactcgcatcgccgccgctgcctagatcgccgggcgccgccatgtcgaccccgggcgccgcctactacgcttccctcgcgcgcaagcagtacttctgctaccaatgcaaccgcaccgtcctcatcgccgcctccgccgcggccgccggcgagctctcatgccccgactgccgcggcgacttcctggaggaggtcaccgtccccgcccccaccatcctccccttcccctttgccttcccccctatgatgcccaccgcctcctccccgtcccgatcctcctcctcctccaccgccgcgcccccctccagcgacctctccaacttcctcaccagcatcctcgacctccaggagggccgccgcgttaggtccaggagcgggagcggtgccgcctcggccgctggcacggccacgcctgagaacgagccggagtccttcgacccgctcgtgtttttccagaactacatccacaccctcatggaggggggcgccaacatccaggtgctcctcgacgacgccagcgtcaacctcgcccccggcctaggcggccgtgccggtgggacaagctacggggactacttcgtcggcccgggactggagcaactcatcgagcagctcgccgagaacgatcccaaccgctatggcacgccgccggctgccaagtccgccctgaccactcttcctgacgtcgttgtcaccgatgccatggttgcggcggcagagggcgccgagtgtgctgtgtgcaaggaagatttctcacctggagatggggccaagcagatgccctgcaagcatatctaccacgcagattgcatcgtaccctggttggagctccacaattcgtgccccatttgtcgctttgagctgcccaccgatgatcctgattatgagggcaataaggcctcaaacgcacagtcagctgttggtatcgctgctgctgctgcatctgggagctctggtgctgctgaggaaggaggggaggagagtggggaggctgcaagggtggtggaaaggagattcaatgtgtcattggcttggccgtttggtggattggcaggtcaaacaccacagcaagatgggaacaatgccggtgctggcagtagctcacaggacagcggttcgcaggatggagctggtggcagtaacaaaaattgaacacaaatctgtgatcagttggaggtctccttgtcggcgatgcgtccagaggtcgacaatgttgatgcgccaccgtgagttatactacagacaatcgaaagaccaaaggaatttacagcctgtttatttggtggaacaaaacagtgttggttttagttgtcgttgtcgctgtccgttagggcgtgtacgcaaggcacagagactgccgtggcaggaagttgtgcgttgcgtagactctttgtgcagatttgttaaattgattctcgtttatggacccc

SEQ ID NO: 12822 - protein, 369 aa, Triticum aestivum
  misc_feature (1)..(369): Ceres Seq. ID no. 14303665
MSTPGAAYYASLARKQYFCYQCNRTVLIAASAAAAGELSCPDCRGDFLEEVTVPAPTILPFPFAFPPMMPTASSPSRSSSSSTAAPPSSDLSNFLTSILDLQEGRRVRSRSGSGAASAAGTATPENEPESFDPLVFFQNYIHTLMEGGANIQVLLDDASVNLAPGLGGRAGGTSYGDYFVGPGLEQLIEQLAENDPNRYGTPPAAKSALTTLPDVVVTDAMVAAAEGAECAVCKEDFSPGDGAKQMPCKHIYHADCIVPWLELHNSCPICRFELPTDDPDYEGNKASNAQSAVGIAAAAASGSSGAAEEGGEESGEAARVVERRFNVSLAWPFGGLAGQTPQQDGNNAGAGSSSQDSGSQDGAGGSNKN

SEQ ID NO: 12823 - protein, 302 aa, Triticum aestivum
  misc_feature (1)..(302): Ceres Seq. ID no. 14303666
MMPTASSPSRSSSSSTAAPPSSDLSNFLTSILDLQEGRRVRSRSGSGAASAAGTATPENEPESFDPLVFFQNYIHTLMEGGANIQVLLDDASVNLAPGLGGRAGGTSYGDYFVGPGLEQLIEQLAENDPNRYGTPPAAKSALTTLPDVVVTDAMVAAAEGAECAVCKEDFSPGDGAKQMPCKHIYHADCIVPWLELHNSCPICRFELPTDDPDYEGNKASNAQSAVGIAAAAASGSSGAAEEGGEESGEAARVVERRFNVSLAWPFGGLAGQTPQQDGNNAGAGSSSQDSGSQDGAGGSNKN

SEQ ID NO: 12824 - protein, 301 aa, Triticum aestivum
  misc_feature (1)..(301): Ceres Seq. ID no. 14303667
MPTASSPSRSSSSSTAAPPSSDLSNFLTSILDLQEGRRVRSRSGSGAASAAGTATPENEPESFDPLVFFQNYIHTLMEGGANIQVLLDDASVNLAPGLGGRAGGTSYGDYFVGPGLEQLIEQLAENDPNRYGTPPAAKSALTTLPDVVVTDAMVAAAEGAECAVCKEDFSPGDGAKQMPCKHIYHADCIVPWLELHNSCPICRFELPTDDPDYEGNKASNAQSAVGIAAAAASGSSGAAEEGGEESGEAARVVERRFNVSLAWPFGGLAGQTPQQDGNNAGAGSSSQDSGSQDGAGGSNKN

SEQ ID NO: 12825 - DNA, 2130 bp, Triticum aestivum
  misc_feature (1)..(2130): Ceres Seq. ID no. 14303672
ccctcgctagcctcgggtgggtctatcctcttccctcgctgagaatggcgtctccggcctccacctccgcgccggtctccctctccctctccctcccgctccgcccttccccgtgccgccgcctccccgcgcccttctcccgcctccctccccgccgcttcaccctctcgccgacccgccccgccgccgcgctgctctccagccccagccccagccccagccacgcgcagcacgagcacaaggacgaggaagatgaagaagaggagtatggtgaagatgaggagctcgtggaggaggatgacttggtggaggtggggtacgtgagcggcgcgcacggggtgcgcggcgacgtcctcgtctcgccccgcaccgacttccccgagctccgcttcgccacgccggggaagaggtggctgagggctcgcgccgccgggaagatgcaggtcagggagttcgagctcgtcagggggaaagcccacacggggaagaagggctggatcgtgcgcttcgacggcgtcgactccttggacgaggccaggcagatagttggttcggctgttctcgtgaagaccgaggataggccggaactggaggaggatgagatctattcgctcgatcttgttggcatgactgttattgtcaaggatacaggcaagcttgtaggcactgttgcacaggtcttcaattttggaggtggcgatcttctccaggttatggttggctctgctgagaatgctgtgcagactgattcagaaaatcaggattcaactccatcccgtcaacacgtgtggattccatttgctgaagatattgtgcctgatattgatatggagactagagagatgtggattacaccaccaaagggtcttcttgaggtcaacacacgtcctgagaaatcaaagaaagaaaggcgtgcgatggattggaaggaaaagaagaaactacagcgtcgcataactgcagcaaagaaggtactacatgaaatggaacagggccatattctggaaggtttgctatcaggggacaagctcgaaaaggcttcacttgctgaacaaattgcgagcattgacttccaattgttcaaacatgcaatgcatagcgtcagcaagcaggttgacagcatgtcaaagaatgttcttgccaattcctcttcatcaagaaaaaacgtgatgaggatacctcgcgaaaccctcatgaatcatggtgagaaagagaagaatgtcttcagtagtgaatttagcaaaggctgtgagatccttcaaaagtcaaaagcagcaattgtacttgttacaaatggctcagactctgatattgtggatgctgagtttcagagattgcttaactcttttagtgagttaatgaaggtagaagaaaatcatatatctccccctttttttattgtttctcctgacgatcatgtggattcagttcggaactacttgatagagaacgactattttggttttgacactcagaaggtatgggtccttgaagagatgaaactaccagttgtcagtctgtcctctgagctagggagcaaaaaaattctgctgaagtccccatgggagatacttcaaaggccagctggatctggggcgattttcagctcactatcatcaaataaaattttggaatcgttcaatgcaatgggcatagagtacgtacagatatgcagcccctctgacgaactagtcctcgggcatcctctgctcttcggtgctgcaagttcgcgcagtgtggatgtcggtgtcaagctccgcaagaccagcgacaagacggaagatggtttcgatttgatcctttccatcgaccacttgaacaagatgtgccgagacgtcgccaaggccaggttctctgcccaccccgagcagcacgaacacgtcgagcttgtcgacggccagtgggtcaccgtccagccagaggggccgaactctcaccggttgagtaccaatgttacaagtgttttggattcttgctctcctgacaagctgtgcgtcatggagattgttgagtagcggctagtgaatctttttgctaatgtactgtaggactgtacatagccagccacaaccaagtactttttttttaaacggagcctcatccattaattaagaagagagttgtccggct

SEQ ID NO: 12826 - protein, 670 aa, Triticum aestivum
  misc_feature (1)..(670): Ceres Seq. ID no. 14303673
LASLGWVYPLPSLRMASPASTSAPVSLSLSLPLRPSPCRRLPAPFSRLPPRRFTLSPTRPAAALLSSPSPSPSHAQHEHKDEEDEEEEYGEDEELVEEDDLVEVGYVSGAHGVRGDVLVSPRTDFPELRFATPGKRWLRARAAGKMQVREFELVRGKAHTGKKGWIVRFDGVDSLDEARQIVGSAVLVKTEDRPELEEDEIYSLDLVGMTVIVKDTGKLVGTVAQVFNFGGGDLLQVMVGSAENAVQTDSENQDSTPSRQHVWIPFAEDIVPDIDMETREMWITPPKGLLEVNTRPEKSKKERRAMDWKEKKKLQRRITAAKKVLHEMEQGHILEGLLSGDKLEKASLAEQIASIDFQLFKHAMHSVSKQVDSMSKNVLANSSSSRKNVMRIPRETLMNHGEKEKNVFSSEFSKGCEILQKSKAAIVLVTNGSDSDIVDAEFQRLLNSFSELMKVEENHISPPFFIVSPDDHVDSVRNYLIENDYFGFDTQKVWVLEEMKLPVVSLSSELGSKKILLKSPWEILQRPAGSGAIFSSLSSNKILESFNAMGIEYVQICSPSDELVLGHPLLFGAASSRSVDVGVKLRKTSDKTEDGFDLILSIDHLNKMCRDVAKARFSAHPEQHEHVELVDGQWVTVQPEGPNSHRLSTNVTSVLDSCSPDKLCVMEIVE

SEQ ID NO: 12827 - protein, 656 aa, Triticum aestivum
  misc_feature (1)..(656): Ceres Seq. ID no. 14303674
MASPASTSAPVSLSLSLPLRPSPCRRLPAPFSRLPPRRFTLSPTRPAAALLSSPSPSPSHAQHEHKDEEDEEEEYGEDEELVEEDDLVEVGYVSGAHGVRGDVLVSPRTDFPELRFATPGKRWLRARAAGKMQVREFELVRGKAHTGKKGWIVRFDGVDSLDEARQIVGSAVLVKTEDRPELEEDEIYSLDLVGMTVIVKDTGKLVGTVAQVFNFGGGDLLQVMVGSAENAVQTDSENQDSTPSRQHVWIPFAEDIVPDIDMETREMWITPPKGLLEVNTRPEKSKKERRAMDWKEKKKLQRRITAAKKVLHEMEQGHILEGLLSGDKLEKASLAEQIASIDFQLFKHAMHSVSKQVDSMSKNVLANSSSSRKNVMRIPRETLMNHGEKEKNVFSSEFSKGCEILQKSKAAIVLVTNGSDSDIVDAEFQRLLNSFSELMKVEENHISPPFFIVSPDDHVDSVRNYLIENDYFGFDTQKVWVLEEMKLPVVSLSSELGSKKILLKSPWEILQRPAGSGAIFSSLSSNKILESFNAMGIEYVQICSPSDELVLGHPLLFGAASSRSVDVGVKLRKTSDKTEDGFDLILSIDHLNKMCRDVAKARFSAHPEQHEHVELVDGQWVTVQPEGPNSHRLSTNVTSVLDSCSPDKLCVMEIVE

SEQ ID NO: 12828 - protein, 525 aa, Triticum aestivum
  misc_feature (1)..(525): Ceres Seq. ID no. 14303675
MQVREFELVRGKAHTGKKGWIVRFDGVDSLDEARQIVGSAVLVKTEDRPELEEDEIYSLDLVGMTVIVKDTGKLVGTVAQVFNFGGGDLLQVMVGSAENAVQTDSENQDSTPSRQHVWIPFAEDIVPDIDMETREMWITPPKGLLEVNTRPEKSKKERRAMDWKEKKKLQRRITAAKKVLHEMEQGHILEGLLSGDKLEKASLAEQIASIDFQLFKHAMHSVSKQVDSMSKNVLANSSSSRKNVMRIPRETLMNHGEKEKNVFSSEFSKGCEILQKSKAAIVLVTNGSDSDIVDAEFQRLLNSFSELMKVEENHISPPFFIVSPDDHVDSVRNYLIENDYFGFDTQKVWVLEEMKLPVVSLSSELGSKKILLKSPWEILQRPAGSGAIFSSLSSNKILESFNAMGIEYVQICSPSDELVLGHPLLFGAASSRSVDVGVKLRKTSDKTEDGFDLILSIDHLNKMCRDVAKARFSAHPEQHEHVELVDGQWVTVQPEGPNSHRLSTNVTSVLDSCSPDKLCVMEIVE

SEQ ID NO: 12829 - DNA, 2544 bp, Triticum aestivum
  misc_feature (1)..(2544): Ceres Seq. ID no. 14303680
atttcaaatcactctccctcccctgctctcctctcctcctcctcctccgccctctcgctcgcgtcccaggacccagccgcgcgaccccgaccccgaccccctcggcggccaccaccgcgcgctcccaccgccggcctgccgataccgcgccgagagattgctcctgacgatgggtggcgcggtgagagaccagcagcagcagctccacccgtgcgattcgcttctcctcgagctcaacgtgatctgggatgaggtcggtgagcccgacacggtgcgggacaagacgctgctggagctcgagcaggaatgcctcgatgtctacaggaggaaggtcgaccaggccaaccgctgcagggctcagctgcggcaatccatcgccgaggccgaggctgagctcgccggcatctgctcggccataggcgagccgccggttcacgtcaggcagtcaaaccagaaattgcatggtttaagggaggagttgaatgcaattatcccatatttagaggagatgcggactaaaaaggttgaaagatggagccagttcgttcatgtcctcgaggagattaagaaaatctcatccgaaatcaggccttcagactttgtgccatttaaaactcctgtggatcagtctgatctgtcgttaagaaagtttgaggagttaacgaaggagctagaatctcttcagaaagagaagagggaaagattaaagcaagtgatggatcatttgaacacattacattccttatgtgaggtgcttggcattgactttaaacaaacagtgcatgaggtgcaccctagcctggacgaagctgaaggatcaaagaacctgagcaacactacaatcgagagactagcattggctgtggatagacttcgtgaaataaaaattcagaggatgcaaaagcttcaagactttgcatcgacaatgctagaactatggaatcttatggatacaccaattgaagagcagcagatgttccagaatgtaacgtgcaatattgctgcctcggagcatgaaataacagaacccaacaccctgtcgatcgacttcctcagctatgtggaagctgaggttttaaggcttgagcaactgaaaggaagcaaaatgaaggacctcgttttgaaaaagaaatcggagctggaggagcacagaagacgtgcgcatctaattggcgaggaaggatattcagatgaatttaacattgaggctattgagtcgggagctattgatcctgcattggtgctggaacaaattgaggctcacattgcaacagtgaaagatgaagctttcagtcgaaaggatattcttgagaaggttgaaagatttctgaatgcatgtgaggaggaagcctggctggaagattacaacaaagatgacaatcgttacaatgctgggaagggggcacatctgacgctcaagagggctgagaaagctcgcattttggttaacaagattccgggaatggtagatgttttgaccacaaaaatcattgcttgggagaatgaaagaggaaaagagttcacatatgatggcgtacgccttctctcaatgctggatgaatacatgattgttcgccaggagaaagaacaagagaagaagagacaaagggatcagaagaagctccacgatcagctcaaagccgagcaggaagctctctacggttcaaagccaagtccatccaagcctcaaagcataaagaaggcgcctagacactcgatgggtggtgtaaaccgcagggtgtccatgggtggagccacgatgcaagcacccaaaacagacatactgcattccaagaatgttcgtgctgccaagagaactgaagacattgcccatttgtcccctgccagcagaggcttggacattggcgatcttcccatcaagaagctatctttcaatgccactgccttgcgtgaaaccgagacacctcgcaagccatttgcgcagatcatgccgccgccaagcagtgtcccctccactcctgcgcgctctgtcaccaatgacaccgaggatgagaaccggacccccaaccccaagacatttggagcagcactgaatctcaagaccccgatgaccgtggcggctccgatgcagctggcaatgacgcccgctgtggctagcaaggtcacggctgctcctgtctcccttgtctacgagaagccagagccaacattgctggaggcgatcgagtattccttcgaagaaaggcggctggccgtctatttgtcaagagaagtttaagctctctttgcgtaggcgaaagttggaaacctgacggctgttacttgtgagagactggctgctgcctagtatgttggtcgacgacagtcgtccagtgctgttctgattgttcccctctgccacatttgattgtttccatactcagcaaaggaagcttgcgcttcagcagcttccgttcagtactgccattggttagatataattaatgtgtataggtttctttctcggcactgaatcatcttgaatctgtttgattaatatagatcggtattgtgttttaatcctcatgcgatgatgtgtttctg

SEQ ID NO: 12830 - protein, 745 aa, Triticum aestivum
  misc_feature (1)..(745): Ceres Seq. ID no. 14303681
FQITLPPLLSSPPPPPPSRSRPRTQPRDPDPDPLGGHHRALPPPACRYRAERLLLTMGGAVRDQQQQLHPCDSLLLELNVIWDEVGEPDTVRDKTLLELEQECLDVYRRKVDQANRCRAQLRQSIAEAEAELAGICSAIGEPPVHVRQSNQKLHGLREELNAIIPYLEEMRTKKVERWSQFVHVLEEIKKISSEIRPSDFVPFKTPVDQSDLSLRKFEELTKELESLQKEKRERLKQVMDHLNTLHSLCEVLGIDFKQTVHEVHPSLDEAEGSKNLSNTTIERLALAVDRLREIKIQRMQKLQDFASTMLELWNLMDTPIEEQQMFQNVTCNIAASEHEITEPNTLSIDFLSYVEAEVLRLEQLKGSKMKDLVLKKKSELEEHRRRAHLIGEEGYSDEFNIEAIESGAIDPALVLEQIEAHIATVKDEAFSRKDILEKVERFLNACEEEAWLEDYNKDDNRYNAGKGAHLTLKRAEKARILVNKIPGMVDVLTTKIIAWENERGKEFTYDGVRLLSMLDEYMIVRQEKEQEKKRQRDQKKLHDQLKAEQEALYGSKPSPSKPQSIKKAPRHSMGGVNRRVSMGGATMQAPKTDILHSKNVRAAKRTEDIAHLSPASRGLDIGDLPIKKLSFNATALRETETPRKPFAQIMPPPSSVPSTPARSVTNDTEDENRTPNPKTFGAALNLKTPMTVAAPMQLAMTPAVASKVTAAPVSLVYEKPEPTLLEAIEYSFEERRLAVYLSREV

SEQ ID NO: 12831 - protein, 689 aa, Triticum aestivum
  misc_feature (1)..(689): Ceres Seq. ID no. 14303682
MGGAVRDQQQQLHPCDSLLLELNVIWDEVGEPDTVRDKTLLELEQECLDVYRRKVDQANRCRAQLRQSIAEAEAELAGICSAIGEPPVHVRQSNQKLHGLREELNAIIPYLEEMRTKKVERWSQFVHVLEEIKKISSEIRPSDFVPFKTPVDQSDLSLRKFEELTKELESLQKEKRERLKQVMDHLNTLHSLCEVLGIDFKQTVHEVHPSLDEAEGSKNLSNTTIERLALAVDRLREIKIQRMQKLQDFASTMLELWNLMDTPIEEQQMFQNVTCNIAASEHEITEPNTLSIDFLSYVEAEVLRLEQLKGSKMKDLVLKKKSELEEHRRRAHLIGEEGYSDEFNIEAIESGAIDPALVLEQIEAHIATVKDEAFSRKDILEKVERFLNACEEEAWLEDYNKDDNRYNAGKGAHLTLKRAEKARILVNKIPGMVDVLTTKIIAWENERGKEFTYDGVRLLSMLDEYMIVRQEKEQEKKRQRDQKKLHDQLKAEQEALYGSKPSPSKPQSIKKAPRHSMGGVNRRVSMGGATMQAPKTDILHSKNVRAAKRTEDIAHLSPASRGLDIGDLPIKKLSFNATALRETETPRKPFAQIMPPPSSVPSTPARSVTNDTEDENRTPNPKTFGAALNLKTPMTVAAPMQLAMTPAVASKVTAAPVSLVYEKPEPTLLEAIEYSFEERRLAVYLSREV

SEQ ID NO: 12832 - protein, 576 aa, Triticum aestivum
  misc_feature (1)..(576): Ceres Seq. ID no. 14303683
MRTKKVERWSQFVHVLEEIKKISSEIRPSDFVPFKTPVDQSDLSLRKFEELTKELESLQKEKRERLKQVMDHLNTLHSLCEVLGIDFKQTVHEVHPSLDEAEGSKNLSNTTIERLALAVDRLREIKIQRMQKLQDFASTMLELWNLMDTPIEEQQMFQNVTCNIAASEHEITEPNTLSIDFLSYVEAEVLRLEQLKGSKMKDLVLKKKSELEEHRRRAHLIGEEGYSDEFNIEAIESGAIDPALVLEQIEAHIATVKDEAFSRKDILEKVERFLNACEEEAWLEDYNKDDNRYNAGKGAHLTLKRAEKARILVNKIPGMVDVLTTKIIAWENERGKEFTYDGVRLLSMLDEYMIVRQEKEQEKKRQRDQKKLHDQLKAEQEALYGSKPSPSKPQSIKKAPRHSMGGVNRRVSMGGATMQAPKTDILHSKNVRAAKRTEDIAHLSPASRGLDIGDLPIKKLSFNATALRETETPRKPFAQIMPPPSSVPSTPARSVTNDTEDENRTPNPKTFGAALNLKTPMTVAAPMQLAMTPAVASKVTAAPVSLVYEKPEPTLLEAIEYSFEERRLAVYLSREV

SEQ ID NO: 12833 - DNA, 2581 bp, Triticum aestivum
  misc_feature (1)..(2581): Ceres Seq. ID no. 14303684
aaaaatgatgcgcgaccccagtcctactctccccagttgttactcccagccagcagcaccgtccagggcccggccgcacgctacaactagaaccaaccccagccccggtgcagtgcacagccagtgtagctaggctctctcgcagcgagagcaggacgcaggacggctagctagctttgatcggccggccggatcggagtgctcgtgtgtcgggggccatggccggcgccgcgggcgacagggcggaaggtgtgggcggtggcggggactggccgccgttcgccggcgacgccttcgcggagtactcgtcgtcggtgttcgcggagctcggtggatggtcggatggccttggcgcgggcgccggggagctgccgccgctggatctgccggcggcgagcgcgtccgggccggtcccgatggcgcggtcggacgagatcatgccggccgcgtcaggcgagcccgcaggcgccgcctcctcctgctccagcggcgacggcgccgcagccgccgcggagaacgccgacaagccgcaggaggccgccgacgcagcgagcatgaagccggcggcggcggcagggaagaaggggcagaagcgggcgcggcagcagcggttcgccttcgtgaccaagagcgaagttgatcacctcgaggatgggtacagatggaggaagtatgggcagaaagccgtcaagaacagccctttcccaaggagctactaccggtgcaccaacagcaagtgcaccgtgaagaagcgggtggagcggtcgtcggaggacccctccgtggtgatcaccacctacgagggccagcactgccaccaccagacctccttccagcgcggcggcatgcacttccacggcgccgccaccgttgcgctcgccgagcagatgtcgttcgtgtcaactcagcagctgtacaacctgccgcccctgcgccgacaacagatgaatcctgcatcgtcggagtccgccgttagctccgtgccgccgtctttgcagcagctcaacggcggcgacgaactgcgaaggtcaactagctatagccccacggcgtccgcggtgcagacaccgtcgtcgtcgttggtgcctccggacgtttcctttgacatgggactgcttggcgacatcgtgcctccaggagtaagaaatggatgaagatctataatggtaattattttaagataataggtttataagcgagaacggctacggtgtggacgagctcgtgcgctcccgctaactggacgaacgactccatgacgcgtagcacagcgtatttactgctatggtgtgcattgacgtcgagtacaggtgctccaccgtccaaactaacccgaaagtagcggctcagcttcgtgttgttccgttggaacatgaatgtcggagtggcccataaccgaatgccgccgtcaactttcgctactgagatggcgtcctccgaaagggtacttgggtgcccaactctcaaaagtaaatgggtacccatgtttgggcccatggttgtctcagcgtcgctgaccagtaaaagaaatatatcttccttctcccatagccgcctacagagcaggagctcatggcgatgcagatgtcgacatagccgcctacagagcaggagctcatggcgatgcagatatcggccgctggaggtgttgaagtcgagtttttgtcagatcccgtcgacagatttccactgcgagatctcgctgccgcacagcccttggttgcttacgagatgtacaaatccatggagtgtgagcctgctgagtccagcattggtgatgtggagacgctccggtcaacagtaattgcaatgcgattgccttgtctgcagcagcatctgagcattctacgggcaaagacacccctgaagccccaggctggaggaagagaatgcgagtcggaagttcatctagcgagcgccacccatgcgctgacaggatgagtgctttggaagcaacactaagaagctatgcagagaaaaaaaatggcactgtcgtagttcctactatggggacaaaatttgattctcttgaagaagcctgctagaacatgttcctggatgtgcatggatgcagaaaatgtccttgggatatagagctggaaatctgggacttagggtgttctagagcatccatgccatccaagtgagaggagaatatcctttgtctttaggacatgcttgctgaacatgcaagttcgctagacgaaggatgggtataactgatgaagctttatgcagtctattggcacccatctcatacagagctattgccgagagcgcctttgcatctgacgtcgtgcgccagagttggtcataggggaccacacgcagcttgatcagctcgacatggtcccgcaggcccgtttccttcccttggagagcctaaggctggccatagtgggggtaacataacctgtaacatgcacttgggactagcaaatatgtttatgtggcacataattaaagaggagagagagggttagagtaacataggtagataccatatcatgttaaatgctatgctactttgtgtcatgcatggcaataaatatgatcatctatgatactactttatgttact

SEQ ID NO: 12834 - protein, 311 aa, Triticum aestivum
  misc_feature (1)..(311): Ceres Seq. ID no. 14303685
MAGAAGDRAEGVGGGGDWPPFAGDAFAEYSSSVFAELGGWSDGLGAGAGELPPLDLPAASASGPVPMARSDEIMPAASGEPAGAASSCSSGDGAAAAAENADKPQEAADAASMKPAAAAGKKGQKRARQQRFAFVTKSEVDHLEDGYRWRKYGQKAVKNSPFPRSYYRCTNSKCTVKKRVERSSEDPSVVITTYEGQHCHHQTSFQRGGMHFHGAATVALAEQMSFVSTQQLYNLPPLRRQQMNPASSESAVSSVPPSLQQLNGGDELRRSTSYSPTASAVQTPSSSLVPPDVSFDMGLLGDIVPPGVRNG

SEQ ID NO: 12835 - protein, 245 aa, Triticum aestivum
  misc_feature (1)..(245): Ceres Seq. ID no. 14303686
MARSDEIMPAASGEPAGAASSCSSGDGAAAAAENADKPQEAADAASMKPAAAAGKKGQKRARQQRFAFVTKSEVDHLEDGYRWRKYGQKAVKNSPFPRSYYRCTNSKCTVKKRVERSSEDPSVVITTYEGQHCHHQTSFQRGGMHFHGAATVALAEQMSFVSTQQLYNLPPLRRQQMNPASSESAVSSVPPSLQQLNGGDELRRSTSYSPTASAVQTPSSSLVPPDVSFDMGLLGDIVPPGVRNG

SEQ ID NO: 12836 - protein, 238 aa, Triticum aestivum
  misc_feature (1)..(238): Ceres Seq. ID no. 14303687
MPAASGEPAGAASSCSSGDGAAAAAENADKPQEAADAASMKPAAAAGKKGQKRARQQRFAFVTKSEVDHLEDGYRWRKYGQKAVKNSPFPRSYYRCTNSKCTVKKRVERSSEDPSVVITTYEGQHCHHQTSFQRGGMHFHGAATVALAEQMSFVSTQQLYNLPPLRRQQMNPASSESAVSSVPPSLQQLNGGDELRRSTSYSPTASAVQTPSSSLVPPDVSFDMGLLGDIVPPGVRNG

SEQ ID NO: 12837 - DNA, 1842 bp, Triticum aestivum
  misc_feature (1)..(1842): Ceres Seq. ID no. 14303706
acaacgaagcaccagaaaagaacaaaaatataaaaaaataagacgagagagccacccccatcgcctcgtctctcctctcctcgcagatctttcccgtctccggccaccatgaactcctactccggcgaccggtcctcctcccgtcccaccacaacctccttcgactcctaccagtttgacttcggggccaacgcctcccgctcctccacctcccgccccctccgcgaccagaggccaggtggcgccaccaacccttcaccgaggccaaccaccacaaacacatggtcacaccagccggtgaagacgtcctggactcatcagccatccccgtccgccgccgcggcgctcggatccgggcctgtgtccatggtcggcgacatctccggccggagctggtccgccactgcgccctcctccggcatcggcctccctcagtccaacaaccccaacctcttcagcgacctcctcgggcccgcgcttggatccacccgagcccagtccaacgcgccgctcagatcagcagcggcccagccctccaagccgtcaagcgctaaccctaggaccaacagctcttccttctcgatgggcggtatggcgagcacgctcccgaaaaccaccggggcaccgatagcttctggtagttatggggttggtggccggccaatgaagccggtgggcatggcgccggcgaccgcgtcacagcccacggcgcagaagaaggatccgttcggctccatagatcccttcgcggcgaagcctgggtctatgaatgctgcaaagcaggcaggttcggccaaatcggatcagggatttggcgtgtttcagggcgtgagttcgggcgccaacgctggattcagtagtttccagaaagccggtgctggatccagtggcttccagagttctggtgccacgaagccttccaatgttacgcctccgcctgcacccgctccagcgcctgtttctgcagcggtgaactctggcgtggatcattttgacacgctgtttccttcgtccgcatctgcaccaactgcttctgcggcgagtaatggtggtggtgacatgtttggtgagatggatggttgggtggacgtggagtcggagtatgttggtggtggtgatagcagtggcacaaccacagagctggagggattaccgccaccaccctctgggttgacggcatctgctgctaaggcaaaaggaatggataattacaagggtgggcagtatgctgatgctatcaaatggttgtcttgggctgttctgctcatcgagaagactgggaaaaatgctggtattgcagaggtgttgtcatcaagggcctcgtcctataaggaggtcggcgagtacaagaaggctattgccgactgttcgaaggtgctcgagcaagataaggacaatgtgtcggtgctagtgcaacgtgctctcttatatgagagcagtgagaaatataggcttggggctgaggacctgcgtttggttctgaagattgaccctgggaatcgtcttgccaggagtatgattcatcgattgaacaaaatggctgactagggatgtttgtcaagttccctgatgtaccaccattgtaatcatccttgacacggaaactgtgagttatttcaaattgttttactatacttgtggctttgggggtaataatttacaactttggtgttatgaagcacatcattgcatcttcacacacagtatatctttgatatgtattgtatatcatatattgtattgaactttaatagttcactttgtgtttgaaaaaaaaaaaaaaaaaaaaaaaaaaaaaaaaaaaaaaaaaaaaaaaaaaaaaaaaaaaaaaaaaaaaaaagg

SEQ ID NO: 12838 - protein, 479 aa, Triticum aestivum
  misc_feature (1)..(479): Ceres Seq. ID no. 14303707
MNSYSGDRSSSRPTTTSFDSYQFDFGANASRSSTSRPLRDQRPGGATNPSPRPTTTNTWSHQPVKTSWTHQPSPSAAAALGSGPVSMVGDISGRSWSATAPSSGIGLPQSNNPNLFSDLLGPALGSTRAQSNAPLRSAAAQPSKPSSANPRTNSSSFSMGGMASTLPKTTGAPIASGSYGVGGRPMKPVGMAPATASQPTAQKKDPFGSIDPFAAKPGSMNAAKQAGSAKSDQGFGVFQGVSSGANAGFSSFQKAGAGSSGFQSSGATKPSNVTPPPAPAPAPVSAAVNSGVDHFDTLFPSSASAPTASAASNGGGDMFGEMDGWVDVESEYVGGGDSSGTTTELEGLPPPPSGLTASAAKAKGMDNYKGGQYADAIKWLSWAVLLIEKTGKNAGIAEVLSSRASSYKEVGEYKKAIADCSKVLEQDKDNVSVLVQRALLYESSEKYRLGAEDLRLVLKIDPGNRLARSMIHRLNKMAD

SEQ ID NO: 12839 - protein, 393 aa, Triticum aestivum
  misc_feature (1)..(393): Ceres Seq. ID no. 14303708
MVGDISGRSWSATAPSSGIGLPQSNNPNLFSDLLGPALGSTRAQSNAPLRSAAAQPSKPSSANPRTNSSSFSMGGMASTLPKTTGAPIASGSYGVGGRPMKPVGMAPATASQPTAQKKDPFGSIDPFAAKPGSMNAAKQAGSAKSDQGFGVFQGVSSGANAGFSSFQKAGAGSSGFQSSGATKPSNVTPPPAPAPAPVSAAVNSGVDHFDTLFPSSASAPTASAASNGGGDMFGEMDGWVDVESEYVGGGDSSGTTTELEGLPPPPSGLTASAAKAKGMDNYKGGQYADAIKWLSWAVLLIEKTGKNAGIAEVLSSRASSYKEVGEYKKAIADCSKVLEQDKDNVSVLVQRALLYESSEKYRLGAEDLRLVLKIDPGNRLARSMIHRLNKMAD

SEQ ID NO: 12840 - protein, 321 aa, Triticum aestivum
  misc_feature (1)..(321): Ceres Seq. ID no. 14303709
MGGMASTLPKTTGAPIASGSYGVGGRPMKPVGMAPATASQPTAQKKDPFGSIDPFAAKPGSMNAAKQAGSAKSDQGFGVFQGVSSGANAGFSSFQKAGAGSSGFQSSGATKPSNVTPPPAPAPAPVSAAVNSGVDHFDTLFPSSASAPTASAASNGGGDMFGEMDGWVDVESEYVGGGDSSGTTTELEGLPPPPSGLTASAAKAKGMDNYKGGQYADAIKWLSWAVLLIEKTGKNAGIAEVLSSRASSYKEVGEYKKAIADCSKVLEQDKDNVSVLVQRALLYESSEKYRLGAEDLRLVLKIDPGNRLARSMIHRLNKMAD

SEQ ID NO: 12841 - DNA, 932 bp, Triticum aestivum
  misc_feature (1)..(932): Ceres Seq. ID no. 14303722
gcaaccctagctgtagtgcagcgtatcccacttcccacctaacccctacccctatccctccgaaccccgcaccaagatggcggcgccgacgaccttctccggcgaggtgtgggcggagctgcgcctggcggacgcgcgcgacgtgccgcacatccacagcctcatccaccagatggcggagttcgagctcctcaccgacctcttcgccgccacccacgagctcctggcctccacgctcttccccacgccccagccggcccccttcacctccttcaccgccctcatcctcgacctctctccgtcccccgccccggcctccgccgacaccgtcggctcccgccgcctcgacctctcggcgtccccgctcgccgacccggaggcggccgccttcccgtccccgcgcggcggcgggcgcgtcacggccgggttcgtcatctgctttcccaactactccaccttcctcgccaagcccgggctgtacgtggaggacatcttcgtgcgcgcgccctggcgccgccgcgggctcggccggatgatgctgtccgccgtcgccggcagggccgcggagatcggaatgggccgcgtggagtggtgcgtgctcgactggaaccagaacgccatcgacttctacgaggggatgggcgccgaggtgttcaagcagtggcgcatctgccggctcaccggtcccgccctcgacaagtacaagggcaccggcagccaggaggaggaggacgccggcgggaaggcccagtaggcctgtaggagaggagagatcggggctccggtgactggtaataataaaggtggtagattttgcctccacttggtgatgtattcttccttgctagtactgatagtgatttagtgcattggtatgttcttcatggagatgcattatggacctgttcttgccttccttggaaggagtattg

SEQ ID NO: 12842 - protein, 225 aa, Triticum aestivum
  misc_feature (1)..(225): Ceres Seq. ID no. 14303723
MAAPTTFSGEVWAELRLADARDVPHIHSLIHQMAEFELLTDLFAATHELLASTLFPTPQPAPFTSFTALILDLSPSPAPASADTVGSRRLDLSASPLADPEAAAFPSPRGGGRVTAGFVICFPNYSTFLAKPGLYVEDIFVRAPWRRRGLGRMMLSAVAGRAAEIGMGRVEWCVLDWNQNAIDFYEGMGAEVFKQWRICRLTGPALDKYKGTGSQEEEDAGGKAQ

SEQ ID NO: 12843 - protein, 193 aa, Triticum aestivum
  misc_feature (1)..(193): Ceres Seq. ID no. 14303724
MAEFELLTDLFAATHELLASTLFPTPQPAPFTSFTALILDLSPSPAPASADTVGSRRLDLSASPLADPEAAAFPSPRGGGRVTAGFVICFPNYSTFLAKPGLYVEDIFVRAPWRRRGLGRMMLSAVAGRAAEIGMGRVEWCVLDWNQNAIDFYEGMGAEVFKQWRICRLTGPALDKYKGTGSQEEEDAGGKAQ

SEQ ID NO: 12844 - protein, 177 aa, Triticum aestivum
  misc_feature (1)..(177): Ceres Seq. ID no. 14303725
NPSCSAAYPTSHLTPTPIPPNPAPRWRRRRPSPARCGRSCAWRTRATCRTSTASSTRWRSSSSSPTSSPPPTSSWPPRSSPRPSRPPSPPSPPSSSTSLRPPPRPPPTPSAPAASTSRRPRSPTRRRPPSRPRAAAGASRPGSSSAFPTTPPSSPSPGCTWRTSSCARPGAAAGSAG

SEQ ID NO: 12845 - DNA, 531 bp, Triticum aestivum
  misc_feature (1)..(531): Ceres Seq. ID no. 14305395
cgtatacctgatgggaaatttcaggctgctttcctgacgtaccattctcttggacactgggttcatcgaggaagctcatcagaccaggctggccatagtcatgctgtcttgccagtcatgggtttgcaatcttacaacgacaagggggagtggtggtttcagacgagcagatctggttcgggggatgcagagtcctcgtcgagtcggccgtctcaggttcttcaagaaaggttgtcgacgctgaaccaagccgcggcggcgatggccagggccgacgtgtggaagaaggaccaggctcgcagaaacaggcacccggactacgagttcttcctgtcccggcagcaacggtagacagacgactccaggctttttgcgcgtacaatgtgttcaaaatgctgacggacgaacgtttgttcccttgtaaccagaagcaagcatgcggactgagcggtgccgtctgcgtgtgttaccaccctgtatatatttgagatagaggtacatgtcatgtggaggtgctgctcaattgaaagg

SEQ ID NO: 12846 - protein, 116 aa, Triticum aestivum
  misc_feature (1)..(116): Ceres Seq. ID no. 14305396
RIPDGKFQAAFLTYHSLGHWVHRGSSSDQAGHSHAVLPVMGLQSYNDKGEWWFQTSRSGSGDAESSSSRPSQVLQERLSTLNQAAAAMARADVWKKDQARRNRHPDYEFFLSRQQR

SEQ ID NO: 12847 - protein, 77 aa, Triticum aestivum
  misc_feature (1)..(77): Ceres Seq. ID no. 14305397
MGLQSYNDKGEWWFQTSRSGSGDAESSSSRPSQVLQERLSTLNQAAAAMARADVWKKDQARRNRHPDYEFFLSRQQR

SEQ ID NO: 12848 - DNA, 616 bp, Triticum aestivum
  misc_feature (1)..(616): Ceres Seq. ID no. 14307875
accattacagtacacaccacctcaagcgaaagcagcagaagccacagcccaagctcaagctcaagctctcctcttcactcctgcaatggcgcgcatccagctcgtggctctggccctgaccatgctcttcgccgccaccgcggcccaggccccggcggccaccccgatgcccgcgcccgtggccccggtgtccccgcccccgacgatgccgccgccgaccccggcgccggtgtcccccccgccggccgtggccccggccacccctcccccggcgccggcgcccgccgcaccggctcccgcccccatggtccctgccccaacaaggcccactaggcggcacagctcttcagatctgagtgccccgtttacccttgctcctttacctacctcctgattctgcagcaagtcataccctatacctatcagtactagtattagtcgccgtagcgtttccccctgctgctcgatgcgagcttggttccagaagaattgctggtggtgtgttcgttaagatccaagttattttgctgtctctctgtgatgaggacacagatctatctatgtgttggatggactaagttatcgaagtcaagtttggtgtcttgtagattgatca

SEQ ID NO: 12849 - protein, 130 aa, Triticum aestivum
  misc_feature (1)..(130): Ceres Seq. ID no. 14307876
PLQYTPPQAKAAEATAQAQAQALLFTPAMARIQLVALALTMLFAATAAQAPAATPMPAPVAPVSPPPTMPPPTPAPVSPPPAVAPATPPPAPAPAAPAPAPMVPAPTRPTRRHSSSDLSAPFTLAPLPTS

SEQ ID NO: 12850 - protein, 110 aa, Triticum aestivum
  misc_feature (1)..(110): Ceres Seq. ID no. 14307877
TITVHTTSSESSRSHSPSSSSSSPLHSCNGAHPARGSGPDHALRRHRGPGPGGHPDARARGPGVPAPDDAAADPGAGVPPAGRGPGHPSPGAGARRTGSRPHGPCPNKAH

SEQ ID NO: 12851 - protein, 102 aa, Triticum aestivum
  misc_feature (1)..(102): Ceres Seq. ID no. 14307878
MARIQLVALALTMLFAATAAQAPAATPMPAPVAPVSPPPTMPPPTPAPVSPPPAVAPATPPPAPAPAAPAPAPMVPAPTRPTRRHSSSDLSAPFTLAPLPTS

SEQ ID NO: 12852 - DNA, 1059 bp, Triticum aestivum
  misc_feature (1)..(1059): Ceres Seq. ID no. 14307883
acttgtagtggcccactgtgaaaggccagcgtctggctcctctgctcctcctcatcccctccgccgccgcgctgctgctcaaccagaacggagagcttgcaagatcagcgttgcggtccacacgctcggccccgcaaggtcgccgcctctgtgaaggccgccccaccgaataagaagaaggggaagaaaccaaacctcgtcatgaagagcttccctgtggccggcggccgcagcgtctccctcgccctcttctccgatgtctccaacagccgggagctcctagatctgatgcagtcagggaagctggagccggaggccgcttttctcaatgcatcactggtgccgggcgtgttcccggtcctcgcggcggcgcacaaagcgctgctctccaagtcgagggagtcgctgaccacgagaaccctgcactcggagcttgtctataattgctctggctcgaagcatataactgagtccctaaagcggtgcggtatcgctgatgacacgcagtatatccttgcggctcggtttgatgcttcagatgaagagatgaaagctctggaaaagctcatcagcggaaccgagattgatctgtcggaattggagacaagagcagaccaaccaaagattctgaagcaatacaaaataactccacaagaattatcaatatctacactgccagaggcaatcgtgtgcaggattgctgctcgagacgccctctgaggtcttaaaaacgatggccaggacgttctgcagctgtgtgtgtcaaattctttggacgatcaccgcatctgccgcacctcctgtcgatggtcaagctcgtggcggcaggatgtttcaactcatgaacttaggaattgcattacggtaacattcagtcctggatgctgtagcgacaactgaataatatgtatggtcacaggctcacggcttgagtgtttctaagatcacttcatcaagatttaatgcaagcaaccttcagttgatatcgcgatgttgactcggatctgttgtttcggtgacactgcagaacatgagtaaaatcagcgaaatatgtgtggc

SEQ ID NO: 12853 - protein, 172 aa, Triticum aestivum
  misc_feature (1)..(172): Ceres Seq. ID no. 14307884
MKSFPVAGGRSVSLALFSDVSNSRELLDLMQSGKLEPEAAFLNASLVPGVFPVLAAAHKALLSKSRESLTTRTLHSELVYNCSGSKHITESLKRCGIADDTQYILAARFDASDEEMKALEKLISGTEIDLSELETRADQPKILKQYKITPQELSISTLPEAIVCRIAARDAL

SEQ ID NO: 12854 - protein, 143 aa, Triticum aestivum
  misc_feature (1)..(143): Ceres Seq. ID no. 14307885
MQSGKLEPEAAFLNASLVPGVFPVLAAAHKALLSKSRESLTTRTLHSELVYNCSGSKHITESLKRCGIADDTQYILAARFDASDEEMKALEKLISGTEIDLSELETRADQPKILKQYKITPQELSISTLPEAIVCRIAARDAL

SEQ ID NO: 12855 - DNA, 1876 bp, Triticum aestivum
  misc_feature (1)..(1876): Ceres Seq. ID no. 14307892
atattcccgagagagaaagaatccagcccccacccgccgccgcgccgctgatagcgagcgtgacagagtcctcccccattaaacccccccgcccgccgccgcgtccaccgccaccgccagaccacgcagcccgcaatcgccgaccgaggcaccgccggtggtcggagaagcgctacgaacgccgaggacgcgcgccatggagggcagagcgccgctgctgccccggcgccaagaggcggccaagagcggcgggtggcgttgcggggcggcggcggcggaggccaggaaggtcgcgcacgtggcgctgccgatggcggccgtgagcgtggcgcagtacgccgtgcaggtggcctccaacatgatggtcggccacctccccgggggcgtgctggcgctctccgcctccgccatcgccacctccctcgcctccgtatccggattcagcctcctcattggaatgtcaaacggcttagaaactctctgtggtcaagcttacggggccgaacaatatggcagattgggagtgcaaacctacagagctatggtcaccctgacggctgtcagcattccaatctcacttctctggatattcatgggaaaactcctgaccctcataggccaggaccccgtgatctcgcatgaagccgggagatacataatgtggttgattccggccctctttgcatatgctgtcagccagcccctaacaaagttcttacagtctcagagtctgataatccctatgctctggtcctccattgcaacattgctcttgcacattcctgtttgctggttattggtgttcaagaccagccttgggtacattggagccgctttggcgataagcgtatcatactggttgaacgtgttcatgcttgttgcgtacatcggatgctcaaactcttgtaaggagacattctcgcctcccacactcgatgctttcagtggagtgggtgtgttcatgcgcttagccctgccgtctgcactaatgttatgttttgaatggtggtcatttgaggtcattattcttctgtctggacttctacccaatccagagctgcaaacttcagttctttctacatgcatgacaacaatcacattgatgtatactatagcgtacggaattggtgctgctggaagcactcgtgtatcaaatgaattaggtgctgggaatcctgaaggtgctcgactggctgtccgcgttgtgatgtctattgctgtgactgaggcagttctcatcactggggcactgttagcatcccagcacatcttgggctacgcatacagcagtgataaggaggttgttgattatgtcaatgcaatggttccgttcatctgcatctcagttgctgctgatagcctacaaggagttctctcaggtatcgctcgagggtgcgggtcgcagcacctgggcgcctatgttaacctcggttcgttctatctgtttgggattccaatgtccctcctactcgggtttgttctgaagatgggaggaaaggggctctggatgggcatttcctgcggctccatagtgcaattcctacttctgtccggcatagtgttcttcagcaactggcaaaagatgtctgacaatgcgagggagagggttttcggcggaaccccggcggagaaggagcctttgatgtctgatgtaacgggcgctgcctaattttctcgcgagttgctcaatcccttgacccgaacttgaagcggacgacacggcagcttaatcttgtcgctgtagatgacagtctcagagatgtgtgtatatagagaggcgagtttgctgaagaaccgaagaacttaagaactaactggtgcccgtagttgtaatgttgcaattttgctgaggtcggaaaagaatgatacatacagt

SEQ ID NO: 12856 - protein, 490 aa, Triticum aestivum
  misc_feature (1)..(490): Ceres Seq. ID no. 14307893
MEGRAPLLPRRQEAAKSGGWRCGAAAAEARKVAHVALPMAAVSVAQYAVQVASNMMVGHLPGGVLALSASAIATSLASVSGFSLLIGMSNGLETLCGQAYGAEQYGRLGVQTYRAMVTLTAVSIPISLLWIFMGKLLTLIGQDPVISHEAGRYIMWLIPALFAYAVSQPLTKFLQSQSLIIPMLWSSIATLLLHIPVCWLLVFKTSLGYIGAALAISVSYWLNVFMLVAYIGCSNSCKETFSPPTLDAFSGVGVFMRLALPSALMLCFEWWSFEVIILLSGLLPNPELQTSVLSTCMTTITLMYTIAYGIGAAGSTRVSNELGAGNPEGARLAVRVVMSIAVTEAVLITGALLASQHILGYAYSSDKEVVDYVNAMVPFICISVAADSLQGVLSGIARGCGSQHLGAYVNLGSFYLFGIPMSLLLGFVLKMGGKGLWMGISCGSIVQFLLLSGIVFFSNWQKMSDNARERVFGGTPAEKEPLMSDVTGAA

SEQ ID NO: 12857 - protein, 452 aa, Triticum aestivum
  misc_feature (1)..(452): Ceres Seq. ID no. 14307894
MAAVSVAQYAVQVASNMMVGHLPGGVLALSASAIATSLASVSGFSLLIGMSNGLETLCGQAYGAEQYGRLGVQTYRAMVTLTAVSIPISLLWIFMGKLLTLIGQDPVISHEAGRYIMWLIPALFAYAVSQPLTKFLQSQSLIIPMLWSSIATLLLHIPVCWLLVFKTSLGYIGAALAISVSYWLNVFMLVAYIGCSNSCKETFSPPTLDAFSGVGVFMRLALPSALMLCFEWWSFEVIILLSGLLPNPELQTSVLSTCMTTITLMYTIAYGIGAAGSTRVSNELGAGNPEGARLAVRVVMSIAVTEAVLITGALLASQHILGYAYSSDKEVVDYVNAMVPFICISVAADSLQGVLSGIARGCGSQHLGAYVNLGSFYLFGIPMSLLLGFVLKMGGKGLWMGISCGSIVQFLLLSGIVFFSNWQKMSDNARERVFGGTPAEKEPLMSDVTGAA

SEQ ID NO: 12858 - protein, 436 aa, Triticum aestivum
  misc_feature (1)..(436): Ceres Seq. ID no. 14307895
MMVGHLPGGVLALSASAIATSLASVSGFSLLIGMSNGLETLCGQAYGAEQYGRLGVQTYRAMVTLTAVSIPISLLWIFMGKLLTLIGQDPVISHEAGRYIMWLIPALFAYAVSQPLTKFLQSQSLIIPMLWSSIATLLLHIPVCWLLVFKTSLGYIGAALAISVSYWLNVFMLVAYIGCSNSCKETFSPPTLDAFSGVGVFMRLALPSALMLCFEWWSFEVIILLSGLLPNPELQTSVLSTCMTTITLMYTIAYGIGAAGSTRVSNELGAGNPEGARLAVRVVMSIAVTEAVLITGALLASQHILGYAYSSDKEVVDYVNAMVPFICISVAADSLQGVLSGIARGCGSQHLGAYVNLGSFYLFGIPMSLLLGFVLKMGGKGLWMGISCGSIVQFLLLSGIVFFSNWQKMSDNARERVFGGTPAEKEPLMSDVTGAA

SEQ ID NO: 12859 - DNA, 1889 bp, Triticum aestivum
  misc_feature (1)..(1889): Ceres Seq. ID no. 14307916
actagtatataacaattcactcccatccaccaaccacaccaagaatcgcgagcgagcttgggatccggcttgaagttgccatggaggcggccgccgagctggcgcagcgcctgcgggccgcggccaacgaccggctggcggggcaggagccgctcctcctcgtcgccgcgccgctgctcgcgctcctcgccgcgcgcgccgtccacgccgccgccgccgacgtcgccgaccgcggcctccgcaccgtcctcatcaccctcgccatggccgccgtcaagttggtgccgggggtcagcggatacatcgccgccgagaagagcaaggttgttgagcagttgcagtcaggcagcgcgtccagcaagaagaacctgcgaaccgagctgcccgccgtcggggatcccgacggagtcatagacgagctccaggcgctcaaagacaaggatgtgagatggcagggcaaatgctccggcaccgtttatatcgctgggagcgagtctgaaggccatttttcacttataaacaaggcctactctatgttttcacacacaaatccactgcatcaggatgtattcaagagtgtggcacagttagaggctgaagtagtagcaatgacagctgctttgcttggcagcaaagaaaaggcgtctggtggacaaatttgtggcaatatgacgtcaggcgggactgaaagcatattgttggccgtcaaaacatcacgcgattatatgcaatcaaagaagggaatcacaaagcccgaaattataattgctgaatcagctcattctgcctatgacaaagctgctcaatatttcaatattaaagtgcggcgtgtacctgtgaataaagaatttcttgcagatgtaaaaggattcaaacggtgcataaatggaaacaccataatgatggttggatctgcaccaggatttccccatggtttaattgatcccatcgaggaacttggggagttggcttcacaatatggtatttgcttgcatgttgatctatgccttggtggcttcgtattgcctttcgcccgtaagcttgggtatcctattcctccttttgatttttctgtcaaaggtgttacgtcgatctcaacagatgttcataagtatgggctagccccaaaaggcaccagtactgtcctatacaggaatcatgaaattagaaagcaccaatttgttgctgtgacggaatggactggtgggctctatatttcccctactatggctggaagcaggccaggtggactagtcgcaggagcttgggctgcgatgatgtctcttggattgaatggttatttggaaagtactggtaaaatcatggaagtctcaaggaagatacaaaaaggaattgatgatatctcaggtttatttgtgattgggaagccagacatgaccgtcgtggcctttgggtcggacgcagtcgacatatttgaggtgaatgacataatgtcatcaaaaggatggcacctcaatgctcttcagagacccaacagtctgcacatctgcgtgacgcttcaacacacggctatctatgaggaattcctcaaggacctcgaggattctgtgaacacagtgaaagcgaatccagggcctatcagcggggggatggctccgatctacggcgcggctgggaagatgccggacagaggcacggtcaaggagttgcttgtggagttcatggacagctcttgctaaccattgactataccccattggttggtcatctctctgtaacatgcatatgtacaagccgcagtgacagtgttgtgtgatcttctatatttggtttggctcaaaactgaaggcacacaacacaatgcctccaatatagacatgtatctatgtatcagttacattggtcgcaataaagttacattttcagcc

SEQ ID NO: 12860 - protein, 539 aa, Triticum aestivum
  misc_feature (1)..(539): Ceres Seq. ID no. 14307917
MEAAAELAQRLRAAANDRLAGQEPLLLVAAPLLALLAARAVHAAAADVADRGLRTVLITLAMAAVKLVPGVSGYIAAEKSKVVEQLQSGSASSKKNLRTELPAVGDPDGVIDELQALKDKDVRWQGKCSGTVYIAGSESEGHFSLINKAYSMFSHTNPLHQDVFKSVAQLEAEVVAMTAALLGSKEKASGGQICGNMTSGGTESILLAVKTSRDYMQSKKGITKPEIIIAESAHSAYDKAAQYFNIKVRRVPVNKEFLADVKGFKRCINGNTIMMVGSAPGFPHGLIDPIEELGELASQYGICLHVDLCLGGFVLPFARKLGYPIPPFDFSVKGVTSISTDVHKYGLAPKGTSTVLYRNHEIRKHQFVAVTEWTGGLYISPTMAGSRPGGLVAGAWAAMMSLGLNGYLESTGKIMEVSRKIQKGIDDISGLFVIGKPDMTVVAFGSDAVDIFEVNDIMSSKGWHLNALQRPNSLHICVTLQHTAIYEEFLKDLEDSVNTVKANPGPISGGMAPIYGAAGKMPDRGTVKELLVEFMDSSC

SEQ ID NO: 12861 - protein, 478 aa, Triticum aestivum
  misc_feature (1)..(478): Ceres Seq. ID no. 14307918
MAAVKLVPGVSGYIAAEKSKVVEQLQSGSASSKKNLRTELPAVGDPDGVIDELQALKDKDVRWQGKCSGTVYIAGSESEGHFSLINKAYSMFSHTNPLHQDVFKSVAQLEAEVVAMTAALLGSKEKASGGQICGNMTSGGTESILLAVKTSRDYMQSKKGITKPEIIIAESAHSAYDKAAQYFNIKVRRVPVNKEFLADVKGFKRCINGNTIMMVGSAPGFPHGLIDPIEELGELASQYGICLHVDLCLGGFVLPFARKLGYPIPPFDFSVKGVTSISTDVHKYGLAPKGTSTVLYRNHEIRKHQFVAVTEWTGGLYISPTMAGSRPGGLVAGAWAAMMSLGLNGYLESTGKIMEVSRKIQKGIDDISGLFVIGKPDMTVVAFGSDAVDIFEVNDIMSSKGWHLNALQRPNSLHICVTLQHTAIYEEFLKDLEDSVNTVKANPGPISGGMAPIYGAAGKMPDRGTVKELLVEFMDSSC

SEQ ID NO: 12862 - protein, 388 aa, Triticum aestivum
  misc_feature (1)..(388): Ceres Seq. ID no. 14307919
MFSHTNPLHQDVFKSVAQLEAEVVAMTAALLGSKEKASGGQICGNMTSGGTESILLAVKTSRDYMQSKKGITKPEIIIAESAHSAYDKAAQYFNIKVRRVPVNKEFLADVKGFKRCINGNTIMMVGSAPGFPHGLIDPIEELGELASQYGICLHVDLCLGGFVLPFARKLGYPIPPFDFSVKGVTSISTDVHKYGLAPKGTSTVLYRNHEIRKHQFVAVTEWTGGLYISPTMAGSRPGGLVAGAWAAMMSLGLNGYLESTGKIMEVSRKIQKGIDDISGLFVIGKPDMTVVAFGSDAVDIFEVNDIMSSKGWHLNALQRPNSLHICVTLQHTAIYEEFLKDLEDSVNTVKANPGPISGGMAPIYGAAGKMPDRGTVKELLVEFMDSSC

SEQ ID NO: 12863 - DNA, 1846 bp, Triticum aestivum
  misc_feature (1)..(1846): Ceres Seq. ID no. 14307972
actcaatcattccgagagctgtgctccagaaaaagaaactgcagagggggcgagaagtgcaaaaaaaaaaggagctgcgaagctctgctggcgctcgccgtctccgtcttctccggtctccaccatggcctctttcgccgcccttccgctggccgctctcctggtgctggccgtctcgtgggcatgggagcacctcgtgtggaggccctacgccatagccaggaggcacagggcgcaagggatccatggccccccatacaggttcctcaagggctccaacgaggaggtgaggcggatgaaggcggagacggccgacgtggtgctcgacgtccgcgaccacaactacctccccagggtcgcgccgcacttcctcaagtggagggcacagtatggagagccatttctgttctggtttggtgccaagccccggatctgtgtctttgactacgagttggttaggcagatcctttcaagcaaatccggacactttccgaagaacgacgcgcacccgaacgtgttggaattgctcggcaagggcctggtgttggtgaacggtgtggattgggtgcgccatcgcagggtcatcaaccctgcttttgcaatggataagataaaggcgatgacggaaacgatggtgtcttgtgcccaacgcacgttcagtgtgtttgaagatcaggcatgcaagaacacaaatagagaaatcctagtggaattcgacaaagcagtccaagggttaacagcagatatcatatcccacacagccttcggaagtagctacaaattaggaatggaagccttccatgcccagaaagagctccagtcaatcgccatatccagtttacttaatgtgcagataccaggattcagctatctgcccacaaaaaggaataggaggaagtggatgcttgaaaagaagcttcgaagcacgctcatgcgtgtcataaactcgcggttagcgtcgaaggggagcggatatggaaatgacctacttggtttgatgtttgagggctgcactacgacagtgcaagggggcaagcaggagcagctaagcttgagcatggaggagatcctacacgagtgcaaaacattcttcttcgccggttacgaaacgacatcgcttctgctcacctggacagtgttcttgctcagtgtgtacccagagtggcaggagaggctacgggaggaggtcttgagggaggttggaaagggtaaccccaccggcgacaacctcggcaaactgaaagagatgatgatggtcctccatgaagccctgaggctctacggccctgctcttttcatgcagaggaagaccataactgacatggtggtcggagccataacaatccccaaggaccatgcagttgtcataggcgccccattcatgcaccgggataaaaaggtctggggtgaggatgcggatcagttcaacccgatgagattcgcgaacggggtcgccagagcggcgaaggttccacacgccctgctggcgttctcgatcgggccgagggcgtgcatcggccagaactttgcgatgctcgaagccaaatccgtgatggtgacggttctgcagaagttctcgttcgctctctccccgagctatgtccacgctcctgcggatttcctcactctgcagcctaagtttggcctccccgtcgttatgaagctgctggatatatgaaatggaaccggctggttctgaatgttgcagtacagaacttctgaattttctgcatgtggtgctcatagtgcacgcagtgtatatattcttttccaaattaaggttggaaaagtagtacgattacaagaaaatatattgcatgtggcttgaccacccgtctgtttgcac

SEQ ID NO: 12864 - protein, 558 aa, Triticum aestivum
  misc_feature (1)..(558): Ceres Seq. ID no. 14307973
LNHSESCAPEKETAEGARSAKKKGAAKLCWRSPSPSSPVSTMASFAALPLAALLVLAVSWAWEHLVWRPYAIARRHRAQGIHGPPYRFLKGSNEEVRRMKAETADVVLDVRDHNYLPRVAPHFLKWRAQYGEPFLFWFGAKPRICVFDYELVRQILSSKSGHFPKNDAHPNVLELLGKGLVLVNGVDWVRHRRVINPAFAMDKIKAMTETMVSCAQRTFSVFEDQACKNTNREILVEFDKAVQGLTADIISHTAFGSSYKLGMEAFHAQKELQSIAISSLLNVQIPGFSYLPTKRNRRKWMLEKKLRSTLMRVINSRLASKGSGYGNDLLGLMFEGCTTTVQGGKQEQLSLSMEEILHECKTFFFAGYETTSLLLTWTVFLLSVYPEWQERLREEVLREVGKGNPTGDNLGKLKEMMMVLHEALRLYGPALFMQRKTITDMVVGAITIPKDHAVVIGAPFMHRDKKVWGEDADQFNPMRFANGVARAAKVPHALLAFSIGPRACIGQNFAMLEAKSVMVTVLQKFSFALSPSYVHAPADFLTLQPKFGLPVVMKLLDI

SEQ ID NO: 12865 - protein, 517 aa, Triticum aestivum
  misc_feature (1)..(517): Ceres Seq. ID no. 14307974
MASFAALPLAALLVLAVSWAWEHLVWRPYAIARRHRAQGIHGPPYRFLKGSNEEVRRMKAETADVVLDVRDHNYLPRVAPHFLKWRAQYGEPFLFWFGAKPRICVFDYELVRQILSSKSGHFPKNDAHPNVLELLGKGLVLVNGVDWVRHRRVINPAFAMDKIKAMTETMVSCAQRTFSVFEDQACKNTNREILVEFDKAVQGLTADIISHTAFGSSYKLGMEAFHAQKELQSIAISSLLNVQIPGFSYLPTKRNRRKWMLEKKLRSTLMRVINSRLASKGSGYGNDLLGLMFEGCTTTVQGGKQEQLSLSMEEILHECKTFFFAGYETTSLLLTWTVFLLSVYPEWQERLREEVLREVGKGNPTGDNLGKLKEMMMVLHEALRLYGPALFMQRKTITDMVVGAITIPKDHAVVIGAPFMHRDKKVWGEDADQFNPMRFANGVARAAKVPHALLAFSIGPRACIGQNFAMLEAKSVMVTVLQKFSFALSPSYVHAPADFLTLQPKFGLPVVMKLLDI

SEQ ID NO: 12866 - protein, 460 aa, Triticum aestivum
  misc_feature (1)..(460): Ceres Seq. ID no. 14307975
MKAETADVVLDVRDHNYLPRVAPHFLKWRAQYGEPFLFWFGAKPRICVFDYELVRQILSSKSGHFPKNDAHPNVLELLGKGLVLVNGVDWVRHRRVINPAFAMDKIKAMTETMVSCAQRTFSVFEDQACKNTNREILVEFDKAVQGLTADIISHTAFGSSYKLGMEAFHAQKELQSIAISSLLNVQIPGFSYLPTKRNRRKWMLEKKLRSTLMRVINSRLASKGSGYGNDLLGLMFEGCTTTVQGGKQEQLSLSMEEILHECKTFFFAGYETTSLLLTWTVFLLSVYPEWQERLREEVLREVGKGNPTGDNLGKLKEMMMVLHEALRLYGPALFMQRKTITDMVVGAITIPKDHAVVIGAPFMHRDKKVWGEDADQFNPMRFANGVARAAKVPHALLAFSIGPRACIGQNFAMLEAKSVMVTVLQKFSFALSPSYVHAPADFLTLQPKFGLPVVMKLLDI

SEQ ID NO: 12867 - DNA, 1820 bp, Triticum aestivum
  misc_feature (1)..(1820): Ceres Seq. ID no. 14307991
atatctttttcatccacttgtctccaagcaagaaagaggccacggccggataagactcaccaagcttagctaagcaacttcaacaatggagggggcgggaacagcactactgtggagccaggtgggctcgccgctggcatccttcccggcgatgctgttcacggtggcggccatggcggccggcgcattcgcagtgtacttctacgcgccgtcatggcgcctgcgcagtgtgccgggccccctcgcttacggcctcgtcggccacctgccgctgctggacaagcatggctcccaggcgttcggcgtcctcgcaaagaaatacgggcccatctacaggttctacatgggcaggcagccgctggtggtggtcgccgacccggagctgtgcagggaggccggcatcaagaagttcaagagcatcgtcgacaggagcgtgccggtcaccatcgctagctcgcccatccactacaagagcctcctcttcaccaagggctcgacatggcaggcgatgcggaacgtgatcatctccatctaccagccatcgcacctggcgagcctcatcccggccatccagccctacatcgagcaggcgggcaacctgttctgccccggcgaggagatcaccttctctgacatctccatcaggctcttcaccgacgtcatcggccaggccgcctttggcgtcgacttcgggctcaccaaggacgccgccgacgacgccgagaagatcatccacgacgcgccccgcgacttcatccagaagcacctgtacgccaccacgtccctcaagatggacctgtcgggctcgctgtccatgctcgtcggcacgttcctgccggcgctccagaagccgctgcggcagctgatgctgcgcgtgccgggctccatggaccggcggatggacgagaccaacacggcgctcagcggcgagctcgacaccatcgtggcggagcgggcggctcaggcggaccggggccagaagaacttcctctccgtgctgctcaacggcatcgacaccagcgacgccatgaggaagctcttcacgccggactacgtcagcgcgctcacgtacgagcacttgctcgcgggctccggcaccatgtccttcacgctgtcgagcctggtgtacctcgtgtcggcgcacccggaggtggaggggaagctgctccaggagatcgacgcgttcgggcccaaggacgtggtgcccgacgccgacgacctccgcaccaagttcccctacctggagcaggtcgtcaaggagaccatgcgatactttcccggctccccggtggtctcgagggaggcgaccgccgacgtcgagatcggaggctatttcctgcccaaggggacgtgggtgtggctggcgacggcggtgctggggagggacccggagcagttcccggagcccgaagcgttccggccggagcgcttcgacccggagagcgagcagtgcaagcggagacacccctacgcgtacatccccttcggcatcggcccgcgggcgtgcccggggcagaagttcgcgttccagcagctcaagctcaccgtcatccacctctaccgccgctacgtcttcaggcactcgaccagcatggagtccccactgcagctgcagttctccatcgtcaccaacttcaagaacggtgtcaagctccaggtcgttcaaaggaagaactaatatgagtgtatgacagtaagtttgtgaccgactatttatgtactagtagcagtacatgcttgctccgttcaacgtgtgcgaaatcacatttttgaaagtgtgtaatcgatttgttcaattcaataaaagttgcggttttgac

SEQ ID NO: 12868 - protein, 530 aa, Triticum aestivum
  misc_feature (1)..(530): Ceres Seq. ID no. 14307992
MEGAGTALLWSQVGSPLASFPAMLFTVAAMAAGAFAVYFYAPSWRLRSVPGPLAYGLVGHLPLLDKHGSQAFGVLAKKYGPIYRFYMGRQPLVVVADPELCREAGIKKFKSIVDRSVPVTIASSPIHYKSLLFTKGSTWQAMRNVIISIYQPSHLASLIPAIQPYIEQAGNLFCPGEEITFSDISIRLFTDVIGQAAFGVDFGLTKDAADDAEKIIHDAPRDFIQKHLYATTSLKMDLSGSLSMLVGTFLPALQKPLRQLMLRVPGSMDRRMDETNTALSGELDTIVAERAAQADRGQKNFLSVLLNGIDTSDAMRKLFTPDYVSALTYEHLLAGSGTMSFTLSSLVYLVSAHPEVEGKLLQEIDAFGPKDVVPDADDLRTKFPYLEQVVKETMRYFPGSPVVSREATADVEIGGYFLPKGTWVWLATAVLGRDPEQFPEPEAFRPERFDPESEQCKRRHPYAYIPFGIGPRACPGQKFAFQQLKLTVIHLYRRYVFRHSTSMESPLQLQFSIVTNFKNGVKLQVVQRKN

SEQ ID NO: 12869 - protein, 508 aa, Triticum aestivum
  misc_feature (1)..(508): Ceres Seq. ID no. 14307993
MLFTVAAMAAGAFAVYFYAPSWRLRSVPGPLAYGLVGHLPLLDKHGSQAFGVLAKKYGPIYRFYMGRQPLVVVADPELCREAGIKKFKSIVDRSVPVTIASSPIHYKSLLFTKGSTWQAMRNVIISIYQPSHLASLIPAIQPYIEQAGNLFCPGEEITFSDISIRLFTDVIGQAAFGVDFGLTKDAADDAEKIIHDAPRDFIQKHLYATTSLKMDLSGSLSMLVGTFLPALQKPLRQLMLRVPGSMDRRMDETNTALSGELDTIVAERAAQADRGQKNFLSVLLNGIDTSDAMRKLFTPDYVSALTYEHLLAGSGTMSFTLSSLVYLVSAHPEVEGKLLQEIDAFGPKDVVPDADDLRTKFPYLEQVVKETMRYFPGSPVVSREATADVEIGGYFLPKGTWVWLATAVLGRDPEQFPEPEAFRPERFDPESEQCKRRHPYAYIPFGIGPRACPGQKFAFQQLKLTVIHLYRRYVFRHSTSMESPLQLQFSIVTNFKNGVKLQVVQRKN

SEQ ID NO: 12870 - protein, 501 aa, Triticum aestivum
  misc_feature (1)..(501): Ceres Seq. ID no. 14307994
MAAGAFAVYFYAPSWRLRSVPGPLAYGLVGHLPLLDKHGSQAFGVLAKKYGPIYRFYMGRQPLVVVADPELCREAGIKKFKSIVDRSVPVTIASSPIHYKSLLFTKGSTWQAMRNVIISIYQPSHLASLIPAIQPYIEQAGNLFCPGEEITFSDISIRLFTDVIGQAAFGVDFGLTKDAADDAEKIIHDAPRDFIQKHLYATTSLKMDLSGSLSMLVGTFLPALQKPLRQLMLRVPGSMDRRMDETNTALSGELDTIVAERAAQADRGQKNFLSVLLNGIDTSDAMRKLFTPDYVSALTYEHLLAGSGTMSFTLSSLVYLVSAHPEVEGKLLQEIDAFGPKDVVPDADDLRTKFPYLEQVVKETMRYFPGSPVVSREATADVEIGGYFLPKGTWVWLATAVLGRDPEQFPEPEAFRPERFDPESEQCKRRHPYAYIPFGIGPRACPGQKFAFQQLKLTVIHLYRRYVFRHSTSMESPLQLQFSIVTNFKNGVKLQVVQRKN

SEQ ID NO: 12871 - DNA, 1695 bp, Triticum aestivum
  misc_feature (1)..(1695): Ceres Seq. ID no. 14308003
acacccaaaataagatcacatttttttgctcttcccttctccaattcaaggagccggggcagccatggacgccgccacgggcacgggcatggaggagctgtcatggtgcgcgcggtgcgtcggcctggcattccttgtcttctccgtgtgcgtggtggcgctcggcgcggcgctcttcctcgcccgccggtggccgtggtgcagctgccacgtctgccgttcgtacctcacgggatcgtgggcgcgggacttcaccaacctcggcgactggtacgcacacctgctccgctgctccccgaccggcaccgtggccgtccacgtcctcggctgtaccatcaccgccaacccggccaacgtcgagcacatgctccacacccgcttcgacaacttccccaaagggaagcccttcgccgccgtcctcggcgacctcctcggcggcggcatcttcaacgtcgacggcgacgcctggcgccaccagcgcaagatggccagcctcgagctcggcagcgtcgcggtgcgctcctacgcgtacggcatcgtcgccgaggaagtggaggcgcgcctcctgccactgctcgccgacgccgccgacaatggcagggtggtcgacctgcaggacgtgttccggcgtttcgctttcgacaccatctgcaagatctccttcggactagaccccggctgcctcgagctcgacatgcccatgtccaagctcgccgccgcgttcgacaccgcctcgcggctatccgccatgcgcggcgcggcggcgtcgcccctggtgtggagggcaaagcggctgctgaacttcggctccgagagggagctcaggaagtccatccacctcgtcgacgagctcgcggcggccatgataaggcagcgccggaagctgggcgtcgccgggagccacgacctcctgtcccggttcatggcctcggaggcgcacggcaccgccgtcgacgacaagtacctccgcgacatcgtggtcagcttcctcctcgccggacgggacacggtgtcctccgcgctcaccaccatcttcatgctgctctccaagaaccccgctgtggcggccgccatgcgctcggaggccgccgccggcgagaagacaaggacatcgtcgaagaccacgtacgagcacctcaagtccctccactacacccacgcggtgctgcacgagaacatgcggctgttcccgcctgtgcagttcgactccaagttctgcgccgccgatgacgtgctcccggacggcacgtacgtgaccgccggggctcgtgtgatgtaccacccctacgccatggggcgcatgccccgcatttggggcgacgactgcgagaagttccgaccggagcggtggctgacgggccccggggggacgttcgtgccggagagcctgtacaggtacccggtgttccaggccgggctccgcgtgtgcctcggcaaggagctcgccgtgatggagatgaaggcggtgaccgtggccgtggtgaagcagttcgacgtggaggtggttgggcaaaagggcgccgtgcccaggttcgcgccgggtctgacggcgtccatcagcggcgggctcccggtgagggtcaggcgcatctagagacatgttgagtactgtagtagctagacactgtttctgtactgtacatagggatattataagagaagaaattaatgagaagggaagttgtttgtggcgac

SEQ ID NO: 12872 - protein, 509 aa, Triticum aestivum
  misc_feature (1)..(509): Ceres Seq. ID no. 14308004
MDAATGTGMEELSWCARCVGLAFLVFSVCVVALGAALFLARRWPWCSCHVCRSYLTGSWARDFTNLGDWYAHLLRCSPTGTVAVHVLGCTITANPANVEHMLHTRFDNFPKGKPFAAVLGDLLGGGIFNVDGDAWRHQRKMASLELGSVAVRSYAYGIVAEEVEARLLPLLADAADNGRVVDLQDVFRRFAFDTICKISFGLDPGCLELDMPMSKLAAAFDTASRLSAMRGAAASPLVWRAKRLLNFGSERELRKSIHLVDELAAAMIRQRRKLGVAGSHDLLSRFMASEAHGTAVDDKYLRDIVVSFLLAGRDTVSSALTTIFMLLSKNPAVAAAMRSEAAAGEKTRTSSKTTYEHLKSLHYTHAVLHENMRLFPPVQFDSKFCAADDVLPDGTYVTAGARVMYHPYAMGRMPRIWGDDCEKFRPERWLTGPGGTFVPESLYRYPVFQAGLRVCLGKELAVMEMKAVTVAVVKQFDVEVVGQKGAVPRFAPGLTASISGGLPVRVRRI

SEQ ID NO: 12873 - protein, 501 aa, Triticum aestivum
  misc_feature (1)..(501): Ceres Seq. ID no. 14308005
MEELSWCARCVGLAFLVFSVCVVALGAALFLARRWPWCSCHVCRSYLTGSWARDFTNLGDWYAHLLRCSPTGTVAVHVLGCTITANPANVEHMLHTRFDNFPKGKPFAAVLGDLLGGGIFNVDGDAWRHQRKMASLELGSVAVRSYAYGIVAEEVEARLLPLLADAADNGRVVDLQDVFRRFAFDTICKISFGLDPGCLELDMPMSKLAAAFDTASRLSAMRGAAASPLVWRAKRLLNFGSERELRKSIHLVDELAAAMIRQRRKLGVAGSHDLLSRFMASEAHGTAVDDKYLRDIVVSFLLAGRDTVSSALTTIFMLLSKNPAVAAAMRSEAAAGEKTRTSSKTTYEHLKSLHYTHAVLHENMRLFPPVQFDSKFCAADDVLPDGTYVTAGARVMYHPYAMGRMPRIWGDDCEKFRPERWLTGPGGTFVPESLYRYPVFQAGLRVCLGKELAVMEMKAVTVAVVKQFDVEVVGQKGAVPRFAPGLTASISGGLPVRVRRI

SEQ ID NO: 12874 - protein, 409 aa, Triticum aestivum
  misc_feature (1)..(409): Ceres Seq. ID no. 14308006
MLHTRFDNFPKGKPFAAVLGDLLGGGIFNVDGDAWRHQRKMASLELGSVAVRSYAYGIVAEEVEARLLPLLADAADNGRVVDLQDVFRRFAFDTICKISFGLDPGCLELDMPMSKLAAAFDTASRLSAMRGAAASPLVWRAKRLLNFGSERELRKSIHLVDELAAAMIRQRRKLGVAGSHDLLSRFMASEAHGTAVDDKYLRDIVVSFLLAGRDTVSSALTTIFMLLSKNPAVAAAMRSEAAAGEKTRTSSKTTYEHLKSLHYTHAVLHENMRLFPPVQFDSKFCAADDVLPDGTYVTAGARVMYHPYAMGRMPRIWGDDCEKFRPERWLTGPGGTFVPESLYRYPVFQAGLRVCLGKELAVMEMKAVTVAVVKQFDVEVVGQKGAVPRFAPGLTASISGGLPVRVRRI

SEQ ID NO: 12875 - DNA, 1883 bp, Triticum aestivum
  misc_feature (1)..(1883): Ceres Seq. ID no. 14308007
ataaccataaaccatctcatatctcaggctctcgacttagcagcagagaaagccaagcacagaattaaccacaaatcatggagatggagctcaatctcgtctcgtacgtgtccatcgccctgttcgtcctctcgggcgcgtacgtctaccacgcgacgcggagccggtcgccgaggcagcggctcccgccggcgccgccggggtggcccgtgatcggccacctccacctgctgacggacatgccccaccacgcgctggcggagctggccaagaccatgcgcgccccactgctccggctccggctcgggagcgtcccggccctggtgatctccaagcccgacctggcccgcgccgcgctcaccagcaacgacgcggccatggcgtcccgcccccacctcctctccggccagttcctctcgttcgggtgctccgacgtgaccttcgcccccgcggggccgtaccaccgcatggcgcggcgggtggtcgtctccgagctcctctcggcgcgccgcgtcgccacctacggcagcgtccggggcaaggagctccgccgcctgctcgcgcacctcaccaagaacaccaagccgggaacgcccgtcgacctcagcgagtgcttcctcaacctcgccaacgacgtgctctgccgcgtggccttcggccgccggttcccgcacggcaaggacgacaagctcgccgcggtgctcgccgaggcccaggacctgttcgccgggttcaccatcggggacttcttcccggagctcgagcccttcgccagcaccgtcacgggcctccgccgccggctgaagagctgcctcgccgacctccgcgaggtctgcgacgacatcgtcgaggagcacgtgagcggcaagcaccagcgcctccccggcgaccgcgacgaggacttcgtggacgtgctcctccgcgtccagaagtcgcccgacctcgaggtcccgctcaccgacgacaacctcaaagccctcgtcctggacatgttcgtcgccggcacggacacgacgttcgcgacgctggagtgggtgatgacggagctggtgcgccacccgcgcatccttcaaaaggcgcaggaggaggtccggcgggtggtgggcgccaagggccgggtggaggagtcggacctggcggagctccactacatgcgcgccatcatcaaggagaccttccggctgcacccggcggtgccgctgctcgtgccgcgggagaccgtcgcggcgtgcactctcggcggctacgacatcccggccaagacccgcgtcttcatcaacaccttcgccatgggccgggacccggagatctgggaggagccgctggagtactcgccggagcggttcgaggtggccggcgccggcggcgagatcgacctcaaggacccggactacaagctgctgccgttcggcggcgggcggagggggtgcccggggtacacgttcgcgctggccaccgtgcaggtatcgctggccagcctgctgtaccacttcgagtgggcgctgccggccggcgtgcgcgccgaggacgtgagcgtggaggagaccttcgggctggccaccaggaagaaggagccgctcttcgtcgccgtcagcaagagcgatgtgtaccagttcaagggggaggagctcaacgaggtttaaattatttttgcttagtaatttcttgtcatgcaagtaggttttttctcttctcttcagacaatgcaaataagagagtaggtagctaggtaaaaaaacaaaagcaaggaagagagagaataggtaaaataaaaatggatctagtaccgcacgtgttggtgcctgacttgctgtggtaagagacgtgtatgtgtgtaattttgttgtggtaattcttctaaaaaaatgcaatattttgtagtc

SEQ ID NO: 12876 - protein, 521 aa, Triticum aestivum
  misc_feature (1)..(521): Ceres Seq. ID no. 14308008
MEMELNLVSYVSIALFVLSGAYVYHATRSRSPRQRLPPAPPGWPVIGHLHLLTDMPHHALAELAKTMRAPLLRLRLGSVPALVISKPDLARAALTSNDAAMASRPHLLSGQFLSFGCSDVTFAPAGPYHRMARRVVVSELLSARRVATYGSVRGKELRRLLAHLTKNTKPGTPVDLSECFLNLANDVLCRVAFGRRFPHGKDDKLAAVLAEAQDLFAGFTIGDFFPELEPFASTVTGLRRRLKSCLADLREVCDDIVEEHVSGKHQRLPGDRDEDFVDVLLRVQKSPDLEVPLTDDNLKALVLDMFVAGTDTTFATLEWVMTELVRHPRILQKAQEEVRRVVGAKGRVEESDLAELHYMRAIIKETFRLHPAVPLLVPRETVAACTLGGYDIPAKTRVFINTFAMGRDPEIWEEPLEYSPERFEVAGAGGEIDLKDPDYKLLPFGGGRRGCPGYTFALATVQVSLASLLYHFEWALPAGVRAEDVSVEETFGLATRKKEPLFVAVSKSDVYQFKGEELNEV

SEQ ID NO: 12877 - protein, 519 aa, Triticum aestivum
  misc_feature (1)..(519): Ceres Seq. ID no. 14308009
MELNLVSYVSIALFVLSGAYVYHATRSRSPRQRLPPAPPGWPVIGHLHLLTDMPHHALAELAKTMRAPLLRLRLGSVPALVISKPDLARAALTSNDAAMASRPHLLSGQFLSFGCSDVTFAPAGPYHRMARRVVVSELLSARRVATYGSVRGKELRRLLAHLTKNTKPGTPVDLSECFLNLANDVLCRVAFGRRFPHGKDDKLAAVLAEAQDLFAGFTIGDFFPELEPFASTVTGLRRRLKSCLADLREVCDDIVEEHVSGKHQRLPGDRDEDFVDVLLRVQKSPDLEVPLTDDNLKALVLDMFVAGTDTTFATLEWVMTELVRHPRILQKAQEEVRRVVGAKGRVEESDLAELHYMRAIIKETFRLHPAVPLLVPRETVAACTLGGYDIPAKTRVFINTFAMGRDPEIWEEPLEYSPERFEVAGAGGEIDLKDPDYKLLPFGGGRRGCPGYTFALATVQVSLASLLYHFEWALPAGVRAEDVSVEETFGLATRKKEPLFVAVSKSDVYQFKGEELNEV

SEQ ID NO: 12878 - protein, 467 aa, Triticum aestivum
  misc_feature (1)..(467): Ceres Seq. ID no. 14308010
MPHHALAELAKTMRAPLLRLRLGSVPALVISKPDLARAALTSNDAAMASRPHLLSGQFLSFGCSDVTFAPAGPYHRMARRVVVSELLSARRVATYGSVRGKELRRLLAHLTKNTKPGTPVDLSECFLNLANDVLCRVAFGRRFPHGKDDKLAAVLAEAQDLFAGFTIGDFFPELEPFASTVTGLRRRLKSCLADLREVCDDIVEEHVSGKHQRLPGDRDEDFVDVLLRVQKSPDLEVPLTDDNLKALVLDMFVAGTDTTFATLEWVMTELVRHPRILQKAQEEVRRVVGAKGRVEESDLAELHYMRAIIKETFRLHPAVPLLVPRETVAACTLGGYDIPAKTRVFINTFAMGRDPEIWEEPLEYSPERFEVAGAGGEIDLKDPDYKLLPFGGGRRGCPGYTFALATVQVSLASLLYHFEWALPAGVRAEDVSVEETFGLATRKKEPLFVAVSKSDVYQFKGEELNEV

SEQ ID NO: 12879 - DNA, 1632 bp, Triticum aestivum
  misc_feature (1)..(1632): Ceres Seq. ID no. 14308049
atccaatcgccagcctccttgtattcatgcgttggtgcaacttctttcttagcttcgtacgttcagctagctcagtatgaagatcacagtgcggtcatccaagtccatcaagcctgactatggcagcggccacctgatggctccggccacggccaacgtcgtcccgctcacagtgttcgacaaagccaacttcgacatgcacgtctctgtcatctacaccttccacccaccagccccgtcccatgacgtcctcgaggccgggctcgccaaggccctcgccgactaccgcgagtgggccggccgtctcaccctggacgccaacggcaagcgctgcgccatcctactcaacgacgccggtgcgcgattcgtcgaagcgacggccggcgtggcgctcgacagcgtcatgcctctgcagcccactcccgaggtgctgagcctgcacccgaccggcggtggcgacgagctgctgttgatccaggccacgaggttcgcatgcgggtccctcgtcgttggcctgactgggcaccacatggtcaccgacggtggcggctggtgcaacctcatcatcgcgtggggtcaggccacgcgaggcgcctccattgaccctgtcccagtgcacgatcggccgtccttcttcctgccgcgcaacccgcttaagatagagtacgagcaccacagcatcgagttcaagccatacgacgaccgcaatagtacggccggcggcggcgacgacgaggtggtggtagagagggtccacttcagtatggaccacatcgcaaaactgaagtcgcaggcgtcagctgtggccggcacgggccggccgtacagcaccgtgcagtgcgtggtggcgcacctgtggcggtgcatgacgctggcgcgcggcctcgatgggcgtgacgtcaccggtctgttcatcgcagtggacgggcgagcgcggatgagccagcgggtgccggacgggtacaccggcaacgtggtgctctgggcgcggcctacagccaccgcgggggaggtcgtgaacaggccgctgcaccacctggcggagctcatcagcggggcggttgcccggattgacgacgcctacttcaagtctttcatcgacttcgcctgctccggggccgtggaggaggaggggctggtgccgactgctgacccggcggtgacggtgcttagccccaacgtcgaggtggacagctggctgcggatcccgttctatgatctggatctgggcagcggccggcccttcttcttcatgcccagctacctgccagtggagggaggggtcatcctcgtgccttccttctatggcgatgggagcgtggatgcctacgtgccccttttcagccgccacatggacgccttcaagaactgctgcacatccggcctccccaaactctgatttttatcccgggattgtaactctcagtcagtcaatgcggtagccgtctgatctggtgcgatatgattcgtaccatcttctggcgttgtattgctttggtggtcttctgaatggccttctatttgtgcctttgtatgcacaaggagatgcattgtgtgcgtgagtgttttgaaatttgtatttcgctttagctacaggtcagtcgcctgaaaaattaagttagggtcactatc

SEQ ID NO: 12880 - protein, 440 aa, Triticum aestivum
  misc_feature (1)..(440): Ceres Seq. ID no. 14308050
MKITVRSSKSIKPDYGSGHLMAPATANVVPLTVFDKANFDMHVSVIYTFHPPAPSHDVLEAGLAKALADYREWAGRLTLDANGKRCAILLNDAGARFVEATAGVALDSVMPLQPTPEVLSLHPTGGGDELLLIQATRFACGSLVVGLTGHHMVTDGGGWCNLIIAWGQATRGASIDPVPVHDRPSFFLPRNPLKIEYEHHSIEFKPYDDRNSTAGGGDDEVVVERVHFSMDHIAKLKSQASAVAGTGRPYSTVQCVVAHLWRCMTLARGLDGRDVTGLFIAVDGRARMSQRVPDGYTGNVVLWARPTATAGEVVNRPLHHLAELISGAVARIDDAYFKSFIDFACSGAVEEEGLVPTADPAVTVLSPNVEVDSWLRIPFYDLDLGSGRPFFFMPSYLPVEGGVILVPSFYGDGSVDAYVPLFSRHMDAFKNCCTSGLPKL

SEQ ID NO: 12881 - protein, 420 aa, Triticum aestivum
  misc_feature (1)..(420): Ceres Seq. ID no. 14308051
MAPATANVVPLTVFDKANFDMHVSVIYTFHPPAPSHDVLEAGLAKALADYREWAGRLTLDANGKRCAILLNDAGARFVEATAGVALDSVMPLQPTPEVLSLHPTGGGDELLLIQATRFACGSLVVGLTGHHMVTDGGGWCNLIIAWGQATRGASIDPVPVHDRPSFFLPRNPLKIEYEHHSIEFKPYDDRNSTAGGGDDEVVVERVHFSMDHIAKLKSQASAVAGTGRPYSTVQCVVAHLWRCMTLARGLDGRDVTGLFIAVDGRARMSQRVPDGYTGNVVLWARPTATAGEVVNRPLHHLAELISGAVARIDDAYFKSFIDFACSGAVEEEGLVPTADPAVTVLSPNVEVDSWLRIPFYDLDLGSGRPFFFMPSYLPVEGGVILVPSFYGDGSVDAYVPLFSRHMDAFKNCCTSGLPKL

SEQ ID NO: 12882 - protein, 400 aa, Triticum aestivum
  misc_feature (1)..(400): Ceres Seq. ID no. 14308052
MHVSVIYTFHPPAPSHDVLEAGLAKALADYREWAGRLTLDANGKRCAILLNDAGARFVEATAGVALDSVMPLQPTPEVLSLHPTGGGDELLLIQATRFACGSLVVGLTGHHMVTDGGGWCNLIIAWGQATRGASIDPVPVHDRPSFFLPRNPLKIEYEHHSIEFKPYDDRNSTAGGGDDEVVVERVHFSMDHIAKLKSQASAVAGTGRPYSTVQCVVAHLWRCMTLARGLDGRDVTGLFIAVDGRARMSQRVPDGYTGNVVLWARPTATAGEVVNRPLHHLAELISGAVARIDDAYFKSFIDFACSGAVEEEGLVPTADPAVTVLSPNVEVDSWLRIPFYDLDLGSGRPFFFMPSYLPVEGGVILVPSFYGDGSVDAYVPLFSRHMDAFKNCCTSGLPKL

SEQ ID NO: 12883 - DNA, 1838 bp, Triticum aestivum
  misc_feature (1)..(1838): Ceres Seq. ID no. 14313216
atgcggagctccatggcctgctggtcgccaaccatggcgccgctggcaatgctgctcgtctctgctctattcttcgtcacctcccatgcttcccttcctatccctatccaagctgccgccgacgacttcctccggtgcatgtcggcgtccgtcccaggcaaccttctctttccccgcagctcgccgtcgttcgcgtcggtccttgcgtcctccgtccggaacccgcggttcctcgggccggccgtggtgcgtccgctctgcatcgtcacggcgaccaacgcgtcccacgtccaggccgccgtcgtgtgcggccgccggcacggcgtgcgcctccgcgtgcgcagcggcgggcacgactacgagggcctctcgttccggtccgcgcgccaggaggacttcgccgtcgtggacctcgccgccctccgctccgtgcgcgtcaccgtgcgggagccggccgaggcgtgggtggagtccggcgccacgctcggggagctgtaccacgccatcgggagggcgaccgaccggcacgcgttcccggggggcctctgcccgacggtgggcgtcgggggccacctgagcggcggcggcttcggcatgctgctgcgcaagtacggcctcgcctccgaccacgtcatcaacgccgtgatggtggacgcggaggggcggctgctggacaagcaggccatggggcgcgacgtgttctgggccatccgcggcggcggcggcgggagcttcgggatcgtgctgtcgtggaaggtgaggctggtggccgtgccgccgagggtgacggtgttcaccgtcgtgaagacggcccgggagggcgcggcggacctcctcgccaagtggcaggaggtcgcccctgctctccccgacgacctgctggtgagggtggtcgtccagggggacaaggcgaggttccaggccctgtacctgggcgcccgcgacgcgctgctgccggtgatgggcagccggttcccggagctgggagtgaacccgacgcactgcaaggagatgtcgtggatccagtcggtgccctacatctacatcggcgaggcagccagcgtggacgacatcctgaaccggaccgtcgcgagggactcctccccgagcaagtcgacgtccgactacgtgcggcgggccatcccgagggacgtgtgggcgcggatcttctccgactggctggcgaggcgggacgcggggctgatgatcctggacccctacggcgggagcatcgcgggcgtggcggagtcggcgacgcccttctcgcaccgggccggcgtgctgtacaacgtgcagtacatgaacttctggggcgtgggcggcgacggcgcggcaaacacgaggtggatcagggacatgtacgcgttcatggagccgcacgtgagcaagaacccgcgggaggcgtacgtgaactacagggacctggacctcgggcagaacgtggtgggcgccggcgacgtctcgagcttcgaggccggtagggtgtggggggagaagtactactccaaggccaacttccggaggctcgccatggccaaggggcagatcgatccccgcgactacttcaggagcgagcagagcatcccgccgcttgttggctcgcagctggagctgacctccgccaggaacgcgccgcacgttgatggcgtgaatcctccgggttggtgggcagtggggtgtgggacaggcagtccgtgttcagtccttagctctgtcttggctaaactgatgcctagtttcttttagacatagctcattctgttttaccacgtagtacttgttggtcttattgtcaatggtgtttgctagcggaaataaagtctgaaattatggttaag

SEQ ID NO: 12884 - protein, 581 aa, Triticum aestivum
  misc_feature (1)..(581): Ceres Seq. ID no. 14313217
MRSSMACWSPTMAPLAMLLVSALFFVTSHASLPIPIQAAADDFLRCMSASVPGNLLFPRSSPSFASVLASSVRNPRFLGPAVVRPLCIVTATNASHVQAAVVCGRRHGVRLRVRSGGHDYEGLSFRSARQEDFAVVDLAALRSVRVTVREPAEAWVESGATLGELYHAIGRATDRHAFPGGLCPTVGVGGHLSGGGFGMLLRKYGLASDHVINAVMVDAEGRLLDKQAMGRDVFWAIRGGGGGSFGIVLSWKVRLVAVPPRVTVFTVVKTAREGAADLLAKWQEVAPALPDDLLVRVVVQGDKARFQALYLGARDALLPVMGSRFPELGVNPTHCKEMSWIQSVPYIYIGEAASVDDILNRTVARDSSPSKSTSDYVRRAIPRDVWARIFSDWLARRDAGLMILDPYGGSIAGVAESATPFSHRAGVLYNVQYMNFWGVGGDGAANTRWIRDMYAFMEPHVSKNPREAYVNYRDLDLGQNVVGAGDVSSFEAGRVWGEKYYSKANFRRLAMAKGQIDPRDYFRSEQSIPPLVGSQLELTSARNAPHVDGVNPPGWWAVGCGTGSPCSVLSSVLAKLMPSFF

SEQ ID NO: 12885 - protein, 577 aa, Triticum aestivum
  misc_feature (1)..(577): Ceres Seq. ID no. 14313218
MACWSPTMAPLAMLLVSALFFVTSHASLPIPIQAAADDFLRCMSASVPGNLLFPRSSPSFASVLASSVRNPRFLGPAVVRPLCIVTATNASHVQAAVVCGRRHGVRLRVRSGGHDYEGLSFRSARQEDFAVVDLAALRSVRVTVREPAEAWVESGATLGELYHAIGRATDRHAFPGGLCPTVGVGGHLSGGGFGMLLRKYGLASDHVINAVMVDAEGRLLDKQAMGRDVFWAIRGGGGGSFGIVLSWKVRLVAVPPRVTVFTVVKTAREGAADLLAKWQEVAPALPDDLLVRVVVQGDKARFQALYLGARDALLPVMGSRFPELGVNPTHCKEMSWIQSVPYIYIGEAASVDDILNRTVARDSSPSKSTSDYVRRAIPRDVWARIFSDWLARRDAGLMILDPYGGSIAGVAESATPFSHRAGVLYNVQYMNFWGVGGDGAANTRWIRDMYAFMEPHVSKNPREAYVNYRDLDLGQNVVGAGDVSSFEAGRVWGEKYYSKANFRRLAMAKGQIDPRDYFRSEQSIPPLVGSQLELTSARNAPHVDGVNPPGWWAVGCGTGSPCSVLSSVLAKLMPSFF

SEQ ID NO: 12886 - protein, 570 aa, Triticum aestivum
  misc_feature (1)..(570): Ceres Seq. ID no. 14313219
MAPLAMLLVSALFFVTSHASLPIPIQAAADDFLRCMSASVPGNLLFPRSSPSFASVLASSVRNPRFLGPAVVRPLCIVTATNASHVQAAVVCGRRHGVRLRVRSGGHDYEGLSFRSARQEDFAVVDLAALRSVRVTVREPAEAWVESGATLGELYHAIGRATDRHAFPGGLCPTVGVGGHLSGGGFGMLLRKYGLASDHVINAVMVDAEGRLLDKQAMGRDVFWAIRGGGGGSFGIVLSWKVRLVAVPPRVTVFTVVKTAREGAADLLAKWQEVAPALPDDLLVRVVVQGDKARFQALYLGARDALLPVMGSRFPELGVNPTHCKEMSWIQSVPYIYIGEAASVDDILNRTVARDSSPSKSTSDYVRRAIPRDVWARIFSDWLARRDAGLMILDPYGGSIAGVAESATPFSHRAGVLYNVQYMNFWGVGGDGAANTRWIRDMYAFMEPHVSKNPREAYVNYRDLDLGQNVVGAGDVSSFEAGRVWGEKYYSKANFRRLAMAKGQIDPRDYFRSEQSIPPLVGSQLELTSARNAPHVDGVNPPGWWAVGCGTGSPCSVLSSVLAKLMPSFF

SEQ ID NO: 12887 - DNA, 1735 bp, Triticum aestivum
  misc_feature (1)..(1735): Ceres Seq. ID no. 14313220
ccggtagttaagcgccccgcgccaccaccactactactagtagcagcggcactcccgctgccatccccactgcccccccgaacccccctccgcgctccgcacattgggtgggaggagctgctccagctcggttgtcggtgccgggtggatcgccctgccgcgccatggacggcgacgcggacgccctgaagtccgggaggcacggggccggggacgtgtgccagatctgcgccgacgggctgggcaccacggtggacggcgaggtcttcaccgcctgcgacgtctgccgcttcccggtctgccgcccctgctacgagcacgagcgcaaggagggcacccaggcctgcctccagtgcaagaccaagtacaagcgccacagagggagccctccgatccgcggggaggaaggcgatgacaccgatgccgatgatggcagtgacttcaactaccctgcatctggcactgaggaccagaagcagaagattgctgataggatgcgcagctggcgcatgaacaccgggggtagtggcaatgttggccaccccaagtatgacagtggcgagatcggcctctccaagtatgacagtggagagatccctaggggatacgtcccttcagtcaccaacagccagatgtcaggagaaatccctggagcttcccctgatcatcatatgatgtcccctacagggaacatcagcagacgtgctccctttccctatgtgaatcattcaccaaatccgtcaagggagttctctggcagtattgggaatgttgcctggaaagagagagtcgatggctggaaaatgaagcaggacaagggtgcaattcccatgactaatgggacaagtattgctccctctgaaggtcgggcagctactgacattgatgcatctactgaatacaacatggaagacgctttactgaatgatgaaactcgccagcctctatctagaaaagtccccattgcttcatccaaaataaatccctacagaatggtcattgttctgcggttggttgttctaagcatcttcctgcactaccgtctcacaaatcctgtgcgtaatgcatacccactgtggcttttatctgttatatgtgagatttggtttgctttatcctggatactggatcagttcccgaagtggtttccaatcaaccgggagacctaccttgatagactggctttaaggtatgaccgagaaggtgaaccgtctcagttggctgctgttgacatatttgtcagtacagtcgaccccttgaaggagccacctatcgtcactgccaacactgtgctatccattcttgctgttgattatcccgtggacaaggtctcttgctatgtatctgatgacggagcttcaatgctgacttttgatgcattggctgagacttcagagtttgctaggaaatgggtaccatttgtgaagaagtatgacattgaacccagagctcctgagttttacttttgccagaaaattgattacctgaaagacaaagtccagccttcatttgttaaagaccgccggaccagagaaggagagcagcggaaggtggaggatgggattgtggagaaggccatcttggtgaaagatttcgcgtgagcttttcttctagcttgatgagaagacatctccctagtatttgttgtttctttgacttgcaatgtataccttgattttaagatcagatgacattatgctaatctctttggtccgggggcaagtttcttggcctc

SEQ ID NO: 12888 - protein, 478 aa, Triticum aestivum
  misc_feature (1)..(478): Ceres Seq. ID no. 14313221
MDGDADALKSGRHGAGDVCQICADGLGTTVDGEVFTACDVCRFPVCRPCYEHERKEGTQACLQCKTKYKRHRGSPPIRGEEGDDTDADDGSDFNYPASGTEDQKQKIADRMRSWRMNTGGSGNVGHPKYDSGEIGLSKYDSGEIPRGYVPSVTNSQMSGEIPGASPDHHMMSPTGNISRRAPFPYVNHSPNPSREFSGSIGNVAWKERVDGWKMKQDKGAIPMTNGTSIAPSEGRAATDIDASTEYNMEDALLNDETRQPLSRKVPIASSKINPYRMVIVLRLVVLSIFLHYRLTNPVRNAYPLWLLSVICEIWFALSWILDQFPKWFPINRETYLDRLALRYDREGEPSQLAAVDIFVSTVDPLKEPPIVTANTVLSILAVDYPVDKVSCYVSDDGASMLTFDALAETSEFARKWVPFVKKYDIEPRAPEFYFCQKIDYLKDKVQPSFVKDRRTREGEQRKVEDGIVEKAILVKDFA

SEQ ID NO: 12889 - protein, 368 aa, Triticum aestivum
  misc_feature (1)..(368): Ceres Seq. ID no. 14313222
MRSWRMNTGGSGNVGHPKYDSGEIGLSKYDSGEIPRGYVPSVTNSQMSGEIPGASPDHHMMSPTGNISRRAPFPYVNHSPNPSREFSGSIGNVAWKERVDGWKMKQDKGAIPMTNGTSIAPSEGRAATDIDASTEYNMEDALLNDETRQPLSRKVPIASSKINPYRMVIVLRLVVLSIFLHYRLTNPVRNAYPLWLLSVICEIWFALSWILDQFPKWFPINRETYLDRLALRYDREGEPSQLAAVDIFVSTVDPLKEPPIVTANTVLSILAVDYPVDKVSCYVSDDGASMLTFDALAETSEFARKWVPFVKKYDIEPRAPEFYFCQKIDYLKDKVQPSFVKDRRTREGEQRKVEDGIVEKAILVKDFA

SEQ ID NO: 12890 - protein, 363 aa, Triticum aestivum
  misc_feature (1)..(363): Ceres Seq. ID no. 14313223
MNTGGSGNVGHPKYDSGEIGLSKYDSGEIPRGYVPSVTNSQMSGEIPGASPDHHMMSPTGNISRRAPFPYVNHSPNPSREFSGSIGNVAWKERVDGWKMKQDKGAIPMTNGTSIAPSEGRAATDIDASTEYNMEDALLNDETRQPLSRKVPIASSKINPYRMVIVLRLVVLSIFLHYRLTNPVRNAYPLWLLSVICEIWFALSWILDQFPKWFPINRETYLDRLALRYDREGEPSQLAAVDIFVSTVDPLKEPPIVTANTVLSILAVDYPVDKVSCYVSDDGASMLTFDALAETSEFARKWVPFVKKYDIEPRAPEFYFCQKIDYLKDKVQPSFVKDRRTREGEQRKVEDGIVEKAILVKDFA

SEQ ID NO: 12891 - DNA, 857 bp, Triticum aestivum
  misc_feature (1)..(857): Ceres Seq. ID no. 14313232
aaaaacgatcagaaaaccacaaccaggagcaacaggaatgggttcctttgctaatggccagaatggttcggagcttggcatccagatgccggccatggggagcagcgcggtgccggagcctcccacaacatctgtagcagcaagatgtccacggctggacatggccatggtggccaccagagctgcagccctcgtgatggcgctgctctcaatgtcgctcatggtctccgccaagcaacggggtagtctcatcatctttggcatcgagattccactgtatgccaaatggtccctctctgattcgctgaaatccttggttgggctatctgcggcagcagctgcctactctctggcacaacttctgtcgattgcgtacaaggccttgaagaaagtccctgtggttccatccaggcgctatgcctggatgctgttagctggtgatcaggtctttgcgtatgcgatgttgagcggggggtcagcagcggcggccgtcgcaaatttgaaccgcaccggcatccggcacacggcgcttcccaacttctgcaagcccttgccacgtttctgcgacctatcagcagcctccatcgcgtgcgcctttctcagctgcgccttccttgccgcatccgctgtaatcgatgttatctggctgtcaaatctgtgagaatgtgagatagatggtggcaaactagtacaccccttggcagggagttcaactttcagggtgctgtgcctttagatgatgtgccgaacctgaacctgtaaagtgtcctgaagtcctgtgagttggctgcttgtacaaattggagcccccttggtgcaatggatggcatcacctggatgttgattgttgatttgct

SEQ ID NO: 12892 - protein, 219 aa, Triticum aestivum
  misc_feature (1)..(219): Ceres Seq. ID no. 14313233
KTIRKPQPGATGMGSFANGQNGSELGIQMPAMGSSAVPEPPTTSVAARCPRLDMAMVATRAAALVMALLSMSLMVSAKQRGSLIIFGIEIPLYAKWSLSDSLKSLVGLSAAAAAYSLAQLLSIAYKALKKVPVVPSRRYAWMLLAGDQVFAYAMLSGGSAAAAVANLNRTGIRHTALPNFCKPLPRFCDLSAASIACAFLSCAFLAASAVIDVIWLSNL

SEQ ID NO: 12893 - protein, 207 aa, Triticum aestivum
  misc_feature (1)..(207): Ceres Seq. ID no. 14313234
MGSFANGQNGSELGIQMPAMGSSAVPEPPTTSVAARCPRLDMAMVATRAAALVMALLSMSLMVSAKQRGSLIIFGIEIPLYAKWSLSDSLKSLVGLSAAAAAYSLAQLLSIAYKALKKVPVVPSRRYAWMLLAGDQVFAYAMLSGGSAAAAVANLNRTGIRHTALPNFCKPLPRFCDLSAASIACAFLSCAFLAASAVIDVIWLSNL

SEQ ID NO: 12894 - protein, 191 aa, Triticum aestivum
  misc_feature (1)..(191): Ceres Seq. ID no. 14313235
MPAMGSSAVPEPPTTSVAARCPRLDMAMVATRAAALVMALLSMSLMVSAKQRGSLIIFGIEIPLYAKWSLSDSLKSLVGLSAAAAAYSLAQLLSIAYKALKKVPVVPSRRYAWMLLAGDQVFAYAMLSGGSAAAAVANLNRTGIRHTALPNFCKPLPRFCDLSAASIACAFLSCAFLAASAVIDVIWLSNL

SEQ ID NO: 12895 - DNA, 772 bp, Triticum aestivum
  misc_feature (1)..(772): Ceres Seq. ID no. 14313260
aacccccgtgaagcatcatccatcttctctccttacgccgccttgcactgcattccagcctccatctccaacagcaacccatggccggcatgaaaaccatcgttctccttgccgtgatctcggccgccgccttgggcaccgcgtcagcggcgacccaccgcgtgggcgagccgggcggcgcgtgggacctcaccaccgattacggcagctgggcgtcctccagggagttccacccgggcgacgagctcatcttcaggcaccagccaggggcgcacaacgtgctcgaggtcagcgaggtcgactacgactcctgcaacgccaccagccccatcaccaccttgggctccggctttttcacctacgtcgcccttccggccgtcggcacccgctacttcatctgcggtttccctggccactgcaccaccaccggcaccggcggcatgaagctcaagatcgacgtcgtgccaggttccccctcgtcgtcgcccgccccggccatgccgccgccctcctccgccgcggcctctgccggggctacaataggatctggccttgtcgtcctgctggcggccggtctcatggcttgaaatgcatgtattcttcattagctgatgatgcccggtgcattcaaccgatgtaaagactgtagcctgtaggtttccccccttctaaaaaaacaaaaaaaaagttgagttgccgcagcagacacataccagcttatactatattgttaactggttattattgttgaatacatacaattaattttttg

SEQ ID NO: 12896 - protein, 212 aa, Triticum aestivum
  misc_feature (1)..(212): Ceres Seq. ID no. 14313261
TPVKHHPSSLLTPPCTAFQPPSPTATHGRHENHRSPCRDLGRRLGHRVSGDPPRGRAGRRVGPHHRLRQLGVLQGVPPGRRAHLQAPARGAQRARGQRGRLRLLQRHQPHHHLGLRLFHLRRPSGRRHPLLHLRFPWPLHHHRHRRHEAQDRRRARFPLVVARPGHAAALLRRGLCRGYNRIWPCRPAGGRSHGLKCMYSSLADDARCIQPM

SEQ ID NO: 12897 - protein, 168 aa, Triticum aestivum
  misc_feature (1)..(168): Ceres Seq. ID no. 14313262
MAGMKTIVLLAVISAAALGTASAATHRVGEPGGAWDLTTDYGSWASSREFHPGDELIFRHQPGAHNVLEVSEVDYDSCNATSPITTLGSGFFTYVALPAVGTRYFICGFPGHCTTTGTGGMKLKIDVVPGSPSSSPAPAMPPPSSAAASAGATIGSGLVVLLAAGLMA

SEQ ID NO: 12898 - protein, 165 aa, Triticum aestivum
  misc_feature (1)..(165): Ceres Seq. ID no. 14313263
MKTIVLLAVISAAALGTASAATHRVGEPGGAWDLTTDYGSWASSREFHPGDELIFRHQPGAHNVLEVSEVDYDSCNATSPITTLGSGFFTYVALPAVGTRYFICGFPGHCTTTGTGGMKLKIDVVPGSPSSSPAPAMPPPSSAAASAGATIGSGLVVLLAAGLMA

SEQ ID NO: 12899 - DNA, 1370 bp, Triticum aestivum
  misc_feature (1)..(1370): Ceres Seq. ID no. 14313268
aaagagagagaaaagcgcacgaaaagaaaacagagagaaatgaaactgccctgctgctgctgaggtcggcctcctggcgatgagcccccgccgccgtcccccgctgctcctcctcgccgccgtcgccgtcgcctgcgcctgcgccgccgcccgcccctgcgcggccctcgtccgcctcggtgccgcctccttcctcgacgcccccgcgcgcttcgggccccgggtgaccggcgacgggatatgcgggtcgctgcgcgccgcggagcccgccgacgcgtgcgcgcccgtccggggcgcccccggcgggagcggcgggatggcgttcgtgctcatcgcgcgcgggaactgcagcttcgagggcaaggtgcgggcggcgcagcgggccggcttcgacgccgcgctcgtccacgacgacgaggacaaggccagcctctactccatggttggcgatcctgagggcatacacatacctgcggtattcgtatccaaaatggctggggaaaccttgaagaagtttgccagaggtgaagatggggaatgctgtataaactcgtcgatggatgagactgcagggacagtgttggtgatgtcgttcgtatcacttgttgtcatcatatcagttgtagcttcatttcttttcgctcggaactgccgacttttacgcaatggagttgataatcgcccaccttacatcaagaagcatgtggtggaaaagcttccttctgtggtatataaagctccctgctcaagtggcaacaattgtgaagaagcctgtgccatttgtttagaagactatgataatggtgacatgcttagacttctcccatgcaaacatgagtttcatgtggagtgtattgatccctggctgacaaagtggggcacattttgcccggtatgcaaacttgaggtactcacaggtggataagcaggcaagctaggagtaagtctcaggtgaataagcaagcctccgttactgcatactcccttcgtccggaaatacttgtagaagaaatgggtaaaaatggatatatgtagaactaaaacacatccagatacatccattcccccgacaagtatttccggatggagggagtatatacaagtagtgctcggcggcatgacggttatatccaggcgtgctgaactggttgatctgttgttggctgggtttgcaagatagatcaatgccgaacattttatcatgaggatggggtatgggctgtgcggtctctgggactgggcccgtcttgatacccagtagaagattgaattgtgtcgttaacattgagatgaactgtttaattgaggtgtagtatgtggaagccatcttgtaattatatgtcagaagttcaattgcttctttcccatgc

SEQ ID NO: 12900 - protein, 281 aa, Triticum aestivum
  misc_feature (1)..(281): Ceres Seq. ID no. 14313269
MSPRRRPPLLLLAAVAVACACAAARPCAALVRLGAASFLDAPARFGPRVTGDGICGSLRAAEPADACAPVRGAPGGSGGMAFVLIARGNCSFEGKVRAAQRAGFDAALVHDDEDKASLYSMVGDPEGIHIPAVFVSKMAGETLKKFARGEDGECCINSSMDETAGTVLVMSFVSLVVIISVVASFLFARNCRLLRNGVDNRPPYIKKHVVEKLPSVVYKAPCSSGNNCEEACAICLEDYDNGDMLRLLPCKHEFHVECIDPWLTKWGTFCPVCKLEVLTGG

SEQ ID NO: 12901 - protein, 202 aa, Triticum aestivum
  misc_feature (1)..(202): Ceres Seq. ID no. 14313270
MAFVLIARGNCSFEGKVRAAQRAGFDAALVHDDEDKASLYSMVGDPEGIHIPAVFVSKMAGETLKKFARGEDGECCINSSMDETAGTVLVMSFVSLVVIISVVASFLFARNCRLLRNGVDNRPPYIKKHVVEKLPSVVYKAPCSSGNNCEEACAICLEDYDNGDMLRLLPCKHEFHVECIDPWLTKWGTFCPVCKLEVLTGG

SEQ ID NO: 12902 - protein, 161 aa, Triticum aestivum
  misc_feature (1)..(161): Ceres Seq. ID no. 14313271
MVGDPEGIHIPAVFVSKMAGETLKKFARGEDGECCINSSMDETAGTVLVMSFVSLVVIISVVASFLFARNCRLLRNGVDNRPPYIKKHVVEKLPSVVYKAPCSSGNNCEEACAICLEDYDNGDMLRLLPCKHEFHVECIDPWLTKWGTFCPVCKLEVLTGG

SEQ ID NO: 12903 - DNA, 2031 bp, Triticum aestivum
  misc_feature (1)..(2031): Ceres Seq. ID no. 14313288
tttgccctgatcataccggtagctggtacacacattcatacatacattcttcttcagcatccactcattgctagctagcttgcgaggcagtgtgtgagctgttagtttgagcgggagaagctgggtggacggagagcacggcgctagctagcttgctggtgcaagatgaggagccgtggtagcttcgctctgaaccatgcggtggcgtttctcgtgtggtggatggtgcattgcggcagtgagctcgttgccgccgtgcctcctgatggttggtacgattacactgcccacacggactgcagaggccgcccggagccggcgcagtacaacggcgggattctcaagtacggcaacggcgacgacccgaacgggtacaagacgacggagactggcgtcctgtccccggcgttcgtggtctacaacctcaacaagtccacaatgtacaccttctcaggctgggtgaagctggaaggctctccctcggctctgatcaccgcgaggctggccccggacaactccggcacacggtgcatcgggacggtcctcgccaggagcgactgctgggcgttcctcaagggtggcttcgtcctcgactggccaactcagacctccgtcatcttcttccagaatgctgataggaccccgatgaagatcaccactgcgagcgcctcgctccagccgttcacgacggatcaatggtcgatgcaccagaaagatacgatccggaagaggaggaagaggatggccaccgtccacgtcgccgacccgcacggcacccgggtggtcggcgcgtcggtgtccgtgcagcagacggctaaggacttcccgcttgggtcggcgatcgcctccaccatcctgggcaacgacgcgtaccagaagtggttcgtggaccggttcaacgcggcggtgttcgaggacgagctcaagtggtactcgacggagccggcgtcggggctgctccggttcgacgtgccggaccagatgctggcgttcgtgcggtcgcaccgggtgatggtgcgcgggcacaacatcttctgggagaaccaggacgccacgccccggtgggtcaagggcctgtcgccggacgacctccgctccgccgtgaacacgcgcatccagagcctcatgacccgctaccgcggcgagttcgcgcactgggacgtcaacaacgagatgctgcacttcaacttctacgagcagcggctgggccccaacgccaccatggagttcttcagcgtggcgcaggacgccgacccgctcgccacgctcttcatgaacgagtacaacgtggtggagacctgcgacgacgtgtcctcgaccgtcgacgcgtacgtggcccgactcaaggacctccgggccggcggcgccgtgctggaggggatcggcctcgagggccacttctccaagcccaacatcccctacatgagggccgtgctcgacaagctggccacgctcaacctgcccatctggttcaccgagatcgacatcaacaacaagttcgacgcgcagacgcaggccgtgtacctggagcaggtgctgcgggaggcgtacgcgcacccggcggtgagcggcgtcatgctctggacggcgctgcacgagaacgggtgctaccagatgtgcctcacggactggaacctcaagaacctgcccgtcggggacgtcgtcgaccgcctgctgcaggagtggcagacggggcaggtcgccgggccgacggacgtgcacggcgcctacagcttcagcggctacctcggcgagtacgtggtcaccgtgaacgccggcaacacgtcgaagcaggccaccttctcgctgtccccaggggacgagaccaggcacatcaccgttcagatatgacactggttgtgtcgtagtatatgtgagtggccggtggcacgctgtactgcccgcacttgttgtttcgggcttctacctgcgatgacacatatcgtcgcttgtgggtagtggttactaaactatatactcgagcaaacgattatgtcttcgaaaaaacaaaacaaatgattatgacatggt

SEQ ID NO: 12904 - protein, 561 aa, Triticum aestivum
  misc_feature (1)..(561): Ceres Seq. ID no. 14313289
MRSRGSFALNHAVAFLVWWMVHCGSELVAAVPPDGWYDYTAHTDCRGRPEPAQYNGGILKYGNGDDPNGYKTTETGVLSPAFVVYNLNKSTMYTFSGWVKLEGSPSALITARLAPDNSGTRCIGTVLARSDCWAFLKGGFVLDWPTQTSVIFFQNADRTPMKITTASASLQPFTTDQWSMHQKDTIRKRRKRMATVHVADPHGTRVVGASVSVQQTAKDFPLGSAIASTILGNDAYQKWFVDRFNAAVFEDELKWYSTEPASGLLRFDVPDQMLAFVRSHRVMVRGHNIFWENQDATPRWVKGLSPDDLRSAVNTRIQSLMTRYRGEFAHWDVNNEMLHFNFYEQRLGPNATMEFFSVAQDADPLATLFMNEYNVVETCDDVSSTVDAYVARLKDLRAGGAVLEGIGLEGHFSKPNIPYMRAVLDKLATLNLPIWFTEIDINNKFDAQTQAVYLEQVLREAYAHPAVSGVMLWTALHENGCYQMCLTDWNLKNLPVGDVVDRLLQEWQTGQVAGPTDVHGAYSFSGYLGEYVVTVNAGNTSKQATFSLSPGDETRHITVQI

SEQ ID NO: 12905 - protein, 542 aa, Triticum aestivum
  misc_feature (1)..(542): Ceres Seq. ID no. 14313290
MVHCGSELVAAVPPDGWYDYTAHTDCRGRPEPAQYNGGILKYGNGDDPNGYKTTETGVLSPAFVVYNLNKSTMYTFSGWVKLEGSPSALITARLAPDNSGTRCIGTVLARSDCWAFLKGGFVLDWPTQTSVIFFQNADRTPMKITTASASLQPFTTDQWSMHQKDTIRKRRKRMATVHVADPHGTRVVGASVSVQQTAKDFPLGSAIASTILGNDAYQKWFVDRFNAAVFEDELKWYSTEPASGLLRFDVPDQMLAFVRSHRVMVRGHNIFWENQDATPRWVKGLSPDDLRSAVNTRIQSLMTRYRGEFAHWDVNNEMLHFNFYEQRLGPNATMEFFSVAQDADPLATLFMNEYNVVETCDDVSSTVDAYVARLKDLRAGGAVLEGIGLEGHFSKPNIPYMRAVLDKLATLNLPIWFTEIDINNKFDAQTQAVYLEQVLREAYAHPAVSGVMLWTALHENGCYQMCLTDWNLKNLPVGDVVDRLLQEWQTGQVAGPTDVHGAYSFSGYLGEYVVTVNAGNTSKQATFSLSPGDETRHITVQI

SEQ ID NO: 12906 - protein, 470 aa, Triticum aestivum
  misc_feature (1)..(470): Ceres Seq. ID no. 14313291
MYTFSGWVKLEGSPSALITARLAPDNSGTRCIGTVLARSDCWAFLKGGFVLDWPTQTSVIFFQNADRTPMKITTASASLQPFTTDQWSMHQKDTIRKRRKRMATVHVADPHGTRVVGASVSVQQTAKDFPLGSAIASTILGNDAYQKWFVDRFNAAVFEDELKWYSTEPASGLLRFDVPDQMLAFVRSHRVMVRGHNIFWENQDATPRWVKGLSPDDLRSAVNTRIQSLMTRYRGEFAHWDVNNEMLHFNFYEQRLGPNATMEFFSVAQDADPLATLFMNEYNVVETCDDVSSTVDAYVARLKDLRAGGAVLEGIGLEGHFSKPNIPYMRAVLDKLATLNLPIWFTEIDINNKFDAQTQAVYLEQVLREAYAHPAVSGVMLWTALHENGCYQMCLTDWNLKNLPVGDVVDRLLQEWQTGQVAGPTDVHGAYSFSGYLGEYVVTVNAGNTSKQATFSLSPGDETRHITVQI

SEQ ID NO: 12907 - DNA, 1552 bp, Triticum aestivum
  misc_feature (1)..(1552): Ceres Seq. ID no. 14313292
agaacccacacacctcctctgtattttctccctctttaaacccacaaatctctgtctgtccttacactcagagagaccatcaaaatggttgcggaggcgaagcagaacggcgtggccaccatggcgggcagcaaggtgcagctgatgtcggtgaagcgcggcgagccgacgctggtgtcgccggcggaggccacgccgacgggggagcagtactacctgtccaacctggaccagaacatcgcggtgatcgtgcagaccgtgtactgcttcaagtgcccatcgggccgcggcaacgaaggtgccgcggacgcgctccgggccgcgctggctcgcgtgctcgtccactaccacccgctcgccggccgcctcggcatcagcccggagatgaagctcatcgtggagtgcaccggcgagggcgtcccgttcgtggaggctgaggccgcttgcgacctcgccctcatcggggacctctccaccccggaccccgccgcgctgggccagctcgtgtactccgtccccggcgccaagagcatcctcgagatgccgcccatgacggcgcaggtgaccaggtttgaatgtggcggcttcagcatcgggttggccatgaaccactgcatgttcgacggtctgggcgccatggagttcgtcaactcctgggccgagatggcgcgcggcgccacggagctcaccgtgccaccgttcctcgaccgctccgtgctccgcgcgcgcgaccctccggtgatctccaacccgcaccacgagttcgaggagatcgctgacgtctcggaaatggcggcgctctacggcggccaggagctggtgtaccgctccttctgcttcgacccggacaggcttgagcgcgtccgcggcctcgccctcgccgacggggatctcgagcgctgcaccaccttcgaggcgctctccggcctcgtctggcgcgctcgcacccgcgcgctggggctcgcgccggagcagcagacgaagctgctgttcgccgtggacgggcgccgccgcttcgtgcctccgctcccaaaggggtacttcgggaacggcatcgtgctgaccaacgccctagcgacggcgggggatctgctgtcggcgccggtgtcgcgcgcggccgggaaggtgcaggaggccgtgcggatggtgacggacgagtatatgcggtcggcggtggactattttgaggcgacgcgctcgcggccatcgctggcgtcgacgctgctcatcaccacgtggtcgcggctcgcgttcaacggcgccgacttcggctggggcgagccgaccatgtccgggccagtcacgctgccggagaaggaggtcatactcttcctcgcgcacggcaaggagaggaagagcatcaacgtgctgctcggcctgccggcgtccgccatggacactttccaagagctcatggacgagatatgatcggcccagaccgattggatacgtcagcgactgcgctcggtgtttctatgcttgttttgcatgtgtttgttacttgttagcatggttatgttaattgtattattaagtgtgcgtcatttaattg

SEQ ID NO: 12908 - protein, 447 aa, Triticum aestivum
  misc_feature (1)..(447): Ceres Seq. ID no. 14313293
MVAEAKQNGVATMAGSKVQLMSVKRGEPTLVSPAEATPTGEQYYLSNLDQNIAVIVQTVYCFKCPSGRGNEGAADALRAALARVLVHYHPLAGRLGISPEMKLIVECTGEGVPFVEAEAACDLALIGDLSTPDPAALGQLVYSVPGAKSILEMPPMTAQVTRFECGGFSIGLAMNHCMFDGLGAMEFVNSWAEMARGATELTVPPFLDRSVLRARDPPVISNPHHEFEEIADVSEMAALYGGQELVYRSFCFDPDRLERVRGLALADGDLERCTTFEALSGLVWRARTRALGLAPEQQTKLLFAVDGRRRFVPPLPKGYFGNGIVLTNALATAGDLLSAPVSRAAGKVQEAVRMVTDEYMRSAVDYFEATRSRPSLASTLLITTWSRLAFNGADFGWGEPTMSGPVTLPEKEVILFLAHGKERKSINVLLGLPASAMDTFQELMDEI

SEQ ID NO: 12909 - protein, 435 aa, Triticum aestivum
  misc_feature (1)..(435): Ceres Seq. ID no. 14313294
MAGSKVQLMSVKRGEPTLVSPAEATPTGEQYYLSNLDQNIAVIVQTVYCFKCPSGRGNEGAADALRAALARVLVHYHPLAGRLGISPEMKLIVECTGEGVPFVEAEAACDLALIGDLSTPDPAALGQLVYSVPGAKSILEMPPMTAQVTRFECGGFSIGLAMNHCMFDGLGAMEFVNSWAEMARGATELTVPPFLDRSVLRARDPPVISNPHHEFEEIADVSEMAALYGGQELVYRSFCFDPDRLERVRGLALADGDLERCTTFEALSGLVWRARTRALGLAPEQQTKLLFAVDGRRRFVPPLPKGYFGNGIVLTNALATAGDLLSAPVSRAAGKVQEAVRMVTDEYMRSAVDYFEATRSRPSLASTLLITTWSRLAFNGADFGWGEPTMSGPVTLPEKEVILFLAHGKERKSINVLLGLPASAMDTFQELMDEI

SEQ ID NO: 12910 - protein, 427 aa, Triticum aestivum
  misc_feature (1)..(427): Ceres Seq. ID no. 14313295
MSVKRGEPTLVSPAEATPTGEQYYLSNLDQNIAVIVQTVYCFKCPSGRGNEGAADALRAALARVLVHYHPLAGRLGISPEMKLIVECTGEGVPFVEAEAACDLALIGDLSTPDPAALGQLVYSVPGAKSILEMPPMTAQVTRFECGGFSIGLAMNHCMFDGLGAMEFVNSWAEMARGATELTVPPFLDRSVLRARDPPVISNPHHEFEEIADVSEMAALYGGQELVYRSFCFDPDRLERVRGLALADGDLERCTTFEALSGLVWRARTRALGLAPEQQTKLLFAVDGRRRFVPPLPKGYFGNGIVLTNALATAGDLLSAPVSRAAGKVQEAVRMVTDEYMRSAVDYFEATRSRPSLASTLLITTWSRLAFNGADFGWGEPTMSGPVTLPEKEVILFLAHGKERKSINVLLGLPASAMDTFQELMDEI

SEQ ID NO: 12911 - DNA, 1528 bp, Triticum aestivum
  misc_feature (1)..(1528): Ceres Seq. ID no. 14313344
gtcaccctgtttgtccagtggacttccaactccagtctgacttcatcttcttcccaaaatcaaagaagcagcagaaatgcaggggtagcagctcacgccatgtccaaatccaaatccaaatagcttcgcctccgataggtggaggcggctactctgataggaggagaaggaagcaaaggagggaggcagcagaactgcagaagcaccatggtttccctctggcacacctccgtcattgtccttgtgctcctattcctcggaggatctgatgccaacccagctgcccgtcgacacggtcagctggatgtaaaccacaagaagaagccactacagacatccagaccttacaacattgcccacaggggttccaatggcgaaatacccgaagagacagctgcagcatatttgagggcaatcgaggaaggtgcagacttcatagagactgatatacttgcatcaaaggacggacatctgatatgtttccatgatgtaatcctggatgccacgacggacatcgtgaaccgtaccgagtttgctggcaggaagagaacctatgatgtccagggatttaagttgactgggtggtttatcgtggattttactttaagagaactgaaatcactgagggtgaaacagcgctacaatttcagggatcaacagtataattggaagtacaatattcttacatttgatgagtttattttgattgcacttcatgctgatagggtggtcggaatatacccagagatcaagaatcctattttcatcaaccagcatgtcaagtggtcaggtggcaagaagtttgaggacaagtttgtcgggacgcttctcaagcatggctacaaaggcaaatatatgtctaaagattggctcaagaagccactattcatccaatcctttgctccaacttcactaatttacatctcaaacatgacaaatgctccaaaactgcttctaatatacgataccacagttccaactcaagataccaaccagtcacactatgagataacttcgaacggctatctcgcgttcataaggaagtatgtaattgggattgggccatggaaggatacaattatccccccaaagaataaccatctaggccctgcaaccaatcttgtggcacgggcacacactctgaatcttcaggtgcatccgtacacattcagaaatgagaactcattcctgcacttcgacttccatcaagacccttatgctgaatatgagtactggctcagagaaatcggagtcgacgcgctgttcaccgatttcacgggcagcttgcacaagtaccaggagtggacagctccacacgaaaagaaggaaaagaagtgcagaggatctcctgcatgagatcgccaagacgctgaaggttgatgttcactaaagcttaggttgccaagtctgtatacctcctccctttcaggagctatttcattgttgtcagtaccgagaaaatgaactggttaataccattctatgtaattgcttcctataaatcacgagcagagcatcatagagttcg

SEQ ID NO: 12912 - protein, 382 aa, Triticum aestivum
  misc_feature (1)..(382): Ceres Seq. ID no. 14313345
MVSLWHTSVIVLVLLFLGGSDANPAARRHGQLDVNHKKKPLQTSRPYNIAHRGSNGEIPEETAAAYLRAIEEGADFIETDILASKDGHLICFHDVILDATTDIVNRTEFAGRKRTYDVQGFKLTGWFIVDFTLRELKSLRVKQRYNFRDQQYNWKYNILTFDEFILIALHADRVVGIYPEIKNPIFINQHVKWSGGKKFEDKFVGTLLKHGYKGKYMSKDWLKKPLFIQSFAPTSLIYISNMTNAPKLLLIYDTTVPTQDTNQSHYEITSNGYLAFIRKYVIGIGPWKDTIIPPKNNHLGPATNLVARAHTLNLQVHPYTFRNENSFLHFDFHQDPYAEYEYWLREIGVDALFTDFTGSLHKYQEWTAPHEKKEKKCRGSPA

SEQ ID NO: 12913 - DNA, 1218 bp, Triticum aestivum
  misc_feature (1)..(1218): Ceres Seq. ID no. 14313358
acacaagcactgccttccttccctagtcattgggaaggagaagaacacacagttagatacatccatctgatctgcttagttaccgtgctctgtactcctgatcaggatggcagaagggctcttctccatggctcacccgtgggcctccgcctttggcatcctaggcaacatcatatccttcctggtgttcctcgcgcccacgccgacgttcctgcgggtgtaccggaagaagtcgacggaggggttcagcgcggtgccgtacgtggtggcgctcttcagctgcatgctgtggatcttctacgcgctggtcaagaccaactccagcccgctgctcaccatcaacgcctttggctgcgtcgtcgagggcttctacatcctgctctacgtggtgtacgcgcccaggcacgccaggcaccgcgccctcgccttcttcctcctcctcgacgtcgccgccttcgccctcatcgtcgccgtcaccgtgttcctcgtgccccagcccagccgcgtcaaggtcctcggcagcgtctgcctcgccttctccatggccgtcttcgtcgccccgctcagcgtcatcttcgtggtgatcaagaccaagagcgccgagtacatgcccttctcgctctccttcttcctcaccctcagcgccgtcgcctggttcttctatggcctcttcaccaaggacatctacgtcaccctcccgaacgtgggcgggttcttctttggggtggcccagatgacgctctacttctgctaccgcaagccggacacgtcggccctggtgctgccgacggggatccacgacgtgtccacggagccggcggcgcagcaggaggtggagctgccggagggcacccacccggcggtggccatgctgacggtgagcacgctgccgatgctggcggagctgcagaagatggagcaggagatcagctcgcccaccccgcgcaagggctacatcaaggctttctgatccgatcgagatgaccgatgcacgcacgggcgcatgcattcaggagatgaatcaatcgctaatgattggcgaaccgaccgccagcagagatacgtttatatagttcttaatttcagtcgttcgtttgtaatggtctgtactagtagcacagtcgtgtgtgtgttgtcgtccaagggtctgatataccggccggccgggcaagtaattcatctaccaatccacgtgccctgggaaataaagttataaac

SEQ ID NO: 12914 - protein, 327 aa, Triticum aestivum
  misc_feature (1)..(327): Ceres Seq. ID no. 14313359
TQALPSFPSHWEGEEHTVRYIHLICLVTVLCTPDQDGRRALLHGSPVGLRLWHPRQHHILPGVPRAHADVPAGVPEEVDGGVQRGAVRGGALQLHAVDLLRAGQDQLQPAAHHQRLWLRRRGLLHPALRGVRAQARQAPRPRLLPPPRRRRLRPHRRRHRVPRAPAQPRQGPRQRLPRLLHGRLRRPAQRHLRGDQDQERRVHALLALLLPHPQRRRLVLLWPLHQGHLRHPPERGRVLLWGGPDDALLLLPQAGHVGPGAADGDPRRVHGAGGAAGGGAAGGHPPGGGHADGEHAADAGGAAEDGAGDQLAHPAQGLHQGFLIRSR

SEQ ID NO: 12915 - protein, 287 aa, Triticum aestivum
  misc_feature (1)..(287): Ceres Seq. ID no. 14313360
MAEGLFSMAHPWASAFGILGNIISFLVFLAPTPTFLRVYRKKSTEGFSAVPYVVALFSCMLWIFYALVKTNSSPLLTINAFGCVVEGFYILLYVVYAPRHARHRALAFFLLLDVAAFALIVAVTVFLVPQPSRVKVLGSVCLAFSMAVFVAPLSVIFVVIKTKSAEYMPFSLSFFLTLSAVAWFFYGLFTKDIYVTLPNVGGFFFGVAQMTLYFCYRKPDTSALVLPTGIHDVSTEPAAQQEVELPEGTHPAVAMLTVSTLPMLAELQKMEQEISSPTPRKGYIKAF

SEQ ID NO: 12916 - protein, 280 aa, Triticum aestivum
  misc_feature (1)..(280): Ceres Seq. ID no. 14313361
MAHPWASAFGILGNIISFLVFLAPTPTFLRVYRKKSTEGFSAVPYVVALFSCMLWIFYALVKTNSSPLLTINAFGCVVEGFYILLYVVYAPRHARHRALAFFLLLDVAAFALIVAVTVFLVPQPSRVKVLGSVCLAFSMAVFVAPLSVIFVVIKTKSAEYMPFSLSFFLTLSAVAWFFYGLFTKDIYVTLPNVGGFFFGVAQMTLYFCYRKPDTSALVLPTGIHDVSTEPAAQQEVELPEGTHPAVAMLTVSTLPMLAELQKMEQEISSPTPRKGYIKAF

SEQ ID NO: 12917 - DNA, 1481 bp, Triticum aestivum
  misc_feature (1)..(1481): Ceres Seq. ID no. 14313362
actctatccgcgtcgactggtagctgaaactccaaaaagccgccaccactccggttcctgcgttcgtactccactcctgccagtccaagatccagctcaagatccaggcagggtcagccagccatgtgctgcggcgagtgcggctgctatgacgcactctgcgaccgctgctgcctctgcgtctccaccggcgcgcgcgacaccatcctctgctgcgcgtgctgcctcgccgtcctcgccggcgtcggcctcctcctcgtcctcctcgcggccttctgcttcatccgccacgccgaggtcgccgtcaccgacgcctccctcacgcgcctcgcgctggccgcgtcccccgccaccgccttcgcctacaacctctcgctcacgctcaccgtccggaacaagaactgggcaatgagcgtcaagaacacccagccgctcgaggccgactacagcttcgacggccagcgcttcgagcgggtcaggctcgccgacgagggctccacgcaccccgccggcaagacccaggtgtaccacctcgtctccggctccgacggcgcctacgtcgcgctcggcaacgccggcgtggccgagttcaaggaggagaacaagacgggggtgttccaggtggaggtggcgctgtcgggccaggtcaggtaccaggcgcacttcaccaagtgcaagttccaggccaattgcccgctcaagctgcagctcgcgccgcccggcacgccggccgtcgtcttccagaaggtcaagtgcaagctcgctccggcgagcaggtactgctagtgattggtacgattggtggctagtgatttctgtcggtagattgggaggactaagtatagttgccgggaacggggaacgatgccgcgtcccctgtaccgggaacatcgacccggatcgagggtcggggtcgacacagggaacgacgcgattcggtgacgggaacgcgacccggaaaggcaggttcgcagctccgtttcagtgatcgcaaatacactggatctcgacccaacttgccaatgaacgggaggccaaatggatagaatcgagacttacctgaagtccatggcatgagccttccgctgtcgaccaaaacgatgcgcgccggaggctagtgtgcatgtgcgaacgcggtgcccagcggcgccggcggctggtgtcgacgtgcagactgcggatgcgatgcccagcggcgccggcggctggtgtcgacgtgcagactgcggatgcggtgcccggcggcgctaacggctggtgtcgacgtgcagactatgcggtgctcggtggcggactgcggacgctgtgctagatggccggacggcggcggcggctgccgtggaccagcgaatgtggtgcccgcttcccactgcccatcctcttgattggaatttgggaatcatacggggcagatttcatggagtagattactttctgctgtcaaaactttccgcgggatatttgcacattttcccttcctc

SEQ ID NO: 12918 - protein, 220 aa, Triticum aestivum
  misc_feature (1)..(220): Ceres Seq. ID no. 14313363
MCCGECGCYDALCDRCCLCVSTGARDTILCCACCLAVLAGVGLLLVLLAAFCFIRHAEVAVTDASLTRLALAASPATAFAYNLSLTLTVRNKNWAMSVKNTQPLEADYSFDGQRFERVRLADEGSTHPAGKTQVYHLVSGSDGAYVALGNAGVAEFKEENKTGVFQVEVALSGQVRYQAHFTKCKFQANCPLKLQLAPPGTPAVVFQKVKCKLAPASRYC

SEQ ID NO: 12919 - protein, 136 aa, Triticum aestivum
  misc_feature (1)..(136): Ceres Seq. ID no. 14313364
LYPRRLVAETPKSRHHSGSCVRTPLLPVQDPAQDPGRVSQPCAAASAAAMTHSATAAASASPPARATPSSAARAASPSSPASASSSSSSRPSASSATPRSPSPTPPSRASRWPRPPPPPSPTTSRSRSPSGTRTGQ

SEQ ID NO: 12920 - protein, 125 aa, Triticum aestivum
  misc_feature (1)..(125): Ceres Seq. ID no. 14313365
MSVKNTQPLEADYSFDGQRFERVRLADEGSTHPAGKTQVYHLVSGSDGAYVALGNAGVAEFKEENKTGVFQVEVALSGQVRYQAHFTKCKFQANCPLKLQLAPPGTPAVVFQKVKCKLAPASRYC

SEQ ID NO: 12921 - DNA, 2027 bp, Triticum aestivum
  misc_feature (1)..(2027): Ceres Seq. ID no. 14313366
tccgcccgatccccttccgccccctcccgacgatcgcccccgctcgtcccaccgcggtgggcgatcgctcctctcctccgtgcgcgcgattcctgaggcgaggcgaccgacaccagattccgccggccggcccacctcccccgcttcgccgatcggatcgcgtgctccatgaggtagaggtgacgataaagcatagttgttgacttagcttgcagtggttctttatcgaagctaaggcagataataattggcgttatggcatatcgaatggtatgcgctccccaagtcattgatctcgagtctgagcgagggcatcctcatgttcattctgaaagtttaattcacaatgggaatgatttgtccgaccaaggcagtcaatatactgtcagagttgtaggcaatgctatgaatgctggtctttctgatacacagggttactacaatatgagcatgaatcatccacatcagcctgttcatagttctccgccaaatttaggcgttgattcaggttttgtcttcccatcaaatatgtacaacccttgcatgtcaacatctatgaacagatatgtctctcatgctcagagctttggattgcctttaaaccaagttgtctcaggaagtatgtatggaagtactagaaatgaaaatgtcagcgaaactgctagaggattcattaaaaggaaaaatgccgcagtggcaggaacttgtcattttgttaatggatctgcaagctcaagctcatcctctcatacatctcaaaatcctacacataggccatgggatccttcttttgagtcaaatgtttttcctaatgtcacaccattcaacccatcagaatatcatagccacagcacttggccatctgtggaaggatcttccattactggatcaaatgggtttaatttgatggctgctcacccagaatcagcacagcatggtaactatacatttcaatcaagtcatgctagtcagtgctttcaacctgccagcactacttgggtttcccaggctgcaactggaattgtggaaggagtaccacagtggtcatacatcaatgcaatgtctagtgttccaggcagatttgcacattcaggggccacagaaatagtgaatggaggctttcatgaatatcagaatggcccttcaaccatttctcaagggcatttaccttattttcatcaacatgctgtgcatagcatgcaacctcataatccactggatcatacacgagtgcaagtcccttaccaacaaggccacaataatggcatcttgcatagtggggtaaatcattctggtaaccggttccacttgagtccaagaactccaggtctcttctctaattctgagcggtcttttgggcctccacagcatccgttcctggtgaacccagttaatcataggaacttaagaattttgccacctctgcagcatggtgcaatcatggatttttcgaggttgtatgaggggtcaaatgtagtagatgagcatagagatatgcgtctagatatagacagcatgacctatgaggagcttttagcattagaagagcacattggagacgtcaatacaggtctggcaaaaagccacattgtagataaattgaagactagcttatatgtgccaggagcaacctgcgtgtctaatcagtcatctgaaccttccacagagaatgaggcttgcataatatgccaggaggagtacgaggctgaggactgcgttggaatcctggattgtggccacagataccatgcggtgtgcttaaaacagtggctgacggtaaagaacctatgccccatctgcaagacaacagctttgtctgcgggtagaagaagttgataacaaacaggattaatctttatcagttatttgcttgacaaacattcagatcaattttgtacataagaagcggtagactattctgctacctgtatttgttgttcaccttgtgattgggagtaactcggcttccaaaaactgtacagacataacattgatcgttctattcaaatgtagaatgtttataaatt

SEQ ID NO: 12922 - protein, 526 aa, Triticum aestivum
  misc_feature (1)..(526): Ceres Seq. ID no. 14313367
MAYRMVCAPQVIDLESERGHPHVHSESLIHNGNDLSDQGSQYTVRVVGNAMNAGLSDTQGYYNMSMNHPHQPVHSSPPNLGVDSGFVFPSNMYNPCMSTSMNRYVSHAQSFGLPLNQVVSGSMYGSTRNENVSETARGFIKRKNAAVAGTCHFVNGSASSSSSSHTSQNPTHRPWDPSFESNVFPNVTPFNPSEYHSHSTWPSVEGSSITGSNGFNLMAAHPESAQHGNYTFQSSHASQCFQPASTTWVSQAATGIVEGVPQWSYINAMSSVPGRFAHSGATEIVNGGFHEYQNGPSTISQGHLPYFHQHAVHSMQPHNPLDHTRVQVPYQQGHNNGILHSGVNHSGNRFHLSPRTPGLFSNSERSFGPPQHPFLVNPVNHRNLRILPPLQHGAIMDFSRLYEGSNVVDEHRDMRLDIDSMTYEELLALEEHIGDVNTGLAKSHIVDKLKTSLYVPGATCVSNQSSEPSTENEACIICQEEYEAEDCVGILDCGHRYHAVCLKQWLTVKNLCPICKTTALSAGRRS

SEQ ID NO: 12923 - protein, 522 aa, Triticum aestivum
  misc_feature (1)..(522): Ceres Seq. ID no. 14313368
MVCAPQVIDLESERGHPHVHSESLIHNGNDLSDQGSQYTVRVVGNAMNAGLSDTQGYYNMSMNHPHQPVHSSPPNLGVDSGFVFPSNMYNPCMSTSMNRYVSHAQSFGLPLNQVVSGSMYGSTRNENVSETARGFIKRKNAAVAGTCHFVNGSASSSSSSHTSQNPTHRPWDPSFESNVFPNVTPFNPSEYHSHSTWPSVEGSSITGSNGFNLMAAHPESAQHGNYTFQSSHASQCFQPASTTWVSQAATGIVEGVPQWSYINAMSSVPGRFAHSGATEIVNGGFHEYQNGPSTISQGHLPYFHQHAVHSMQPHNPLDHTRVQVPYQQGHNNGILHSGVNHSGNRFHLSPRTPGLFSNSERSFGPPQHPFLVNPVNHRNLRILPPLQHGAIMDFSRLYEGSNVVDEHRDMRLDIDSMTYEELLALEEHIGDVNTGLAKSHIVDKLKTSLYVPGATCVSNQSSEPSTENEACIICQEEYEAEDCVGILDCGHRYHAVCLKQWLTVKNLCPICKTTALSAGRRS

SEQ ID NO: 12924 - protein, 476 aa, Triticum aestivum
  misc_feature (1)..(476): Ceres Seq. ID no. 14313369
MNAGLSDTQGYYNMSMNHPHQPVHSSPPNLGVDSGFVFPSNMYNPCMSTSMNRYVSHAQSFGLPLNQVVSGSMYGSTRNENVSETARGFIKRKNAAVAGTCHFVNGSASSSSSSHTSQNPTHRPWDPSFESNVFPNVTPFNPSEYHSHSTWPSVEGSSITGSNGFNLMAAHPESAQHGNYTFQSSHASQCFQPASTTWVSQAATGIVEGVPQWSYINAMSSVPGRFAHSGATEIVNGGFHEYQNGPSTISQGHLPYFHQHAVHSMQPHNPLDHTRVQVPYQQGHNNGILHSGVNHSGNRFHLSPRTPGLFSNSERSFGPPQHPFLVNPVNHRNLRILPPLQHGAIMDFSRLYEGSNVVDEHRDMRLDIDSMTYEELLALEEHIGDVNTGLAKSHIVDKLKTSLYVPGATCVSNQSSEPSTENEACIICQEEYEAEDCVGILDCGHRYHAVCLKQWLTVKNLCPICKTTALSAGRRS

SEQ ID NO: 12925 - DNA, 1988 bp, Triticum aestivum
  misc_feature (1)..(1988): Ceres Seq. ID no. 14313373
acacatctcaccacgccacaaacaccaaagagaggtgtactacgagggagtgagaggcgcccggctcgcctgcgtccgtctccacttctcgcgagcccggcgtcacccgccgccgggcacgcaccacgctcaacgccaaagaaaatagtgtaggtcgtgtaggcgaaggccgacctgcaaactaaacactagtcgatcaagatggtggtggagggatacgaagccgacaagaacatccagatatggaaggtgaagaagctgatcaaggggctggacggggcgaggggcaacggcacgagcatgatctcgctcatcataccgccgcgcgaccaggtgtcccgcgtcgccaagatgctgggcgacgagtacgggaccgcctccaacatcaagagccgggtgaaccgccagtccgtgctggccgccataacctccgcccagcagaggctcaagctctacagccgggtgccccccaacggcctcgtgctctacacgggcaccgtcgtcaccgacgacggcaaggagaagaaggtcaccttcgacttcgagcccttccggcccatcaacgcgtcgctctacctctgcgataacaagttccacaccgagccgctgaacgagctcctcgagtccgacgacaggttcggcttcatcgccatggacggcaacggcacgctctacggcacgctgagcggcaacagccgggaggtggtgtacaagttcagcgtggatctgcccaagaagcacgggcggggagggcagtcggcgctccggttcgcgcgcctgcgtatggagaagcggcacaactacctgcgcaaggcggccgagctggccacgcacttcttcaccaaccccgccaccaaccagcccaacgtggtcgggctcatcctggccggctccgccgatttcaagaccgagctgggcaagtccgagatgttcgaccagcggctccaggccaagataatcaagtcggtcgacgtgtcgtacggcggggagagcggcttcaaccaggccattgagatgtctgtggaggtcctctccgaggccaagttcgtccaggagaagaagctccttcgcaagtacttcgaggagataagccaggacaccgggaagtacgtcctgggcgtgcaggacaccatggcggccctcgagatgggcgcggtccacacgctgatcgtgtgggagaacctcgacgtcaggcggtacgagctgaagaactccgccacgggggagacggtggtgaagtacatcaacggcggccaggaggcggaccagagcaacctcggtgtcgacgaggcggcgtgcggggagctggacgtcgtcgacagggtgctgctgctggagtggttcgccgagaactaccagcaatacggctgcaagctggagttcgtcaccaacaggtcccaggaaggatcgcagttctgccggggcttcggcggcatcggcgggatcctccgctacccggcggacgtcgccgcctacaacgacgacgacgacgacgacatgctggatgacgacgtctatgaaggcctcgaatagcaatcaactgaagcttcactgcacacggtctgggaggagcctgcgctggccccgaccgcgccgccgggacgagaccctgctgaaacatccaaacgatcggtgcaagggaaacgaggaggtgggacagaagaaaggatctcagcaattatagttcggaccttgagcaaagcacgatgatggcgttgatggtttggagttgaaggtctcttcctctctggatccatcccttcaaatttggttatgctactaagcagccgtggctgccttctcttgctgcatcagagaatatgcttattagagtcgtattagttgcgagtgtgagagtggtgttccttataatctactcctgagtcgccttatgagcttatatgctactacaacaactgcttgaaataatgttgtgtattattgtgttcgattttatatgtgagatttattgctatggtaagatactg

SEQ ID NO: 12926 - protein, 443 aa, Triticum aestivum
  misc_feature (1)..(443): Ceres Seq. ID no. 14313374
MVVEGYEADKNIQIWKVKKLIKGLDGARGNGTSMISLIIPPRDQVSRVAKMLGDEYGTASNIKSRVNRQSVLAAITSAQQRLKLYSRVPPNGLVLYTGTVVTDDGKEKKVTFDFEPFRPINASLYLCDNKFHTEPLNELLESDDRFGFIAMDGNGTLYGTLSGNSREVVYKFSVDLPKKHGRGGQSALRFARLRMEKRHNYLRKAAELATHFFTNPATNQPNVVGLILAGSADFKTELGKSEMFDQRLQAKIIKSVDVSYGGESGFNQAIEMSVEVLSEAKFVQEKKLLRKYFEEISQDTGKYVLGVQDTMAALEMGAVHTLIVWENLDVRRYELKNSATGETVVKYINGGQEADQSNLGVDEAACGELDVVDRVLLLEWFAENYQQYGCKLEFVTNRSQEGSQFCRGFGGIGGILRYPADVAAYNDDDDDDMLDDDVYEGLE

SEQ ID NO: 12927 - protein, 410 aa, Triticum aestivum
  misc_feature (1)..(410): Ceres Seq. ID no. 14313375
MISLIIPPRDQVSRVAKMLGDEYGTASNIKSRVNRQSVLAAITSAQQRLKLYSRVPPNGLVLYTGTVVTDDGKEKKVTFDFEPFRPINASLYLCDNKFHTEPLNELLESDDRFGFIAMDGNGTLYGTLSGNSREVVYKFSVDLPKKHGRGGQSALRFARLRMEKRHNYLRKAAELATHFFTNPATNQPNVVGLILAGSADFKTELGKSEMFDQRLQAKIIKSVDVSYGGESGFNQAIEMSVEVLSEAKFVQEKKLLRKYFEEISQDTGKYVLGVQDTMAALEMGAVHTLIVWENLDVRRYELKNSATGETVVKYINGGQEADQSNLGVDEAACGELDVVDRVLLLEWFAENYQQYGCKLEFVTNRSQEGSQFCRGFGGIGGILRYPADVAAYNDDDDDDMLDDDVYEGLE

SEQ ID NO: 12928 - protein, 393 aa, Triticum aestivum
  misc_feature (1)..(393): Ceres Seq. ID no. 14313376
MLGDEYGTASNIKSRVNRQSVLAAITSAQQRLKLYSRVPPNGLVLYTGTVVTDDGKEKKVTFDFEPFRPINASLYLCDNKFHTEPLNELLESDDRFGFIAMDGNGTLYGTLSGNSREVVYKFSVDLPKKHGRGGQSALRFARLRMEKRHNYLRKAAELATHFFTNPATNQPNVVGLILAGSADFKTELGKSEMFDQRLQAKIIKSVDVSYGGESGFNQAIEMSVEVLSEAKFVQEKKLLRKYFEEISQDTGKYVLGVQDTMAALEMGAVHTLIVWENLDVRRYELKNSATGETVVKYINGGQEADQSNLGVDEAACGELDVVDRVLLLEWFAENYQQYGCKLEFVTNRSQEGSQFCRGFGGIGGILRYPADVAAYNDDDDDDMLDDDVYEGLE

SEQ ID NO: 12929 - DNA, 1527 bp, Triticum aestivum
  misc_feature (1)..(1527): Ceres Seq. ID no. 14313381
accgcaaatctagcggagggtcagctcgggctcggcggcgaccagagaggaggagggaagtggcgtggttctctctcgcgcgcgcgcgtgcggcggagacggagaagggcgccggctgctccaggctgtaacctctggactggagtccttgtcgcgcctagatgctccgcgcctcctcgccacagcggcaagacggcgtcctgtgggccaaggctgcttcctcggccgccctccaccagtactatgccctcccaaagaagggcaagccgcagggccgcgagtccaccgtcctcgctgccttcctgctctcctctccagagaacccactgaaccccaccgtcctctccctcgccaccggcaccaagtgcctcggtgcagcacgcctcggacctcgcggtgacctcgtccatgacgcccacgccgaggtcgtcgcccgccgcgcgctgctccgcctcatttatgccgagattggcacagacaacccaccaagttggctggttgcatctggcgctgatgggcggtggaggctgagggacgggcatcagctgcatctctacatcacccagatcccctgtggggtcatgccggtgccgccgtcatccttggaggttcgaatggaacagctggataccatggtgaatggatgcagtgacgttggattcgtgcaaaggaagccagggcgtggtgatacaacattgtcggtgagctgttttgacaaaattactcgctggtgtgtcgttgggatccaaggtgcattgctgtcacacattcttgaacccttgtatttgtccaccattaccattggacaatcacctgatggtgcacctgacgggttttgtattgaaagtaatgttgtaaaagttcttggtgctcgcctgtcctgtctatccagaaaattccctgaccctttcaaactgaacaagccactattttttgaggcacctatcccccctcaagagtttcaacagacttcaggagatataccgcctttgacttgcgggtactcaatatgctggaataaatccggtttgcatgaagttgttttaggaacaactgggagaaaacaaggtacatcttcaaaggcagcatcctcaccctccactgagtcattgctctgcaagataagattggcagaggccttcgtatcacttgaacatccattagtcacaaaattccggcatgagaaactttcttatcgtgcaattaaggacatggcttgtgagtaccagcagatgcttgagcttcttagaaaggctccattttttggccggtggcgtgctaagccagcatccgttgatttgtttacagttccacggtgataaccaaatcttgaagttctatgctgtgtccgagaggctggttcttgaagttccttgatttcaccataattttagcagttttctgtaccagctctttcaacttatttgtagcatgtatgcttgtgcacaatactgaagtattgaacagtggtagcctgtaacaaacctataaagccctgtgatgtttcgcaccatgaggtggatgttt

SEQ ID NO: 12930 - protein, 385 aa, Triticum aestivum
  misc_feature (1)..(385): Ceres Seq. ID no. 14313382
MLRASSPQRQDGVLWAKAASSAALHQYYALPKKGKPQGRESTVLAAFLLSSPENPLNPTVLSLATGTKCLGAARLGPRGDLVHDAHAEVVARRALLRLIYAEIGTDNPPSWLVASGADGRWRLRDGHQLHLYITQIPCGVMPVPPSSLEVRMEQLDTMVNGCSDVGFVQRKPGRGDTTLSVSCFDKITRWCVVGIQGALLSHILEPLYLSTITIGQSPDGAPDGFCIESNVVKVLGARLSCLSRKFPDPFKLNKPLFFEAPIPPQEFQQTSGDIPPLTCGYSICWNKSGLHEVVLGTTGRKQGTSSKAASSPSTESLLCKIRLAEAFVSLEHPLVTKFRHEKLSYRAIKDMACEYQQMLELLRKAPFFGRWRAKPASVDLFTVPR

SEQ ID NO: 12931 - protein, 245 aa, Triticum aestivum
  misc_feature (1)..(245): Ceres Seq. ID no. 14313383
MPVPPSSLEVRMEQLDTMVNGCSDVGFVQRKPGRGDTTLSVSCFDKITRWCVVGIQGALLSHILEPLYLSTITIGQSPDGAPDGFCIESNVVKVLGARLSCLSRKFPDPFKLNKPLFFEAPIPPQEFQQTSGDIPPLTCGYSICWNKSGLHEVVLGTTGRKQGTSSKAASSPSTESLLCKIRLAEAFVSLEHPLVTKFRHEKLSYRAIKDMACEYQQMLELLRKAPFFGRWRAKPASVDLFTVPR

SEQ ID NO: 12932 - protein, 234 aa, Triticum aestivum
  misc_feature (1)..(234): Ceres Seq. ID no. 14313384
MEQLDTMVNGCSDVGFVQRKPGRGDTTLSVSCFDKITRWCVVGIQGALLSHILEPLYLSTITIGQSPDGAPDGFCIESNVVKVLGARLSCLSRKFPDPFKLNKPLFFEAPIPPQEFQQTSGDIPPLTCGYSICWNKSGLHEVVLGTTGRKQGTSSKAASSPSTESLLCKIRLAEAFVSLEHPLVTKFRHEKLSYRAIKDMACEYQQMLELLRKAPFFGRWRAKPASVDLFTVPR

SEQ ID NO: 12933 - DNA, 1271 bp, Triticum aestivum
  misc_feature (1)..(1271): Ceres Seq. ID no. 14313459
gcactcaacacactctctgcttcagctaacattagcagtccagcgcacacacatacagatatcgagagtgtgtgtgtaagagagacattagatcgagagcgatggcaattcctgctgatgctgctgtctcgttgaacttcccggtgatcaacatggagaagcttgagaccggggagaggggcgcggccatggaggtcatccgcgacgcctgcgagaactggggattcttcgagctgctgaaccatggcatctcgcacgagctgatggacgaggtggagcgggtgagcaaggcgaactacacggcgtgccgagaggggcagttcaaggagtttgcggcgcggacgctggaggccggcgagaagggcgccgacgtgaaggacgtggactgggagagcaccttcttcgtccgccacctccccgcctccaaccttgccgacctgcccgacctcgaccaccactacaggcaactgatcaaggaattcgcgtcggagatcgagaagctggcagagaaggtgctggacctgctgtgcgagaacctgggtctggagcagggctacctgaagcgggcgttcgccgggtccaggggcccgacgttcggcaccaaggtgagcagctacccaccgtgcccacgccccgacctggttgacggcctccgcgcgcacaccgacgccggcggcgtcatcctgctgttccaggacgaccaggtgagcgggctgcagctccttaaggacggggcctgggttgaggtgccgcccatgcgccacgccatcgtcgtcaatatcggcgaccagctggaggtgatcaccaacgggcggtacaagagcgtgatgcaccgcgtgctcacccgcgccgacggcaaccgcatgtccatcgcgtcattctacaaccccggggccgacgccgtcatcttcccggccccggcgcttgtggccgctgccggcgccacggagaagaacgagggcgaggagggcggcgccgtgtacccgaagttcgtgttcgaggactacatgaacctgtacgtgcgccacaagttcgaggccaaggagccacggttcaaggccatgaaggcagacgccgcgcccatcgccatcgcgtgataacgccgcgcccatcgagtacaagagtattttgagacgtgtttactttcttttgggcgtgccatgtatccggttagctttatgggtaatgtattttcgagtccgactcacagattcttgtccgggcatttctattttgctgattatggcatgctgttacgtgaagttaggaac

SEQ ID NO: 12934 - protein, 331 aa, Triticum aestivum
  misc_feature (1)..(331): Ceres Seq. ID no. 14313460
MAIPADAAVSLNFPVINMEKLETGERGAAMEVIRDACENWGFFELLNHGISHELMDEVERVSKANYTACREGQFKEFAARTLEAGEKGADVKDVDWESTFFVRHLPASNLADLPDLDHHYRQLIKEFASEIEKLAEKVLDLLCENLGLEQGYLKRAFAGSRGPTFGTKVSSYPPCPRPDLVDGLRAHTDAGGVILLFQDDQVSGLQLLKDGAWVEVPPMRHAIVVNIGDQLEVITNGRYKSVMHRVLTRADGNRMSIASFYNPGADAVIFPAPALVAAAGATEKNEGEEGGAVYPKFVFEDYMNLYVRHKFEAKEPRFKAMKADAAPIAIA

SEQ ID NO: 12935 - protein, 314 aa, Triticum aestivum
  misc_feature (1)..(314): Ceres Seq. ID no. 14313461
MEKLETGERGAAMEVIRDACENWGFFELLNHGISHELMDEVERVSKANYTACREGQFKEFAARTLEAGEKGADVKDVDWESTFFVRHLPASNLADLPDLDHHYRQLIKEFASEIEKLAEKVLDLLCENLGLEQGYLKRAFAGSRGPTFGTKVSSYPPCPRPDLVDGLRAHTDAGGVILLFQDDQVSGLQLLKDGAWVEVPPMRHAIVVNIGDQLEVITNGRYKSVMHRVLTRADGNRMSIASFYNPGADAVIFPAPALVAAAGATEKNEGEEGGAVYPKFVFEDYMNLYVRHKFEAKEPRFKAMKADAAPIAIA

SEQ ID NO: 12936 - protein, 302 aa, Triticum aestivum
  misc_feature (1)..(302): Ceres Seq. ID no. 14313462
MEVIRDACENWGFFELLNHGISHELMDEVERVSKANYTACREGQFKEFAARTLEAGEKGADVKDVDWESTFFVRHLPASNLADLPDLDHHYRQLIKEFASEIEKLAEKVLDLLCENLGLEQGYLKRAFAGSRGPTFGTKVSSYPPCPRPDLVDGLRAHTDAGGVILLFQDDQVSGLQLLKDGAWVEVPPMRHAIVVNIGDQLEVITNGRYKSVMHRVLTRADGNRMSIASFYNPGADAVIFPAPALVAAAGATEKNEGEEGGAVYPKFVFEDYMNLYVRHKFEAKEPRFKAMKADAAPIAIA

SEQ ID NO: 12937 - DNA, 1635 bp, Triticum aestivum
  misc_feature (1)..(1635): Ceres Seq. ID no. 14313463
aaacaagtgtacctctatctcgccgtcgcctccccgctccttgcttccgcccggccgtttctctagggtttaacgccatggacgtcgaggacgagctcccgaccgcccccgcgtccgcggacggcggcgaatcctcgcacgcgctggtgtccggcgaccagttcgacgtggaggcgtacgcggcgcagtactcggggcgcacgcgcgtggcgcggcttctcttcatcgcggagaagtgcgggtcggagcagatgcggctggatgcgctccggctggcctacgactgggccctcaagggagaggacacggccctccaccgcgacgtctccgccaagatcgccggccgcctcggcccccgctacgcagccgaccaggcctggtccgacgccgtcgagcgccgcgccctgctgcgcaaggataagcttgacagcgagctcaatgtctacaggaccaatctgatcaaagagagtattcggatgggctacaatgaccttggtgatttccactatgctcaaggccacctttcagacgccttcaagagctatatcaggacccgcgattactgcacgacctccaagcatgttgttcagatgtgcttgaatgtcatacttgttagcattgagctggggcaatttatgcacgtgtcaaattatgtcatcaaggcggagcagaccccagacgatatggatcctattactgccgccaagttgcgagctgctgctggattagcctacatggaaacaaacaagtacaaacttgctgcccggaagtttatagagacaggatcagagctaaggagcaactattctgaagttatagctccacaagatgttgctgtctatggtgcactatgcgcgcttgcttcttttgatcgctcagagctgaagagcaaagttattgacaactacaattttcgcaattttttggagttagtgcctgaagtaagggagctggtaaatgatttttatgcaagccgctatgggtcatgtctgggatatcttgagaagctgaagtcaaacctgctgctggatatgcatttgcatgcgcatatagaaactctgtacaaggacattcgacacaaagccatcatacagtacacattcccattcatatctgttgatctcaacttgatggctgttgccttccagacctccgtgtccctgctagagaaagagctggcagcgcttatcactgataacaaaatacaggctcgtatcgactcgcacaacaagattctatacgcaagccacgccgaccaaaggaacggaactttccagcgtgctctgcagactggcattgagtttgagagggatgtcaagtccatgcttctgagggcgaacctcctcaagcacgagtacagccagaaggcagcagaaaggaaggtgtgaaaacaagttctccttggtttggacctgaggtgcattgagagattttagtgatgatttgtgccatagtcaagtgtttcatgtcatgatcttccatattcaagctaagatactagatttaagtatgttttagagcacacaaagataatataacttctgccatgcacgtcttttgcggagactatgtggttaattttgtactacgtactggcattcattttggagttttcgtatagactcatttgaagct

SEQ ID NO: 12938 - protein, 461 aa, Triticum aestivum
  misc_feature (1)..(461): Ceres Seq. ID no. 14313464
TSVPLSRRRLPAPCFRPAVSLGFNAMDVEDELPTAPASADGGESSHALVSGDQFDVEAYAAQYSGRTRVARLLFIAEKCGSEQMRLDALRLAYDWALKGEDTALHRDVSAKIAGRLGPRYAADQAWSDAVERRALLRKDKLDSELNVYRTNLIKESIRMGYNDLGDFHYAQGHLSDAFKSYIRTRDYCTTSKHVVQMCLNVILVSIELGQFMHVSNYVIKAEQTPDDMDPITAAKLRAAAGLAYMETNKYKLAARKFIETGSELRSNYSEVIAPQDVAVYGALCALASFDRSELKSKVIDNYNFRNFLELVPEVRELVNDFYASRYGSCLGYLEKLKSNLLLDMHLHAHIETLYKDIRHKAIIQYTFPFISVDLNLMAVAFQTSVSLLEKELAALITDNKIQARIDSHNKILYASHADQRNGTFQRALQTGIEFERDVKSMLLRANLLKHEYSQKAAERKV

SEQ ID NO: 12939 - protein, 436 aa, Triticum aestivum
  misc_feature (1)..(436): Ceres Seq. ID no. 14313465
MDVEDELPTAPASADGGESSHALVSGDQFDVEAYAAQYSGRTRVARLLFIAEKCGSEQMRLDALRLAYDWALKGEDTALHRDVSAKIAGRLGPRYAADQAWSDAVERRALLRKDKLDSELNVYRTNLIKESIRMGYNDLGDFHYAQGHLSDAFKSYIRTRDYCTTSKHVVQMCLNVILVSIELGQFMHVSNYVIKAEQTPDDMDPITAAKLRAAAGLAYMETNKYKLAARKFIETGSELRSNYSEVIAPQDVAVYGALCALASFDRSELKSKVIDNYNFRNFLELVPEVRELVNDFYASRYGSCLGYLEKLKSNLLLDMHLHAHIETLYKDIRHKAIIQYTFPFISVDLNLMAVAFQTSVSLLEKELAALITDNKIQARIDSHNKILYASHADQRNGTFQRALQTGIEFERDVKSMLLRANLLKHEYSQKAAERKV

SEQ ID NO: 12940 - protein, 378 aa, Triticum aestivum
  misc_feature (1)..(378): Ceres Seq. ID no. 14313466
MRLDALRLAYDWALKGEDTALHRDVSAKIAGRLGPRYAADQAWSDAVERRALLRKDKLDSELNVYRTNLIKESIRMGYNDLGDFHYAQGHLSDAFKSYIRTRDYCTTSKHVVQMCLNVILVSIELGQFMHVSNYVIKAEQTPDDMDPITAAKLRAAAGLAYMETNKYKLAARKFIETGSELRSNYSEVIAPQDVAVYGALCALASFDRSELKSKVIDNYNFRNFLELVPEVRELVNDFYASRYGSCLGYLEKLKSNLLLDMHLHAHIETLYKDIRHKAIIQYTFPFISVDLNLMAVAFQTSVSLLEKELAALITDNKIQARIDSHNKILYASHADQRNGTFQRALQTGIEFERDVKSMLLRANLLKHEYSQKAAERKV

SEQ ID NO: 12941 - DNA, 1628 bp, Triticum aestivum
  misc_feature (1)..(1628): Ceres Seq. ID no. 14313518
cactaggaacaaaaagaaaaaagaaaaagaggaaggaaggaaaaaatctcccggggcgcaagcaaacgtgacgccacgcctcactccggccttcgtcgtcctcctcttcctccccccactttccccacaatagtttggcgatcgctcgctgccgccgccgcgaccgcgactgaagcctctgctccgctccgctccgctcgccgctggaagatggagcctgaccagagtggcaccgggcagacttctccccgtgggaacgactgggaggtcgtgcagctcaccgcgtcgaactacgcgtctgcgcctggcccggctagaactgaaccttctgacgaggagtctgaaggccaagtgtatggcgcagaagggggtgattcggcagccgcggcactgctgatgtctggccacttctcggttccgcagaatgaggctgagaatctcctcatgggagctgatactagcatagagcagcaggaggcgcgcggcagccagtacgcagtctctgacaagggtgatgatggtgatagggaggaagacccgcaggagaaactgaaggatgatgttcttgacaggatcccgtccttcgacaaagggaaaagcctttcctctgttgatatggaacctgatgatggcagcgagttgcacaggggtagtctggttggaaaagacccagttacgttctcatcctctgtttacaatgcaactgacgctgagaaagaagctaccgagagtgccaaggagaagactgaagaaagtccaactctccaaaatattgaccctgtcactgattcgtccaatattgttgcttccggtgacgagagcaagcctgacggttctggagccccacgcaatgcatggtggcagaagcaacttatatcgctctacaggagcgctaaagagagcaacaagctctggcctatcgttgtggctgctgctgctctgatggggatggcgtatttccggcggcgctggcagaagggcaagctgcagcttcagcaggtcaaattgcaacctgccagcagcaaggaggtaatcgtgggacgccttccttttgatcatactagccaaattttccatgcaactgaacagactagtttggcctgaaattcagagaatcaaccaggccaccgtaccgcttaaccgaatcaaggacattcttgtcgccggcaaccacccgagtccggctcctcacggaaatgctcgattgggctgatgatgataaccatcccgcctgacggatgatgtatcctgaaactagtgtatgcaatggagaaatagccgatgccgcagaacgtatgggcgtttatgcgtgctggctgtgtaattaaaccccaaaactcctcctgggcatgtaaatatacacgagttttgtgtggttgctttccctcctttggaagaactctctccttggccaggttcagtgtgctgctgcttcagtttgtcggccactgtaacttcttccgttgctcccgtggatattttttatctgtcttgttgcgggttgcagtttgtcaggttgtcggccgatatatacacgatgaacttatgatattattgggtgccgaatttttggtttgtgttaaaggaaattttagcctatatatagttgagattacatttgggtccac

SEQ ID NO: 12942 - protein, 297 aa, Triticum aestivum
  misc_feature (1)..(297): Ceres Seq. ID no. 14313519
MEPDQSGTGQTSPRGNDWEVVQLTASNYASAPGPARTEPSDEESEGQVYGAEGGDSAAAALLMSGHFSVPQNEAENLLMGADTSIEQQEARGSQYAVSDKGDDGDREEDPQEKLKDDVLDRIPSFDKGKSLSSVDMEPDDGSELHRGSLVGKDPVTFSSSVYNATDAEKEATESAKEKTEESPTLQNIDPVTDSSNIVASGDESKPDGSGAPRNAWWQKQLISLYRSAKESNKLWPIVVAAAALMGMAYFRRRWQKGKLQLQQVKLQPASSKEVIVGRLPFDHTSQIFHATEQTSLA

SEQ ID NO: 12943 - protein, 235 aa, Triticum aestivum
  misc_feature (1)..(235): Ceres Seq. ID no. 14313520
MSGHFSVPQNEAENLLMGADTSIEQQEARGSQYAVSDKGDDGDREEDPQEKLKDDVLDRIPSFDKGKSLSSVDMEPDDGSELHRGSLVGKDPVTFSSSVYNATDAEKEATESAKEKTEESPTLQNIDPVTDSSNIVASGDESKPDGSGAPRNAWWQKQLISLYRSAKESNKLWPIVVAAAALMGMAYFRRRWQKGKLQLQQVKLQPASSKEVIVGRLPFDHTSQIFHATEQTSLA

SEQ ID NO: 12944 - protein, 219 aa, Triticum aestivum
  misc_feature (1)..(219): Ceres Seq. ID no. 14313521
MGADTSIEQQEARGSQYAVSDKGDDGDREEDPQEKLKDDVLDRIPSFDKGKSLSSVDMEPDDGSELHRGSLVGKDPVTFSSSVYNATDAEKEATESAKEKTEESPTLQNIDPVTDSSNIVASGDESKPDGSGAPRNAWWQKQLISLYRSAKESNKLWPIVVAAAALMGMAYFRRRWQKGKLQLQQVKLQPASSKEVIVGRLPFDHTSQIFHATEQTSLA

SEQ ID NO: 12945 - DNA, 1536 bp, Triticum aestivum
  misc_feature (1)..(1536): Ceres Seq. ID no. 14313522
aaaacggatgttcggtcgtgccgtcgtggagtttggctaggcaacgcagctcggatcccgcggaaaaggcaggcaacacaggcagcggcacacggtacagcctcaggagacacagaggcgagatcccgtggcggatcagcggctgcctgtctgaaccggcaacgcatctcctccctcccccctctccagtctccctactccgacgatctatccgtcgagcctcctcaccgcgcgactcgcagcagcgccggagggggaggatggggcggccgccaagcagcgggggccccgcgttccggttcacgcacgcggaggtggcggagatggaggagcacctccgccacctcaacaacgccatcccgcagcgcaacgtcatccagggcctcgccgagaagttcaccgcctccgccgcccgcgccggcaagatccccgtccagtacaagcaggtctggaactggttccagaaccggaggtactcgcagcgggccaggacccccaggggcgcgccgccgccgcaggggaagatgctgcccacgggggccgaggaacaccacccggcctccttcagggctcaggggtcttcctcgtcctaccccggatcccactcaggaaagagtccttcggatggtggccaggccgagtttgaagcaaagtcagctagagatggtgcatggtacgatgttgctgcctttctgtcccacaggctctttgaaacaggggacccggaagtaaaagttcgattttctggatttgggcctgaggaggatgaatggattaatgttcgtaaatgtgtgaggctgcgttctcttccatgtgaatctgcagaatgtgttgctgtgcttcctggggatctcattctttgttttcaggaaggcaaagagcaggccctctattttgacgctcgtgttcttgatgctcaaaggcgcaggcatgatgtaagagggtgccgctgcaggtttcttgttcgttatgatcatgatcactctgaggagattgttcctctgaggaaggtatgccgtcgaccagaaactgatttcaggctccagatcttgcacgcatctagagcggcggcctctgcggatgctcagaatgttagcccagttgagcagaaaccccaaaaggcgcacaagatgatggatgtgaacactgccgaggtgaccgtggttcgcaacccagatcaaggagggccatctgacaagccggctgctcccttaccagctgcgcctgctggcacccacggtgattcagtttcagatgtgcagatggggaatgtggaggttattccaaaagttgaagctgcaaatgaagcacatgatgacaacatgaacgtgggagcgtagttgtttcgcttccctgtgcgcttcggtgtgtacttactaagtccaaaaaaatgtttgcttaggaacttccggtcgaggaaggatggtcgcccggtaactgtaatgtgccgatgtcgacttgtttgctgatgtgtgtacaaagtcttggattgtcggtatctatatagctatatcgtgagacgaatgttgttttcag

SEQ ID NO: 12946 - protein, 445 aa, Triticum aestivum
  misc_feature (1)..(445): Ceres Seq. ID no. 14313523
NGCSVVPSWSLARQRSSDPAEKAGNTGSGTRYSLRRHRGEIPWRISGCLSEPATHLLPPPSPVSLLRRSIRRASSPRDSQQRRRGRMGRPPSSGGPAFRFTHAEVAEMEEHLRHLNNAIPQRNVIQGLAEKFTASAARAGKIPVQYKQVWNWFQNRRYSQRARTPRGAPPPQGKMLPTGAEEHHPASFRAQGSSSSYPGSHSGKSPSDGGQAEFEAKSARDGAWYDVAAFLSHRLFETGDPEVKVRFSGFGPEEDEWINVRKCVRLRSLPCESAECVAVLPGDLILCFQEGKEQALYFDARVLDAQRRRHDVRGCRCRFLVRYDHDHSEEIVPLRKVCRRPETDFRLQILHASRAAASADAQNVSPVEQKPQKAHKMMDVNTAEVTVVRNPDQGGPSDKPAAPLPAAPAGTHGDSVSDVQMGNVEVIPKVEAANEAHDDNMNVGA

SEQ ID NO: 12947 - protein, 359 aa, Triticum aestivum
  misc_feature (1)..(359): Ceres Seq. ID no. 14313524
MGRPPSSGGPAFRFTHAEVAEMEEHLRHLNNAIPQRNVIQGLAEKFTASAARAGKIPVQYKQVWNWFQNRRYSQRARTPRGAPPPQGKMLPTGAEEHHPASFRAQGSSSSYPGSHSGKSPSDGGQAEFEAKSARDGAWYDVAAFLSHRLFETGDPEVKVRFSGFGPEEDEWINVRKCVRLRSLPCESAECVAVLPGDLILCFQEGKEQALYFDARVLDAQRRRHDVRGCRCRFLVRYDHDHSEEIVPLRKVCRRPETDFRLQILHASRAAASADAQNVSPVEQKPQKAHKMMDVNTAEVTVVRNPDQGGPSDKPAAPLPAAPAGTHGDSVSDVQMGNVEVIPKVEAANEAHDDNMNVGA

SEQ ID NO: 12948 - protein, 338 aa, Triticum aestivum
  misc_feature (1)..(338): Ceres Seq. ID no. 14313525
MEEHLRHLNNAIPQRNVIQGLAEKFTASAARAGKIPVQYKQVWNWFQNRRYSQRARTPRGAPPPQGKMLPTGAEEHHPASFRAQGSSSSYPGSHSGKSPSDGGQAEFEAKSARDGAWYDVAAFLSHRLFETGDPEVKVRFSGFGPEEDEWINVRKCVRLRSLPCESAECVAVLPGDLILCFQEGKEQALYFDARVLDAQRRRHDVRGCRCRFLVRYDHDHSEEIVPLRKVCRRPETDFRLQILHASRAAASADAQNVSPVEQKPQKAHKMMDVNTAEVTVVRNPDQGGPSDKPAAPLPAAPAGTHGDSVSDVQMGNVEVIPKVEAANEAHDDNMNVGA

SEQ ID NO: 12949 - DNA, 1341 bp, Triticum aestivum
  misc_feature (1)..(1341): Ceres Seq. ID no. 14313548
atttctgttaggatgcgtatctgagtttgttattcctttttctgtttctgttaagcgtggcaggaggcgaggcggaggaggaggagaagatagagacgcaacccacgcgcggctagctagggtttgttccatctcccccctctctcgctcgctccctctctctcccgaggagcggaggaaggcggagggccggaggaggaagagaggcgggggatgtcgtcgtcgaactcgccgtgcgcggcgtgcaagctgctgaggcgcaagtgcacgcaggggtgcgtgttcgcgccctacttcccgccggaccagccggccaagttcgccaacgtgcacaaggtgttcggcgccagcaacgtctccaagctgctcaacgagatccccgtggcgcagcgggaggacgccgtcaactcgctcgcctacgaggccgaggcgcgcctgcgcgaccccgtctacggctgcgtcgcctacatctccgtcctccagctcaagatcaagcaggtgcgcgaggagatcgccaacgcgcgcaaggagctcgccggctacatcggccaggcagcctacgcgcccgtcgtccccgtgcagcacccccacgcgcagtacgccgccgccggcatgggcctcgtccagccccacccgcacccgcaccagcagatggcgatgcagcagcagcagcacccgtaccaccagcagcagatcgccgaggcgcagcacctggcggccgtcgtcgaggtggcgcgcgccgggcagcagcagcagcagcagcagcatcaccaccagcaccagcagcacgagatgatgatgatgcgccagacctacgccaacgtccacggcggggccgccgccgggccaacggtggccgtcgagcctccccagcaggccgcggcctacgacggcaccgccccgttcctcatccagcagcaagcgtcgccttccgccctgacctaccgcatggaggagccgtccccgccgccgcagtcctcgggccactcccacgtcgacatgtcccacgcgtcgcagcagcagcgtcatcagcacacggacggcagcgacgaggggagcgggggcgccccgacggcctgatggccatgctcccgcctccttcgcctccctgtgtcgatatttcccccctagctttttttccacggtttctttgatgttcgtttgttgggcacgagtcttttcgtcttcttgatcatatgatatcgaactggcatcgccatggctccccggaaagcatatccatggctcccggaggcggacaagctggtgatcttgctcaagcatatccatggcacactcagaacgatgtcactgttgcattagtttgtgtttggattcatc

SEQ ID NO: 12950 - protein, 288 aa, Triticum aestivum
  misc_feature (1)..(288): Ceres Seq. ID no. 14313549
MSSSNSPCAACKLLRRKCTQGCVFAPYFPPDQPAKFANVHKVFGASNVSKLLNEIPVAQREDAVNSLAYEAEARLRDPVYGCVAYISVLQLKIKQVREEIANARKELAGYIGQAAYAPVVPVQHPHAQYAAAGMGLVQPHPHPHQQMAMQQQQHPYHQQQIAEAQHLAAVVEVARAGQQQQQQQHHHQHQQHEMMMMRQTYANVHGGAAAGPTVAVEPPQQAAAYDGTAPFLIQQQASPSALTYRMEEPSPPPQSSGHSHVDMSHASQQQRHQHTDGSDEGSGGAPTA

SEQ ID NO: 12951 - protein, 155 aa, Triticum aestivum
  misc_feature (1)..(155): Ceres Seq. ID no. 14313550
MGLVQPHPHPHQQMAMQQQQHPYHQQQIAEAQHLAAVVEVARAGQQQQQQQHHHQHQQHEMMMMRQTYANVHGGAAAGPTVAVEPPQQAAAYDGTAPFLIQQQASPSALTYRMEEPSPPPQSSGHSHVDMSHASQQQRHQHTDGSDEGSGGAPTA

SEQ ID NO: 12952 - DNA, 1410 bp, Triticum aestivum
  misc_feature (1)..(1410): Ceres Seq. ID no. 14313551
aggcttgtggtgctcccatcccatggcgccgtggctgctgctcccctccttcccgtggcctcccccgccccctcccggctcctcctctggccgcggcggcggaggcggtggaggcgacggcggagattggaagcccaacgtcgtcacggccatcgccggcgtccacctcggccgctccctccgccgtcgcctcgccggcctcctctgctcgccggaggtgcggtctcttgatgtcttaccgagaataggtgacatttggtttggaggatcacagccacttgacacacagcaccttcttgggacgctgggaaatgtgttctccacatcgtttgtttgcagttctgcttttttcggtgggaataggtcaggtgggagatacgtcggtagcggaaatttgcagcccagacggtctcatgggatcaactcgaagaagaggctgtggactaatgtccttcttgctgttaacatcctggcttatatcgctcagatagcatcgcaaggaaagcttcttatgtggggagcaaaggtcaacagcctgattgatagaggggagttttggcgtttggctacatcaacaattcttcatggaaatcttactcatcttgctttcaattgtttttctttgaattcgattggccctactgtggagctcgttactggtcctaaaagatttcttgctgtttatttcacttccgcactggcaggttcactaatgagttatcgctattgtcaatcaccttctgttggcgcatcaggggccatttttggactggttggtgcctatgctgtttatacatggaggcacagaaagcttttggggcatggaagggaaagtttagagcagatcgcacgtgtggtcatcttaaacatgggtatgggtctcctttcaaggggcattgacaactggggtcatctaggaggcttgctcgggggagtggctgcggcatggtttcttggtccagcttggcaaaatcagtatgtaccaaaggagggaagaatggtgttcaaagacagggcacccattcaccagctaataggcagtaaacgatcgcggtaacagcgtgtatgataaccgtgctcctatttttactgtgtatattagctgagaaacgtgggagaggaaggataaaagaaagtaagaaggaagatcgagacaacataccaagcaaagggagcagccgaaaaccatggctgatacctagttttgcagaagaaatcacccaccatgtccatgtgtggcggctgctgagctagctctagctcagaggagaagagcagtgcctctcgagctagttggtgtgtttggatcatttgcaactgttacacttgtgacagggtaggtcaggcgatactgacaattgtattttacgtacatgtttatttatcaagcattgctagcgcctcgttgat

SEQ ID NO: 12953 - protein, 351 aa, Triticum aestivum
  misc_feature (1)..(351): Ceres Seq. ID no. 14313552
GLWCSHPMAPWLLLPSFPWPPPPPPGSSSGRGGGGGGGDGGDWKPNVVTAIAGVHLGRSLRRRLAGLLCSPEVRSLDVLPRIGDIWFGGSQPLDTQHLLGTLGNVFSTSFVCSSAFFGGNRSGGRYVGSGNLQPRRSHGINSKKRLWTNVLLAVNILAYIAQIASQGKLLMWGAKVNSLIDRGEFWRLATSTILHGNLTHLAFNCFSLNSIGPTVELVTGPKRFLAVYFTSALAGSLMSYRYCQSPSVGASGAIFGLVGAYAVYTWRHRKLLGHGRESLEQIARVVILNMGMGLLSRGIDNWGHLGGLLGGVAAAWFLGPAWQNQYVPKEGRMVFKDRAPIHQLIGSKRSR

SEQ ID NO: 12954 - protein, 344 aa, Triticum aestivum
  misc_feature (1)..(344): Ceres Seq. ID no. 14313553
MAPWLLLPSFPWPPPPPPGSSSGRGGGGGGGDGGDWKPNVVTAIAGVHLGRSLRRRLAGLLCSPEVRSLDVLPRIGDIWFGGSQPLDTQHLLGTLGNVFSTSFVCSSAFFGGNRSGGRYVGSGNLQPRRSHGINSKKRLWTNVLLAVNILAYIAQIASQGKLLMWGAKVNSLIDRGEFWRLATSTILHGNLTHLAFNCFSLNSIGPTVELVTGPKRFLAVYFTSALAGSLMSYRYCQSPSVGASGAIFGLVGAYAVYTWRHRKLLGHGRESLEQIARVVILNMGMGLLSRGIDNWGHLGGLLGGVAAAWFLGPAWQNQYVPKEGRMVFKDRAPIHQLIGSKRSR

SEQ ID NO: 12955 - protein, 181 aa, Triticum aestivum
  misc_feature (1)..(181): Ceres Seq. ID no. 14313554
MWGAKVNSLIDRGEFWRLATSTILHGNLTHLAFNCFSLNSIGPTVELVTGPKRFLAVYFTSALAGSLMSYRYCQSPSVGASGAIFGLVGAYAVYTWRHRKLLGHGRESLEQIARVVILNMGMGLLSRGIDNWGHLGGLLGGVAAAWFLGPAWQNQYVPKEGRMVFKDRAPIHQLIGSKRSR

SEQ ID NO: 12956 - DNA, 1979 bp, Triticum aestivum
  misc_feature (1)..(1979): Ceres Seq. ID no. 14313559
atgagaagatcaccatagcactggacaacctcccgatcccgagcagctccgattggaaggccgccgtggcgagatcccgcgcgggcagggcctcgatgggaccaccgccgaccaggtggcccctgctggccgccctcgtcgcggcggcgctgctcgccggcgcggcggcggcgacggaggaggcctacgtcacgctgctctacggcgacgagttcgtcctcggcgtgcgcgtcctgggcaagtccatccgcgacaccggcacgcggcgggacatggtcgtgctcgtctccgacggcgtctccgagtactcgcgggagctcctcgaggctgatggttggatcgtgaagcgtataactttactggctaatcctaaccaagtgagaccaacgaggttttggggtgtctacacaaagttgaagatattcaacatgacaagctacaaaaaggttgtttatcttgatgcagatactgtagttgtaaaaagtatcgaggatgttttcaagtgtaggaagttctgtgggaacttgaagcattctgaaagaatgaattccggagtgatggttgtggagccatctgaaactgttttcaaggatatgattagccaagtagaccggttgccttcctacactggaggggatcaaggttttcttaattcatattatgctgattttgctaactcccgcgtgtatgagccagactcacctttaacacctgaaccggagacacagcgcctttctaccttgtataatgctgatgttggtctttacatgctagccaacaagtggatggttgatgaaaaggaacttagagttattcactacacactaggtccccttaaaccctgggactggtggacagcttggcttgtaaaacctgtggagatatggcaggatgttaggcaaaaacttgaagaatctcttccgggaaccggtgggggaaggaaccctcatgatcagctggtggtcaaatttttattcattcttcccttctgcctgctgttatttggttattaccaatcatgctttcagaactataaggattttccaagtgtgcagtctttatgtgcgtttgcaagaagaggccgtcataagtataagtctgaagaggcacttccatcttattcagcagttggtgtttcatcatctacattttctacttcaaatcaaagaatctcaaacgggccacatctgaagctgccttcttatttcggggcgattgctgtgctaatctgttttatgtctgctggtgtctctcttgcctttgctttcactatcattccacgacaaattatgccatggacaggtctgctactgatgtttgagtggaccttcgtggcattcttcttattgtttggtagctatctccgttttgtctatcgatggggaagtatcagtgcaactcatgtgggatatagcaattctgattcatcagagaatcacatggctacaggccatcatcagcgcaatatatctgacttcgacatggaggcgacattttactggacagggatggctgtcatagctatcattactgtattttcaccaactatcttgggtataactgcattatttacaaagctagggttgatggttgccggtggtgttctgctggcatcttttatgacgtatgcttcggtgcatcttgctatctcagccttccacaagggtcaaaaagataggaatgggtcgagaactagaagaatttgtttctggtgtttgtagtaagctttgtgcctgcattgttaatttagttcatgttgttgtacatttttactcaaggaaattttggtggttccgttggcacagatattccacttttgtaacactgatgccaaatcaaaggtacataggttccaatagttgacatgcagctcgcaggcctgcaagtgtaaagctttttgtctataaaactcttcctgccatttgctcgttgtacaatatgatcggcggttctatattggaactatggaacatgaactc

SEQ ID NO: 12957 - protein, 572 aa, Triticum aestivum
  misc_feature (1)..(572): Ceres Seq. ID no. 14313560
EKITIALDNLPIPSSSDWKAAVARSRAGRASMGPPPTRWPLLAALVAAALLAGAAAATEEAYVTLLYGDEFVLGVRVLGKSIRDTGTRRDMVVLVSDGVSEYSRELLEADGWIVKRITLLANPNQVRPTRFWGVYTKLKIFNMTSYKKVVYLDADTVVVKSIEDVFKCRKFCGNLKHSERMNSGVMVVEPSETVFKDMISQVDRLPSYTGGDQGFLNSYYADFANSRVYEPDSPLTPEPETQRLSTLYNADVGLYMLANKWMVDEKELRVIHYTLGPLKPWDWWTAWLVKPVEIWQDVRQKLEESLPGTGGGRNPHDQLVVKFLFILPFCLLLFGYYQSCFQNYKDFPSVQSLCAFARRGRHKYKSEEALPSYSAVGVSSSTFSTSNQRISNGPHLKLPSYFGAIAVLICFMSAGVSLAFAFTIIPRQIMPWTGLLLMFEWTFVAFFLLFGSYLRFVYRWGSISATHVGYSNSDSSENHMATGHHQRNISDFDMEATFYWTGMAVIAIITVFSPTILGITALFTKLGLMVAGGVLLASFMTYASVHLAISAFHKGQKDRNGSRTRRICFWCL

SEQ ID NO: 12958 - protein, 541 aa, Triticum aestivum
  misc_feature (1)..(541): Ceres Seq. ID no. 14313561
MGPPPTRWPLLAALVAAALLAGAAAATEEAYVTLLYGDEFVLGVRVLGKSIRDTGTRRDMVVLVSDGVSEYSRELLEADGWIVKRITLLANPNQVRPTRFWGVYTKLKIFNMTSYKKVVYLDADTVVVKSIEDVFKCRKFCGNLKHSERMNSGVMVVEPSETVFKDMISQVDRLPSYTGGDQGFLNSYYADFANSRVYEPDSPLTPEPETQRLSTLYNADVGLYMLANKWMVDEKELRVIHYTLGPLKPWDWWTAWLVKPVEIWQDVRQKLEESLPGTGGGRNPHDQLVVKFLFILPFCLLLFGYYQSCFQNYKDFPSVQSLCAFARRGRHKYKSEEALPSYSAVGVSSSTFSTSNQRISNGPHLKLPSYFGAIAVLICFMSAGVSLAFAFTIIPRQIMPWTGLLLMFEWTFVAFFLLFGSYLRFVYRWGSISATHVGYSNSDSSENHMATGHHQRNISDFDMEATFYWTGMAVIAIITVFSPTILGITALFTKLGLMVAGGVLLASFMTYASVHLAISAFHKGQKDRNGSRTRRICFWCL

SEQ ID NO: 12959 - protein, 482 aa, Triticum aestivum
  misc_feature (1)..(482): Ceres Seq. ID no. 14313562
MVVLVSDGVSEYSRELLEADGWIVKRITLLANPNQVRPTRFWGVYTKLKIFNMTSYKKVVYLDADTVVVKSIEDVFKCRKFCGNLKHSERMNSGVMVVEPSETVFKDMISQVDRLPSYTGGDQGFLNSYYADFANSRVYEPDSPLTPEPETQRLSTLYNADVGLYMLANKWMVDEKELRVIHYTLGPLKPWDWWTAWLVKPVEIWQDVRQKLEESLPGTGGGRNPHDQLVVKFLFILPFCLLLFGYYQSCFQNYKDFPSVQSLCAFARRGRHKYKSEEALPSYSAVGVSSSTFSTSNQRISNGPHLKLPSYFGAIAVLICFMSAGVSLAFAFTIIPRQIMPWTGLLLMFEWTFVAFFLLFGSYLRFVYRWGSISATHVGYSNSDSSENHMATGHHQRNISDFDMEATFYWTGMAVIAIITVFSPTILGITALFTKLGLMVAGGVLLASFMTYASVHLAISAFHKGQKDRNGSRTRRICFWCL

SEQ ID NO: 12960 - DNA, 1643 bp, Triticum aestivum
  misc_feature (1)..(1643): Ceres Seq. ID no. 14313563
atgctacaagcagttctacaacactgtacggacgcaggaattcaatggcggttgactccatggaatcggtggccttcgtcgcggtgcccttcccggcgcagggccacctgaaccagctcatgcacctctccctgctggccgcgtcgcgggggctctccgtgcactacgcggcgcccgcggcgcacctccggcaggcccgctcgcgcctgcacggctgggatccgcaggccctcggctccctccagttccacgacctcggcgtctccacgttcgagtccccggcgcccgacccgaccgccccgtgccccttcccgaaccacctcatgtccatgtggcagaccttcaccaccgccgcgcgcgccccgctcgccgccctcctggagagcctctcggccacccaccgccgcgtggtcgtcgtgcacgacaggctcaactccttcgccgccgtcgaggcggcgcggctgagcaacggcgagtcgttcgcgctgcagtgcgtggccatctcgtacaacatcgggtggctggacaccgagcacccgctcctgcgcgacaacgacctccagttccaccccatcgacgcctgcatgtccaaggagttcctggagtacgtcttccagacggagaaggagatggaggaacaggggggcgtgcccaccgccggcatggtcatgaacacgtgccgcgcactcgagggcgacttcatggacgccattgcggcccacccggtgttcaaggaccagaagctcttcgcagttgggccactgaacccgctgctggacgcgagcgcccggacgccggcgacgacgcggcacgactgcatggagtggctcgacaagcagccgccgtcatcggtgctctacgtgtccttcgggacgacgtcgtctctcctgggagagcaaatcgcggagctggcagcggcactcaagggcagcaagcagaggttcatctgggtattgcgcgaggctgaccgtgccgacatattcaaggagcccggcgagagcctgcacgacaagctgctctctgagttcactaaagaaaccgaggggactgggctggtgatcaccgggtgggcgccgcagctggagatcctggcgcacggcgccacggcggcattcatgagccactgcggctggaactcgaccatggagagcctgagccacggcaagccgattctggcatggccaatgcattccgaccagccgtgggacgcggagcttctctgcaagtacctcaaggccgggctcctggtgaggccatgggagaagcacagcgaggtggtgccggcggcggccatccaggaggtgatcgaggaggcgatgctcacggacaaagggatggcggtgcggcagcgggcgaaggtgctcggcgaggccgttcgcgccgccgtggcagacggcggctcctcgagcaaaggcctcgacgacttcgttgcttacgtcacgaggtgatcagcgtatctgtgcgtgccatagacagatacgcattgggcggtttgatcattgcttcggatgtgtttgaaactttgaatcatgctttctacgaaagctggatttcagtatacaatgatttgtcgttttcaatgtattcatctactactcatttttaattacacacaagggccgagaagaaagatttggaggaac

SEQ ID NO: 12961 - protein, 481 aa, Triticum aestivum
  misc_feature (1)..(481): Ceres Seq. ID no. 14313564
ATSSSTTLYGRRNSMAVDSMESVAFVAVPFPAQGHLNQLMHLSLLAASRGLSVHYAAPAAHLRQARSRLHGWDPQALGSLQFHDLGVSTFESPAPDPTAPCPFPNHLMSMWQTFTTAARAPLAALLESLSATHRRVVVVHDRLNSFAAVEAARLSNGESFALQCVAISYNIGWLDTEHPLLRDNDLQFHPIDACMSKEFLEYVFQTEKEMEEQGGVPTAGMVMNTCRALEGDFMDAIAAHPVFKDQKLFAVGPLNPLLDASARTPATTRHDCMEWLDKQPPSSVLYVSFGTTSSLLGEQIAELAAALKGSKQRFIWVLREADRADIFKEPGESLHDKLLSEFTKETEGTGLVITGWAPQLEILAHGATAAFMSHCGWNSTMESLSHGKPILAWPMHSDQPWDAELLCKYLKAGLLVRPWEKHSEVVPAAAIQEVIEEAMLTDKGMAVRQRAKVLGEAVRAAVADGGSSSKGLDDFVAYVTR

SEQ ID NO: 12962 - protein, 467 aa, Triticum aestivum
  misc_feature (1)..(467): Ceres Seq. ID no. 14313565
MAVDSMESVAFVAVPFPAQGHLNQLMHLSLLAASRGLSVHYAAPAAHLRQARSRLHGWDPQALGSLQFHDLGVSTFESPAPDPTAPCPFPNHLMSMWQTFTTAARAPLAALLESLSATHRRVVVVHDRLNSFAAVEAARLSNGESFALQCVAISYNIGWLDTEHPLLRDNDLQFHPIDACMSKEFLEYVFQTEKEMEEQGGVPTAGMVMNTCRALEGDFMDAIAAHPVFKDQKLFAVGPLNPLLDASARTPATTRHDCMEWLDKQPPSSVLYVSFGTTSSLLGEQIAELAAALKGSKQRFIWVLREADRADIFKEPGESLHDKLLSEFTKETEGTGLVITGWAPQLEILAHGATAAFMSHCGWNSTMESLSHGKPILAWPMHSDQPWDAELLCKYLKAGLLVRPWEKHSEVVPAAAIQEVIEEAMLTDKGMAVRQRAKVLGEAVRAAVADGGSSSKGLDDFVAYVTR

SEQ ID NO: 12963 - protein, 462 aa, Triticum aestivum
  misc_feature (1)..(462): Ceres Seq. ID no. 14313566
MESVAFVAVPFPAQGHLNQLMHLSLLAASRGLSVHYAAPAAHLRQARSRLHGWDPQALGSLQFHDLGVSTFESPAPDPTAPCPFPNHLMSMWQTFTTAARAPLAALLESLSATHRRVVVVHDRLNSFAAVEAARLSNGESFALQCVAISYNIGWLDTEHPLLRDNDLQFHPIDACMSKEFLEYVFQTEKEMEEQGGVPTAGMVMNTCRALEGDFMDAIAAHPVFKDQKLFAVGPLNPLLDASARTPATTRHDCMEWLDKQPPSSVLYVSFGTTSSLLGEQIAELAAALKGSKQRFIWVLREADRADIFKEPGESLHDKLLSEFTKETEGTGLVITGWAPQLEILAHGATAAFMSHCGWNSTMESLSHGKPILAWPMHSDQPWDAELLCKYLKAGLLVRPWEKHSEVVPAAAIQEVIEEAMLTDKGMAVRQRAKVLGEAVRAAVADGGSSSKGLDDFVAYVTR

SEQ ID NO: 12964 - DNA, 1599 bp, Triticum aestivum
  misc_feature (1)..(1599): Ceres Seq. ID no. 14313567
acacacgcgcgcgcgcacacgcaagaaccgcccaagccgaacacacaagcaaagggagggacagcgcgcgagatcgagatgaaggtggaggtggtggacacgacgctggtgacgccgagcgagccgacgccgcggcacacgctgtggctctccaacctcgacctcgccgtgcccaagacgcacacgccgctcgtctactactacccggcgccccccgccggcgacggcggcgagaagcaggaagagttcttcgcgccggagaggctgcgggaggcgctggcgagggcgctggtgccgttctacccgctggcagggcggatggcgacgggccccgagggccggctcgagatcgactgcaacggcgagggcgcgctgttcgtcgtcgcgcgggccgacttcaccggcgacgagatgttccgggacttcgagccctccccggaggcgcgccgcctgctcgtccccttcgccgcctccggcgacccgccctgcctcctcgccatggtccaggtgacgttcctcaagtgcggcggcgtggccgtgggcacgggcatgcaccacgtgaccatggacggcgcgggcgcgatccagttcatccggacgtggacgaccctggcgcgcggcctggacgccgcgtccgtgcacccgtccccgccggtgcacgaccgcacggtgctgcgcgcgcgctctcccccgcatgccaccttcgagcacccggtctactccccgagcaacctcaacggcctgccccgccccttcgtcacccgcgtctacgccgtgtcccccaagctcctcgccggcatcaagtccagctgcgcgcccggcgtgtccacctactgcgcgctcaccgcgcacctgtggcgcgccatgtgcgtggcccgcgggctggcccccgacgccgagtcgcggctgcgcgtgccggccaacatccggcagcgcctgcgcccgcagctgccggccaactacttcggcaacgccatcgtgcgggacctggtgacggtgcgcgtcggcgacgtgctgtcgcagccgctggggttcgtggcggagcggatcaagcgcgcggtggcgcgggtggacgacgccttcgtgcgctccgtcatcgactacctggaggtggagtcggagaagggcagccaggcggcgcgcgggcagttcatgccggagacggacctgtgggtggtgagctggctgggcatgcccatccacgacgccgacttcggctggggctgccccaagttcgtggcgccggcgcagatgttcggcagcggcacggcctacgtcacgcaggcgcccgacaaggacgacggcgtgtccgtgctgttcgcgctcgagccagagtacctgcagtgcttcgagaaggccttctacggggagtgaccgaccaaagccttctacggtgatgcgcctttcaaagagccacttgggagttgggatctcgagtccgtcgatagtgtggagtgctgtatcataacgcaacagatactgcggaagtgtcgaggttgctgcttgtttctcgcgcctttcttcactgctactatgtgacattgtgggctaactattatctatacaaagtctaaatgaaaatggcctcaggtttagctc

SEQ ID NO: 12965 - protein, 464 aa, Triticum aestivum
  misc_feature (1)..(464): Ceres Seq. ID no. 14313568
TRARAHARTAQAEHTSKGRDSARDRDEGGGGGHDAGDAERADAAAHAVALQPRPRRAQDAHAARLLLPGAPRRRRRREAGRVLRAGEAAGGAGEGAGAVLPAGRADGDGPRGPARDRLQRRGRAVRRRAGRLHRRRDVPGLRALPGGAPPARPLRRLRRPALPPRHGPGDVPQVRRRGRGHGHAPRDHGRRGRDPVHPDVDDPGARPGRRVRAPVPAGARPHGAARALSPACHLRAPGLLPEQPQRPAPPLRHPRLRRVPQAPRRHQVQLRARRVHLLRAHRAPVARHVRGPRAGPRRRVAAARAGQHPAAPAPAAAGQLLRQRHRAGPGDGARRRRAVAAAGVRGGADQARGGAGGRRLRALRHRLPGGGVGEGQPGGARAVHAGDGPVGGELAGHAHPRRRLRLGLPQVRGAGADVRQRHGLRHAGARQGRRRVRAVRARARVPAVLREGLLRGVTDQSLLR

SEQ ID NO: 12966 - protein, 457 aa, Triticum aestivum
  misc_feature (1)..(457): Ceres Seq. ID no. 14313569
THARAHTQEPPKPNTQAKGGTAREIEMKVEVVDTTLVTPSEPTPRHTLWLSNLDLAVPKTHTPLVYYYPAPPAGDGGEKQEEFFAPERLREALARALVPFYPLAGRMATGPEGRLEIDCNGEGALFVVARADFTGDEMFRDFEPSPEARRLLVPFAASGDPPCLLAMVQVTFLKCGGVAVGTGMHHVTMDGAGAIQFIRTWTTLARGLDAASVHPSPPVHDRTVLRARSPPHATFEHPVYSPSNLNGLPRPFVTRVYAVSPKLLAGIKSSCAPGVSTYCALTAHLWRAMCVARGLAPDAESRLRVPANIRQRLRPQLPANYFGNAIVRDLVTVRVGDVLSQPLGFVAERIKRAVARVDDAFVRSVIDYLEVESEKGSQAARGQFMPETDLWVVSWLGMPIHDADFGWGCPKFVAPAQMFGSGTAYVTQAPDKDDGVSVLFALEPEYLQCFEKAFYGE

SEQ ID NO: 12967 - protein, 431 aa, Triticum aestivum
  misc_feature (1)..(431): Ceres Seq. ID no. 14313570
MKVEVVDTTLVTPSEPTPRHTLWLSNLDLAVPKTHTPLVYYYPAPPAGDGGEKQEEFFAPERLREALARALVPFYPLAGRMATGPEGRLEIDCNGEGALFVVARADFTGDEMFRDFEPSPEARRLLVPFAASGDPPCLLAMVQVTFLKCGGVAVGTGMHHVTMDGAGAIQFIRTWTTLARGLDAASVHPSPPVHDRTVLRARSPPHATFEHPVYSPSNLNGLPRPFVTRVYAVSPKLLAGIKSSCAPGVSTYCALTAHLWRAMCVARGLAPDAESRLRVPANIRQRLRPQLPANYFGNAIVRDLVTVRVGDVLSQPLGFVAERIKRAVARVDDAFVRSVIDYLEVESEKGSQAARGQFMPETDLWVVSWLGMPIHDADFGWGCPKFVAPAQMFGSGTAYVTQAPDKDDGVSVLFALEPEYLQCFEKAFYGE

SEQ ID NO: 12968 - DNA, 2011 bp, Triticum aestivum
  misc_feature (1)..(2011): Ceres Seq. ID no. 14313636
atccctgtctcccccctccctcttaactgcaagcaagcaatgggggctcccaaatgggtggttgcgccattggcgctgctgctcctcctgcagctcgccggcgcgtcccatgacgtccgacggagccttgaggccgaggcggcgacgccgtccgtgccggcctccattcttagccccctgctccggacgggctaccacttccaaccccccatgaactggatcaacgatccgaatggtccgctctactacaagggatggtaccacctgttctaccagtacaaccccaagggcgcggtgtggggcaacatcatctgggcgcactcggtgtcgcgcgacctcatcaactggatggccctcgaccccgccatcaagcccagcattccgaccgaccagtacggcgtctggtccggctcggcgacgatcctgcccaacggcacggtggcgatgctctacaccggcatcgaccgcccgggcaccaactaccagatccagaacatcgccttccccaaggacccctccgacccgctgctccgcgagtgggtcaagcccggctacaaccccatcgccgtccccgaggccggcatcaacgccacgcagttccgcgacccgaccaccgcctggcacgccggcgatggcctctggcgcatgctcgtgggcgggctcaagcccggcacgctccgcggcatggccatcctgtaccggagcagggacttcaagcactgggtccgcgccaagcacccgctccactcggccctcaccggcatgtgggagtgccccgacttcttccccgtgcgcgagcccgggaagacggacggcctcgacacctccgagttcggcccgcgctacaagtacgtgctcaagaacagcctcgacctcacccgctacgactactacaccgtgggcacctacaacaaccgcacggagcggtacgtgcccgacaaccccaccggcgacgtctaccagcggctccagtacgactacggcaacttctacgcgtccaagaccttctacgacccggccaagaaccgccgcgtgctgctgggctgggccaacgagtccgacagcgtcgcgcacgacaacgccaagggatgggccggcatccacgcgatcccgaggaagatatggctggaccccagcggcaagcagctgctgcagtggcccgtggaggagctggaccagctgaggggcaaggctgtcagcgtgggtgacaagctcgtcaagcccggccagcactttgaggtcactggcctgcagtcctaccagtctgacgtggaggtgagcttcgaggtgtcgagcctggacaaggcggagccgttcgatccggcctacgccaacgacgcgcagaagctctgcgggatgaagaacgccgacgtcaagggcggggtggggcccttcggcctctgggtcctggcctctgacaacctggccgagaagaccgccgtgttcttcagagtcttcaaggatgggcatggcaagcctctcgtcctcatgtgcagtgaccccaccaagtcatctctcaccccgggtctatacaagccgacttttgccgggtttgtcgacaccgacatttcgtccgggaagatctctctgagaagcttgatcgaccgatcggtggttgagagcttcggcgccggagggaagacctgcatcctatcgagagtgtacccatccatggcgatcgggaaagacgcacacctttatgtgttcaacaacggggtgaccgatatcaaggtgtccaaactaacggcgtgggagatgaaaaaaccaatgatgaatggtgcctaagtagtatataccgtatatgttttctcatgagtttaagtttttgttgaatgccattcgacatcgatgcacaccacgcaactgattgctcgtcttaatgaagacctctttgagtagaagtggttagagaaatttgttgtacaattgataatttctgtcacgtgttgtacgaataaacatgatgatcccacgctgaagacaataaagaccttaatgaatttcttctttc

SEQ ID NO: 12969 - protein, 594 aa, Triticum aestivum
  misc_feature (1)..(594): Ceres Seq. ID no. 14313637
IPVSPLPLNCKQAMGAPKWVVAPLALLLLLQLAGASHDVRRSLEAEAATPSVPASILSPLLRTGYHFQPPMNWINDPNGPLYYKGWYHLFYQYNPKGAVWGNIIWAHSVSRDLINWMALDPAIKPSIPTDQYGVWSGSATILPNGTVAMLYTGIDRPGTNYQIQNIAFPKDPSDPLLREWVKPGYNPIAVPEAGINATQFRDPTTAWHAGDGLWRMLVGGLKPGTLRGMAILYRSRDFKHWVRAKHPLHSALTGMWECPDFFPVREPGKTDGLDTSEFGPRYKYVLKNSLDLTRYDYYTVGTYNNRTERYVPDNPTGDVYQRLQYDYGNFYASKTFYDPAKNRRVLLGWANESDSVAHDNAKGWAGIHAIPRKIWLDPSGKQLLQWPVEELDQLRGKAVSVGDKLVKPGQHFEVTGLQSYQSDVEVSFEVSSLDKAEPFDPAYANDAQKLCGMKNADVKGGVGPFGLWVLASDNLAEKTAVFFRVFKDGHGKPLVLMCSDPTKSSLTPGLYKPTFAGFVDTDISSGKISLRSLIDRSVVESFGAGGKTCILSRVYPSMAIGKDAHLYVFNNGVTDIKVSKLTAWEMKKPMMNGA

SEQ ID NO: 12970 - protein, 581 aa, Triticum aestivum
  misc_feature (1)..(581): Ceres Seq. ID no. 14313638
MGAPKWVVAPLALLLLLQLAGASHDVRRSLEAEAATPSVPASILSPLLRTGYHFQPPMNWINDPNGPLYYKGWYHLFYQYNPKGAVWGNIIWAHSVSRDLINWMALDPAIKPSIPTDQYGVWSGSATILPNGTVAMLYTGIDRPGTNYQIQNIAFPKDPSDPLLREWVKPGYNPIAVPEAGINATQFRDPTTAWHAGDGLWRMLVGGLKPGTLRGMAILYRSRDFKHWVRAKHPLHSALTGMWECPDFFPVREPGKTDGLDTSEFGPRYKYVLKNSLDLTRYDYYTVGTYNNRTERYVPDNPTGDVYQRLQYDYGNFYASKTFYDPAKNRRVLLGWANESDSVAHDNAKGWAGIHAIPRKIWLDPSGKQLLQWPVEELDQLRGKAVSVGDKLVKPGQHFEVTGLQSYQSDVEVSFEVSSLDKAEPFDPAYANDAQKLCGMKNADVKGGVGPFGLWVLASDNLAEKTAVFFRVFKDGHGKPLVLMCSDPTKSSLTPGLYKPTFAGFVDTDISSGKISLRSLIDRSVVESFGAGGKTCILSRVYPSMAIGKDAHLYVFNNGVTDIKVSKLTAWEMKKPMMNGA

SEQ ID NO: 12971 - protein, 524 aa, Triticum aestivum
  misc_feature (1)..(524): Ceres Seq. ID no. 14313639
MNWINDPNGPLYYKGWYHLFYQYNPKGAVWGNIIWAHSVSRDLINWMALDPAIKPSIPTDQYGVWSGSATILPNGTVAMLYTGIDRPGTNYQIQNIAFPKDPSDPLLREWVKPGYNPIAVPEAGINATQFRDPTTAWHAGDGLWRMLVGGLKPGTLRGMAILYRSRDFKHWVRAKHPLHSALTGMWECPDFFPVREPGKTDGLDTSEFGPRYKYVLKNSLDLTRYDYYTVGTYNNRTERYVPDNPTGDVYQRLQYDYGNFYASKTFYDPAKNRRVLLGWANESDSVAHDNAKGWAGIHAIPRKIWLDPSGKQLLQWPVEELDQLRGKAVSVGDKLVKPGQHFEVTGLQSYQSDVEVSFEVSSLDKAEPFDPAYANDAQKLCGMKNADVKGGVGPFGLWVLASDNLAEKTAVFFRVFKDGHGKPLVLMCSDPTKSSLTPGLYKPTFAGFVDTDISSGKISLRSLIDRSVVESFGAGGKTCILSRVYPSMAIGKDAHLYVFNNGVTDIKVSKLTAWEMKKPMMNGA

SEQ ID NO: 12972 - DNA, 1937 bp, Triticum aestivum
  misc_feature (1)..(1937): Ceres Seq. ID no. 14314088
ctattccaccgccccccttcctcccgccaccagcccaacctcgccgccggcctcactctccctctatcctccgccccaccgcccggcctcccaccaccggagcgcgccgccctccccgtcgaagaaaccagaacccctcgccctccgcgtgccctcgtcagctcggccgcgatgatctccgccatgtcctgggtccccaggggcgccgccaagagcgtccccatcgaggcggagccgcccaccaaggaggagatcgaggaggccatgaagaaaatcgccctcggcagagaggccgggagcgacgccgacgacgcggacggggacgaggacgacgacgccgtgatggaggtcgacggcgccgaggacgaggaggtcgacgaggtcgcccaggccaaggccgccgccaaggcgctcgggaccaagagcagctcgggctcggccgccgtcggcgacgtttccgacgggctcgccgagctcaacatggacgcctacgacgacgaggaggatgggctcgagcttttcagcaccgggctgggggacttgtactacaagagcaacgaggaggacccctatatcatcaagaacgaagaagatgatgatggcgaggatgacgatgaggagattgaggacatgactatcaaacctactgatatagtcattgtttgtgctcataacgaggatgaattcaattctctccaggttagtatagtggaagaactggaagatggggatcctaatatgtttgtgcaccatgaggtccctctctcagattttccgctctgcacagcttggatggattttaaccgtcaggatggcgaacagaaaggaaatttcatagctgttggcaccatggatcctacaattgaaatatggaacttggatgtcgtcgacgaggtcgaaccacattatgtgctaggaggagtttcaaaaaagaagaagaaagttaaggggaaaaagggaaaaacatataagaagggtagccatagaagttctgtgcttggtcttgcgtggaacacggtggtgaggaatgctctagctagtgcaagtgcagacaaaactgtgaaagtttgggacttaagtgctggtaaatgtttagtcacactgcaacatcatgatgacaaggttcaatcagttgcctggaggtcacctgaagttcttctcagtggatcttttgatagaacaattgccatgacagatatgaaagacagtggacaatgttgtcataaatggcctgtcgaagcagatgtagagagcttagtttgtgatccacacaatgaacactcctttgtggttagtcttgaaaatgggatggttcaagtatttgatattcggacagcttcatcaaattcaaatcctggacagccgatttttactctgcatgcacacgaaaaggccgtttcttccatatctttcgcaccttctacccctaattttcttgcgactggttcaactgacaaaatggtgaagctctgggatctatcgaataaccagccttcgtgtgtctcgtcgctgaatcctaagcttggagctatattctcggtgtcgttttcgatcgacaaccccttcctgttagcgtgcggaggatcgaaaggcaaactgaaggtctggaacacactgtctgaacccgccgtcgccaacaaatttggtaaggggcggcaaattgcaccagctctgcgaagcgaatcccccacagaatgatgggctcgagctgtttctggctatgtggtagaatagattttttcgcgtttcagttttgttactgggtgcaatgtaatgggagcatggatttatttatatatgtacaaccaaacgacagctgaaatggatctgtagcgggagttcgcagtttatcatggattccgttttatttggacctagaaaaaggaagtcaaagatagctgttttatactccctctgtttcaaatgtttcaaaatgc

SEQ ID NO: 12973 - protein, 565 aa, Triticum aestivum
  misc_feature (1)..(565): Ceres Seq. ID no. 14314089
LFHRPPSSRHQPNLAAGLTLPLSSAPPPGLPPPERAALPVEETRTPRPPRALVSSAAMISAMSWVPRGAAKSVPIEAEPPTKEEIEEAMKKIALGREAGSDADDADGDEDDDAVMEVDGAEDEEVDEVAQAKAAAKALGTKSSSGSAAVGDVSDGLAELNMDAYDDEEDGLELFSTGLGDLYYKSNEEDPYIIKNEEDDDGEDDDEEIEDMTIKPTDIVIVCAHNEDEFNSLQVSIVEELEDGDPNMFVHHEVPLSDFPLCTAWMDFNRQDGEQKGNFIAVGTMDPTIEIWNLDVVDEVEPHYVLGGVSKKKKKVKGKKGKTYKKGSHRSSVLGLAWNTVVRNALASASADKTVKVWDLSAGKCLVTLQHHDDKVQSVAWRSPEVLLSGSFDRTIAMTDMKDSGQCCHKWPVEADVESLVCDPHNEHSFVVSLENGMVQVFDIRTASSNSNPGQPIFTLHAHEKAVSSISFAPSTPNFLATGSTDKMVKLWDLSNNQPSCVSSLNPKLGAIFSVSFSIDNPFLLACGGSKGKLKVWNTLSEPAVANKFGKGRQIAPALRSESPTE

SEQ ID NO: 12974 - protein, 508 aa, Triticum aestivum
  misc_feature (1)..(508): Ceres Seq. ID no. 14314090
MISAMSWVPRGAAKSVPIEAEPPTKEEIEEAMKKIALGREAGSDADDADGDEDDDAVMEVDGAEDEEVDEVAQAKAAAKALGTKSSSGSAAVGDVSDGLAELNMDAYDDEEDGLELFSTGLGDLYYKSNEEDPYIIKNEEDDDGEDDDEEIEDMTIKPTDIVIVCAHNEDEFNSLQVSIVEELEDGDPNMFVHHEVPLSDFPLCTAWMDFNRQDGEQKGNFIAVGTMDPTIEIWNLDVVDEVEPHYVLGGVSKKKKKVKGKKGKTYKKGSHRSSVLGLAWNTVVRNALASASADKTVKVWDLSAGKCLVTLQHHDDKVQSVAWRSPEVLLSGSFDRTIAMTDMKDSGQCCHKWPVEADVESLVCDPHNEHSFVVSLENGMVQVFDIRTASSNSNPGQPIFTLHAHEKAVSSISFAPSTPNFLATGSTDKMVKLWDLSNNQPSCVSSLNPKLGAIFSVSFSIDNPFLLACGGSKGKLKVWNTLSEPAVANKFGKGRQIAPALRSESPTE

SEQ ID NO: 12975 - protein, 504 aa, Triticum aestivum
  misc_feature (1)..(504): Ceres Seq. ID no. 14314091
MSWVPRGAAKSVPIEAEPPTKEEIEEAMKKIALGREAGSDADDADGDEDDDAVMEVDGAEDEEVDEVAQAKAAAKALGTKSSSGSAAVGDVSDGLAELNMDAYDDEEDGLELFSTGLGDLYYKSNEEDPYIIKNEEDDDGEDDDEEIEDMTIKPTDIVIVCAHNEDEFNSLQVSIVEELEDGDPNMFVHHEVPLSDFPLCTAWMDFNRQDGEQKGNFIAVGTMDPTIEIWNLDVVDEVEPHYVLGGVSKKKKKVKGKKGKTYKKGSHRSSVLGLAWNTVVRNALASASADKTVKVWDLSAGKCLVTLQHHDDKVQSVAWRSPEVLLSGSFDRTIAMTDMKDSGQCCHKWPVEADVESLVCDPHNEHSFVVSLENGMVQVFDIRTASSNSNPGQPIFTLHAHEKAVSSISFAPSTPNFLATGSTDKMVKLWDLSNNQPSCVSSLNPKLGAIFSVSFSIDNPFLLACGGSKGKLKVWNTLSEPAVANKFGKGRQIAPALRSESPTE

SEQ ID NO: 12976 - DNA, 2140 bp, Triticum aestivum
  misc_feature (1)..(2140): Ceres Seq. ID no. 14314096
gtctccttccccacatcgtcgtcaatccccaattcccaaatcacgcgctccgacgaccaaaccctaacctcggatccccggaagcacgccaaattcgccaaccctcccctcagattgggcatgccagccccccgaaactccagcccgtgacctcgccggagacgatggcctcgctgccgccgcatccccgccggattcggcccatcgccgtggcctccctggtgctcttcctcctcttcctctacacccgctcggatgggaaccctccgcggctcccgggctccgattcgcgcccgctccaccggaggctcctctccggtgccgatcccgccagccccgccgcgtccagaggcgggaacctttcggaggtcaccgggctgaacggcgagcagctggagaacccctccaccgcgtgcgccggcatcgaccgccacgagggtttcgggtcccagtgcgagttcctccgggctcacccgcagtgcagctccggcgggttcgtcgactacctggacttcttctactgcaggtgcgagagattcaggctgcttggatatgccgtgcttgcagtgtgcctcgcggcgctgttctacatgctcggtaacacggccgcggactacttctgttgcagcctagagaagatgtctgcgctgctgcggctaccgccgacagtggctggtgttaccctgctcccctttggtaatggtgctcctgatgtgtttgccagcattgcagcgtttatggggtctggcgccggggatgtcgggctgaacagcgtgctgggcggagcggtgtttgttacctgcgtcgttgttggggcagtatcattgtccgtcgcggagaagaatgtgcagattgattggaggtgctttgtgagggatgttggattcttcctgatcactttggtggcactgtctattatgttgattgtcgggaaggtgaccgtttggggagctatgctgtttgtatcgatttatgtggtttatgcatttgtggtggctgcaaatgagttattaaggaagcatgcacggatgctgaagtttgatgtagtcacaccattgcttccggtgaggggaagtatcttctcacacggactagaggatgatgattctgtgtacagttcacttcttgaggaggatacaagtgatgacgcggcccaggtaaacacatcattgccgcagtggatgtgggcttctcatgtggctatctactcaaatcaagggagagatggttcacctgacaggcctttgtggggttggaatgaagaaggaagagtggatacctccacgcttaactactccaaactgtttctgtttttggagctacccttgacaataccaagaaagttgacgattccaatagttgaggaagaccgctggtcacaagaatatgctgttgccagtgctggcttggcacctctactcttagcatttctgtggaacagccaggatggagtatccacgggtgccagcgtagcagcatatgtgattgctggtatttttgggattgcacttgcaggtcttgcttttacattcaccagtcccgaccgccctccaaggagatacttactcccatgggtgtttggagggtttgtgatgagcatcgtttggttctacatcattgccaatgagctggttgcactgttggttgcatttggagtgatacttgggattaatccttcaattctcggtttaacggtgttagcatggggcaattcgatgggtgacttaatgtcaaatgtggccttggcaatgaatggtggagatggtgtacagattgctatgtctggctgttatgcaggacctatgtttaatacacttgctggcctaggaatatcgatgctacttggagcttggtcgacggcacccaactcttatgttcttccgcaggaccgctctcttatttacacgatgagcttcctggttgctgggttgatctgggcgcttgttacgctgccacgaagcggcatgcgacctaacaagacgcttggagttggcctcattgctctctactcagttttccttttcattagagtaagcagtgctatggggatattgccactcccgggcttgaattagttgtttgtgtctattgtacatgactgtcctttatacagatgaaatggagttgtacattgttcctc

SEQ ID NO: 12977 - protein, 690 aa, Triticum aestivum
  misc_feature (1)..(690): Ceres Seq. ID no. 14314097
LLPHIVVNPQFPNHALRRPNPNLGSPEARQIRQPSPQIGHASPPKLQPVTSPETMASLPPHPRRIRPIAVASLVLFLLFLYTRSDGNPPRLPGSDSRPLHRRLLSGADPASPAASRGGNLSEVTGLNGEQLENPSTACAGIDRHEGFGSQCEFLRAHPQCSSGGFVDYLDFFYCRCERFRLLGYAVLAVCLAALFYMLGNTAADYFCCSLEKMSALLRLPPTVAGVTLLPFGNGAPDVFASIAAFMGSGAGDVGLNSVLGGAVFVTCVVVGAVSLSVAEKNVQIDWRCFVRDVGFFLITLVALSIMLIVGKVTVWGAMLFVSIYVVYAFVVAANELLRKHARMLKFDVVTPLLPVRGSIFSHGLEDDDSVYSSLLEEDTSDDAAQVNTSLPQWMWASHVAIYSNQGRDGSPDRPLWGWNEEGRVDTSTLNYSKLFLFLELPLTIPRKLTIPIVEEDRWSQEYAVASAGLAPLLLAFLWNSQDGVSTGASVAAYVIAGIFGIALAGLAFTFTSPDRPPRRYLLPWVFGGFVMSIVWFYIIANELVALLVAFGVILGINPSILGLTVLAWGNSMGDLMSNVALAMNGGDGVQIAMSGCYAGPMFNTLAGLGISMLLGAWSTAPNSYVLPQDRSLIYTMSFLVAGLIWALVTLPRSGMRPNKTLGVGLIALYSVFLFIRVSSAMGILPLPGLN

SEQ ID NO: 12978 - protein, 636 aa, Triticum aestivum
  misc_feature (1)..(636): Ceres Seq. ID no. 14314098
MASLPPHPRRIRPIAVASLVLFLLFLYTRSDGNPPRLPGSDSRPLHRRLLSGADPASPAASRGGNLSEVTGLNGEQLENPSTACAGIDRHEGFGSQCEFLRAHPQCSSGGFVDYLDFFYCRCERFRLLGYAVLAVCLAALFYMLGNTAADYFCCSLEKMSALLRLPPTVAGVTLLPFGNGAPDVFASIAAFMGSGAGDVGLNSVLGGAVFVTCVVVGAVSLSVAEKNVQIDWRCFVRDVGFFLITLVALSIMLIVGKVTVWGAMLFVSIYVVYAFVVAANELLRKHARMLKFDVVTPLLPVRGSIFSHGLEDDDSVYSSLLEEDTSDDAAQVNTSLPQWMWASHVAIYSNQGRDGSPDRPLWGWNEEGRVDTSTLNYSKLFLFLELPLTIPRKLTIPIVEEDRWSQEYAVASAGLAPLLLAFLWNSQDGVSTGASVAAYVIAGIFGIALAGLAFTFTSPDRPPRRYLLPWVFGGFVMSIVWFYIIANELVALLVAFGVILGINPSILGLTVLAWGNSMGDLMSNVALAMNGGDGVQIAMSGCYAGPMFNTLAGLGISMLLGAWSTAPNSYVLPQDRSLIYTMSFLVAGLIWALVTLPRSGMRPNKTLGVGLIALYSVFLFIRVSSAMGILPLPGLN

SEQ ID NO: 12979 - protein, 494 aa, Triticum aestivum
  misc_feature (1)..(494): Ceres Seq. ID no. 14314099
MLGNTAADYFCCSLEKMSALLRLPPTVAGVTLLPFGNGAPDVFASIAAFMGSGAGDVGLNSVLGGAVFVTCVVVGAVSLSVAEKNVQIDWRCFVRDVGFFLITLVALSIMLIVGKVTVWGAMLFVSIYVVYAFVVAANELLRKHARMLKFDVVTPLLPVRGSIFSHGLEDDDSVYSSLLEEDTSDDAAQVNTSLPQWMWASHVAIYSNQGRDGSPDRPLWGWNEEGRVDTSTLNYSKLFLFLELPLTIPRKLTIPIVEEDRWSQEYAVASAGLAPLLLAFLWNSQDGVSTGASVAAYVIAGIFGIALAGLAFTFTSPDRPPRRYLLPWVFGGFVMSIVWFYIIANELVALLVAFGVILGINPSILGLTVLAWGNSMGDLMSNVALAMNGGDGVQIAMSGCYAGPMFNTLAGLGISMLLGAWSTAPNSYVLPQDRSLIYTMSFLVAGLIWALVTLPRSGMRPNKTLGVGLIALYSVFLFIRVSSAMGILPLPGLN

SEQ ID NO: 12980 - DNA, 2114 bp, Triticum aestivum
  misc_feature (1)..(2114): Ceres Seq. ID no. 14314100
gcctggttcaccaccaccgctgcttagcccggaagattcctcctaccctccctcgtctcgtgcgtcgtgtccaaaccccaaaccctcacgcgaagtcacgcacccccggcgacggcgatggatctccgccgcccgccgcgctcgacgtccggcggcgtcgagcccaagatccgccaggtcggcttcgtcacccctggcgtttcggccccgtccgagccgcccgccgccgccgccgcggcggtatcactgcctggcgcggccgccgggtcgcctccggcgtcggacctctccccgggctcgctctcccccgtcatgatccctcctccgcggcacgtggatcacctctcccccgactccccctctcccccggcgtccgacgtcctcctcctcgcgtcctcggcgcctcagccttcctccatgcgcttcgccgctgcatccgagttcggagaggaggattcgaggtccctggccccttccgcgggggagctagaaacaaacaagggagatttggctgaaataaggaatgaagatgctccagcgtccattccgcaaaagcagaaaccttctaaagcagagaggcgtgctattcaggaggctcagcgtgctgcgaaagctgctgcgaaggaggcaggtttatcaggaaagtcaacaggcgctgcttctggggctaatcctgcaacatccaagcaagccaagccagctaaaatttctcagaagaaagatgtgccccatgctccaagtacagttgcttctgagaagaaggttactgaacgccaaccagagagagatagaaaaaaagatgttcctcatccgagaatgcagtttgatgatgtgcatcgggtggagaaagcaaaaaaacgtgcaattgtcaaccaatcagaggctcgaaacagagttgaattgtttaggcatctgccacagtacgtccatggcactcaacttcctgacctcgagtcaaaattctttcagctggaaccaattcatccttctgtgtacaaggtcggtctccaatatttgtctggtgaggtatctggtggcaatggtcgttgcatagcaatgcttcttgcgttcagagaggcaataaaagattactccacaccgccaaataaaactctcagcagagaccttactgcaaaagtcagtagttatgtgtcattttttatcgagtgccgtccactatcaattagcatgggcaatgctatcaggttcctgaaaaacaggattgccaagctaccaattacattgtcggagtcagaagccaaggccagtcttcagtctgatattgatcgttttattaatgagaagatagttgttgcagatcaggttattgtcagtcatgccatcacaaaagtcagagacgatgatgtcttgctaacatatgggtcatcatcagttgttgaaatgattttggagcatgctcatgaacttggtaggaagttccgtgttatagtgatggattctcgtcccaagctcgaggggcaaggattactgcgtagattagtggcaaagggcattaactgcacatatactcatataaatgcagtttcatacatcatgcatgaagttacaagagtcttcttgggtgcatcctcaatattatcaaatggaacagtttattcccgagttggcacagcatccgtggctatggtggcacatgcatttggaattcctgttttggtttgctgcgaggcatacaaatttcatgagagggtgcaacttgattctatatgcgctaatgagcttggtgatccagatgtgatttcgaaaattcctgggagggcagacttgggcgatcttaagaactgggctgacaacgagaatctccaactgttaaatctcacgtatgatgcaaccccttctgattatgtgtcgatgatcataacggattatggaatgcttccacctacaagtgtgccggtcatcgtgagagagtaccgcaaggagcagctgtgggtatagatctacttgcagtgtgatcgcagttttggcaactgttgctgcctaggtgcagcatgagtggacatatacaacttgtatgtttttgagatgtgggctgtcaaacctctttgccgacttaccgttttgtctactcaaaatggtcgtctagttttgtc

SEQ ID NO: 12981 - protein, 613 aa, Triticum aestivum
  misc_feature (1)..(613): Ceres Seq. ID no. 14314101
MDLRRPPRSTSGGVEPKIRQVGFVTPGVSAPSEPPAAAAAAVSLPGAAAGSPPASDLSPGSLSPVMIPPPRHVDHLSPDSPSPPASDVLLLASSAPQPSSMRFAAASEFGEEDSRSLAPSAGELETNKGDLAEIRNEDAPASIPQKQKPSKAERRAIQEAQRAAKAAAKEAGLSGKSTGAASGANPATSKQAKPAKISQKKDVPHAPSTVASEKKVTERQPERDRKKDVPHPRMQFDDVHRVEKAKKRAIVNQSEARNRVELFRHLPQYVHGTQLPDLESKFFQLEPIHPSVYKVGLQYLSGEVSGGNGRCIAMLLAFREAIKDYSTPPNKTLSRDLTAKVSSYVSFFIECRPLSISMGNAIRFLKNRIAKLPITLSESEAKASLQSDIDRFINEKIVVADQVIVSHAITKVRDDDVLLTYGSSSVVEMILEHAHELGRKFRVIVMDSRPKLEGQGLLRRLVAKGINCTYTHINAVSYIMHEVTRVFLGASSILSNGTVYSRVGTASVAMVAHAFGIPVLVCCEAYKFHERVQLDSICANELGDPDVISKIPGRADLGDLKNWADNENLQLLNLTYDATPSDYVSMIITDYGMLPPTSVPVIVREYRKEQLWV

SEQ ID NO: 12982 - protein, 548 aa, Triticum aestivum
  misc_feature (1)..(548): Ceres Seq. ID no. 14314102
MIPPPRHVDHLSPDSPSPPASDVLLLASSAPQPSSMRFAAASEFGEEDSRSLAPSAGELETNKGDLAEIRNEDAPASIPQKQKPSKAERRAIQEAQRAAKAAAKEAGLSGKSTGAASGANPATSKQAKPAKISQKKDVPHAPSTVASEKKVTERQPERDRKKDVPHPRMQFDDVHRVEKAKKRAIVNQSEARNRVELFRHLPQYVHGTQLPDLESKFFQLEPIHPSVYKVGLQYLSGEVSGGNGRCIAMLLAFREAIKDYSTPPNKTLSRDLTAKVSSYVSFFIECRPLSISMGNAIRFLKNRIAKLPITLSESEAKASLQSDIDRFINEKIVVADQVIVSHAITKVRDDDVLLTYGSSSVVEMILEHAHELGRKFRVIVMDSRPKLEGQGLLRRLVAKGINCTYTHINAVSYIMHEVTRVFLGASSILSNGTVYSRVGTASVAMVAHAFGIPVLVCCEAYKFHERVQLDSICANELGDPDVISKIPGRADLGDLKNWADNENLQLLNLTYDATPSDYVSMIITDYGMLPPTSVPVIVREYRKEQLWV

SEQ ID NO: 12983 - protein, 513 aa, Triticum aestivum
  misc_feature (1)..(513): Ceres Seq. ID no. 14314103
MRFAAASEFGEEDSRSLAPSAGELETNKGDLAEIRNEDAPASIPQKQKPSKAERRAIQEAQRAAKAAAKEAGLSGKSTGAASGANPATSKQAKPAKISQKKDVPHAPSTVASEKKVTERQPERDRKKDVPHPRMQFDDVHRVEKAKKRAIVNQSEARNRVELFRHLPQYVHGTQLPDLESKFFQLEPIHPSVYKVGLQYLSGEVSGGNGRCIAMLLAFREAIKDYSTPPNKTLSRDLTAKVSSYVSFFIECRPLSISMGNAIRFLKNRIAKLPITLSESEAKASLQSDIDRFINEKIVVADQVIVSHAITKVRDDDVLLTYGSSSVVEMILEHAHELGRKFRVIVMDSRPKLEGQGLLRRLVAKGINCTYTHINAVSYIMHEVTRVFLGASSILSNGTVYSRVGTASVAMVAHAFGIPVLVCCEAYKFHERVQLDSICANELGDPDVISKIPGRADLGDLKNWADNENLQLLNLTYDATPSDYVSMIITDYGMLPPTSVPVIVREYRKEQLWV

SEQ ID NO: 12984 - DNA, 1318 bp, Triticum aestivum
  misc_feature (1)..(1318): Ceres Seq. ID no. 14314112
aaggacagagaagccaggcggcagcaacccctttcctccaatctccgtccattcgagacgtctgcggggccgggcaaggcatggtcgccatgctgcccgccgcgaggggggacgccgccccagccgccagcgccggcgccgccgacaagctcgtccacgggcctgtcaccgacggcaagtgcaagaagaaggccccgaggatgatccacaaggccgagagggagaagcacaagcgcgacctgctcaacgatctcttcagcgagcttgacgaaatgctagaagcagacaggcagaccaatgggaaggcatgtatattgactgacaccactcgaatccttcgagacctgctttcgcaattagaatctctccgaaaggagaatagcaccctgcagaatgaatcccattatgttacgatggagaggaatgagctgcaggatgagaacggtgtgctccgcaatgaaattctggagctacaaaatgagctggcgacgcttcccgcaggcaacccaggttggggccatgctactgctggatcgcctcaccctgcgggcacagttttcccgtcacagcaaccaatgcagccgaccaccatcgcaagcgcagtattccccttgcagcagcctctgcaacagacaacaatcctggagcacccttatgcaccaccaccaccaccacgggaacttaagctcttcccagatgctgcgtctgatatcgaaggccttgaaccatcagaagatcaggaggccgccaaccatattgcgcgaccgctggcgaggtacccaacacagtcagcgttgtggcctgtaagcctgggtctcccgaggatggaagacgaacagtgtagcagtggcacaaccggcagtagcaaggaaggtagtagctctgcctctagtagagattgagtagatcagctccaaccagtcaggaagtttctctttgagcgtagcgaatatacacagatgagcatgtggcatgtaaataccagactccatcttggatctgggaatgttatgttagatgagaagatgacactccaatgggaatcagaatagcagcatttctcatcctttgtgttgcaccgtatcatatatatgaactgatctagatttgatatttgcaaagaaaaactacagcaataagcaatggattatatttatcggtgggggtaaccagaagcggaactgaagaggaaattgcaggcgactctcttcaaccatgtagagggttgcgtagagggtttcctttccttgcattggggccaatctcttcaaccgtgtacttccctgatccaaacccaaagagaaaatatatgagtttc

SEQ ID NO: 12985 - protein, 299 aa, Triticum aestivum
  misc_feature (1)..(299): Ceres Seq. ID no. 14314113
GQRSQAAATPFLQSPSIRDVCGAGQGMVAMLPAARGDAAPAASAGAADKLVHGPVTDGKCKKKAPRMIHKAEREKHKRDLLNDLFSELDEMLEADRQTNGKACILTDTTRILRDLLSQLESLRKENSTLQNESHYVTMERNELQDENGVLRNEILELQNELATLPAGNPGWGHATAGSPHPAGTVFPSQQPMQPTTIASAVFPLQQPLQQTTILEHPYAPPPPPRELKLFPDAASDIEGLEPSEDQEAANHIARPLARYPTQSALWPVSLGLPRMEDEQCSSGTTGSSKEGSSSASSRD

SEQ ID NO: 12986 - protein, 273 aa, Triticum aestivum
  misc_feature (1)..(273): Ceres Seq. ID no. 14314114
MVAMLPAARGDAAPAASAGAADKLVHGPVTDGKCKKKAPRMIHKAEREKHKRDLLNDLFSELDEMLEADRQTNGKACILTDTTRILRDLLSQLESLRKENSTLQNESHYVTMERNELQDENGVLRNEILELQNELATLPAGNPGWGHATAGSPHPAGTVFPSQQPMQPTTIASAVFPLQQPLQQTTILEHPYAPPPPPRELKLFPDAASDIEGLEPSEDQEAANHIARPLARYPTQSALWPVSLGLPRMEDEQCSSGTTGSSKEGSSSASSRD

SEQ ID NO: 12987 - protein, 270 aa, Triticum aestivum
  misc_feature (1)..(270): Ceres Seq. ID no. 14314115
MLPAARGDAAPAASAGAADKLVHGPVTDGKCKKKAPRMIHKAEREKHKRDLLNDLFSELDEMLEADRQTNGKACILTDTTRILRDLLSQLESLRKENSTLQNESHYVTMERNELQDENGVLRNEILELQNELATLPAGNPGWGHATAGSPHPAGTVFPSQQPMQPTTIASAVFPLQQPLQQTTILEHPYAPPPPPRELKLFPDAASDIEGLEPSEDQEAANHIARPLARYPTQSALWPVSLGLPRMEDEQCSSGTTGSSKEGSSSASSRD

SEQ ID NO: 12988 - DNA, 1632 bp, Triticum aestivum
  misc_feature (1)..(1632): Ceres Seq. ID no. 14316013
aaaaaagaagcaaagctttcctcctccacacaacgcactcacaggctcacagcccaacacaatcaccatggccccaaccagcagcaccaaccgcggccgccgccgcgtggtcctcttaccgctgccataccaaggccacatcaaccccatgctgcgcctcgccgccgcgctgcactcccgcggcctcgcggtcactatcctccacccggagacccgcgcgccggaccgcgggaagctccctgcggactaccgcctggtcaccatcccggacagcataccgccggagctcgccgcgtccgaggacatcgcgtcgttcgtcttcgcgctgaacaagaactgtgcggcgccgttccgggactacctggccggcgcccttagagaggaggaggacggccacgtcgccttcgtggtcgccgacgtcgactggttcgcgccgctctccgtggccagggagctgggcgtggccgctctggccctcatgaccagcagcgccgccaggttcctggtgtacttggcgtacccaagcctgtgccacaagggctatttgcccgtccaagagtcgaatttcaacactacagttgaggagcttccccccttccttgtacgagacttggatcgcgtgatggacatggctcgacacctcgcgtacgccgatctcctcgctcacatcgtcgccggcgtgaggcaatcatccggcctaataatcaacacatccgaagacatggagggcatggagatcgagaggatccgcagcgagatcgcccgcccggtgttcgccgtcggccctctgcacatgatgacgccgtctctatccgtccatagcagcctactgacagaagatcgcagctgtttggactggttggacacacaacggccaaactctgtgctctacgtgagctttgggagcctggtgggcatcgacacagacgagttcttggagatggcctggggcctggccgacagccagcgcccgttcgtgtgggtggtccggccggggctggtgcacggctgtgagctcagcgcgctccctgaagagctgcaagagaagataggtagcataggtagagtagtcagttgggctccgcagcaggaggtgctgaagcatccgtctgtggtcgcttttctcacgcactgcggctggaactcggcgacggagagcatatccgaaggcgtgccgatgatatgcagaccgttgtccagcgatcagatgggcactagcaggtatgtgtgtgatgtgtggaaggtgggggttagggtggaggtggagaaccagctgaagagagggggcgtccaggcggccatcacaagactgatggaaggaaaggaaggtgaagaggtcagggaaagaatgaaagatctgaggcatgcgatgagcaagtgtactgatgaaggtgggacatctgatgttgctttgcaacgtttagtggatttcagtgtttaagctagcacttaactatttagactatggctagaaaacatgtccgtgaattgcaacagaagaaatgtctctagctcatggaccagtgcaatgcaacgggacgggagtcaagtgatgcttttttctttttgcggggacggtaaacatgctcagtgcggctcttcctcaatcatcaatgcaagatttctataaag

SEQ ID NO: 12989 - protein, 479 aa, Triticum aestivum
  misc_feature (1)..(479): Ceres Seq. ID no. 14316014
KKKQSFPPPHNALTGSQPNTITMAPTSSTNRGRRRVVLLPLPYQGHINPMLRLAAALHSRGLAVTILHPETRAPDRGKLPADYRLVTIPDSIPPELAASEDIASFVFALNKNCAAPFRDYLAGALREEEDGHVAFVVADVDWFAPLSVARELGVAALALMTSSAARFLVYLAYPSLCHKGYLPVQESNFNTTVEELPPFLVRDLDRVMDMARHLAYADLLAHIVAGVRQSSGLIINTSEDMEGMEIERIRSEIARPVFAVGPLHMMTPSLSVHSSLLTEDRSCLDWLDTQRPNSVLYVSFGSLVGIDTDEFLEMAWGLADSQRPFVWVVRPGLVHGCELSALPEELQEKIGSIGRVVSWAPQQEVLKHPSVVAFLTHCGWNSATESISEGVPMICRPLSSDQMGTSRYVCDVWKVGVRVEVENQLKRGGVQAAITRLMEGKEGEEVRERMKDLRHAMSKCTDEGGTSDVALQRLVDFSV

SEQ ID NO: 12990 - protein, 457 aa, Triticum aestivum
  misc_feature (1)..(457): Ceres Seq. ID no. 14316015
MAPTSSTNRGRRRVVLLPLPYQGHINPMLRLAAALHSRGLAVTILHPETRAPDRGKLPADYRLVTIPDSIPPELAASEDIASFVFALNKNCAAPFRDYLAGALREEEDGHVAFVVADVDWFAPLSVARELGVAALALMTSSAARFLVYLAYPSLCHKGYLPVQESNFNTTVEELPPFLVRDLDRVMDMARHLAYADLLAHIVAGVRQSSGLIINTSEDMEGMEIERIRSEIARPVFAVGPLHMMTPSLSVHSSLLTEDRSCLDWLDTQRPNSVLYVSFGSLVGIDTDEFLEMAWGLADSQRPFVWVVRPGLVHGCELSALPEELQEKIGSIGRVVSWAPQQEVLKHPSVVAFLTHCGWNSATESISEGVPMICRPLSSDQMGTSRYVCDVWKVGVRVEVENQLKRGGVQAAITRLMEGKEGEEVRERMKDLRHAMSKCTDEGGTSDVALQRLVDFSV

SEQ ID NO: 12991 - protein, 430 aa, Triticum aestivum
  misc_feature (1)..(430): Ceres Seq. ID no. 14316016
MLRLAAALHSRGLAVTILHPETRAPDRGKLPADYRLVTIPDSIPPELAASEDIASFVFALNKNCAAPFRDYLAGALREEEDGHVAFVVADVDWFAPLSVARELGVAALALMTSSAARFLVYLAYPSLCHKGYLPVQESNFNTTVEELPPFLVRDLDRVMDMARHLAYADLLAHIVAGVRQSSGLIINTSEDMEGMEIERIRSEIARPVFAVGPLHMMTPSLSVHSSLLTEDRSCLDWLDTQRPNSVLYVSFGSLVGIDTDEFLEMAWGLADSQRPFVWVVRPGLVHGCELSALPEELQEKIGSIGRVVSWAPQQEVLKHPSVVAFLTHCGWNSATESISEGVPMICRPLSSDQMGTSRYVCDVWKVGVRVEVENQLKRGGVQAAITRLMEGKEGEEVRERMKDLRHAMSKCTDEGGTSDVALQRLVDFSV

SEQ ID NO: 12992 - DNA, 1292 bp, Triticum aestivum
  misc_feature (1)..(1292): Ceres Seq. ID no. 14316021
attgccaactccacgcatcatcgtctcggcaattagacaccacttccaagttccaactacaaacctccggcgagcggcggacaggttcacggccatggcttcttcttcttctccgaggacgatgagagccgtgcagtacgacaggtacggcggaggagccgaaggcctcaagcatgtggaggtgccgatcccgtcgcccaagaagggcgagctgctgctcaggatggaggcggccagcatcaaccgggtggactggaagttccagaacggcaaggcgcggcccttcctgcccagcaagttccccttcacccccgtctgcgagctcgccggcgaagtcgtggagctgggcgccggagtcagcggcttcagccagggcgacaaggtcatcgccgtcaacttcccgggtggcggcgggctggccgagtacgcggtggtgccggcgtcgcaagcagcgctgaggcctccagaggtgtccgcggtggagggcgcctgcctgccgatcgccgcgttcacggcgctcgccgcgctcagggcggccggggtcggcctcgacgccggcgacggccgtcccaagaacgtgctggtgaccgcggcctcgggcggcgtcggcaccttcgccgtgcagctggcgagcctcgcggggcaccaccacgtcacggccacctgcggcgcgcgcaacctggacctcatccggagcctgggggccgacgaggcgctggactatgacaccccggagggcgccgcgctgcgcgggccgtccggcccgaagcacgacgcggtggtgcactgcggggaggggttcccgtggtcggccttcaagccggcgctggccgacgccggcggcgtggtggtggacctcaccccgcgcctcgcgtccgtcgccgtcgcggtgctccattgggtgctcttctccaggaagaagctggtgccgctgatcgcgtctgccaaggaggaggacatggaggcgctgctgggcatggtgagtcaggggaagctccgggtggtgatcgactcgcggtacccgctgagcagggcgcacgagggctgggctaagagcatgagcggccacgccaccggcaaggtcgtcgtcgacatgggcgtcgccgatgacacagagtgatgatgctagtactactacaatacgtaaattcaaagtaaatagttgcagtgataccgattgccgaagatgatagagctgctcccatctgtccaagaatgtaaagaagcccattgcgatacatcatgtgattaatgacgtcttgataatcttcaacaggctgaagtttctacag

SEQ ID NO: 12993 - protein, 372 aa, Triticum aestivum
  misc_feature (1)..(372): Ceres Seq. ID no. 14316022
LPTPRIIVSAIRHHFQVPTTNLRRAADRFTAMASSSSPRTMRAVQYDRYGGGAEGLKHVEVPIPSPKKGELLLRMEAASINRVDWKFQNGKARPFLPSKFPFTPVCELAGEVVELGAGVSGFSQGDKVIAVNFPGGGGLAEYAVVPASQAALRPPEVSAVEGACLPIAAFTALAALRAAGVGLDAGDGRPKNVLVTAASGGVGTFAVQLASLAGHHHVTATCGARNLDLIRSLGADEALDYDTPEGAALRGPSGPKHDAVVHCGEGFPWSAFKPALADAGGVVVDLTPRLASVAVAVLHWVLFSRKKLVPLIASAKEEDMEALLGMVSQGKLRVVIDSRYPLSRAHEGWAKSMSGHATGKVVVDMGVADDTE

SEQ ID NO: 12994 - protein, 341 aa, Triticum aestivum
  misc_feature (1)..(341): Ceres Seq. ID no. 14316023
MASSSSPRTMRAVQYDRYGGGAEGLKHVEVPIPSPKKGELLLRMEAASINRVDWKFQNGKARPFLPSKFPFTPVCELAGEVVELGAGVSGFSQGDKVIAVNFPGGGGLAEYAVVPASQAALRPPEVSAVEGACLPIAAFTALAALRAAGVGLDAGDGRPKNVLVTAASGGVGTFAVQLASLAGHHHVTATCGARNLDLIRSLGADEALDYDTPEGAALRGPSGPKHDAVVHCGEGFPWSAFKPALADAGGVVVDLTPRLASVAVAVLHWVLFSRKKLVPLIASAKEEDMEALLGMVSQGKLRVVIDSRYPLSRAHEGWAKSMSGHATGKVVVDMGVADDTE

SEQ ID NO: 12995 - protein, 332 aa, Triticum aestivum
  misc_feature (1)..(332): Ceres Seq. ID no. 14316024
MRAVQYDRYGGGAEGLKHVEVPIPSPKKGELLLRMEAASINRVDWKFQNGKARPFLPSKFPFTPVCELAGEVVELGAGVSGFSQGDKVIAVNFPGGGGLAEYAVVPASQAALRPPEVSAVEGACLPIAAFTALAALRAAGVGLDAGDGRPKNVLVTAASGGVGTFAVQLASLAGHHHVTATCGARNLDLIRSLGADEALDYDTPEGAALRGPSGPKHDAVVHCGEGFPWSAFKPALADAGGVVVDLTPRLASVAVAVLHWVLFSRKKLVPLIASAKEEDMEALLGMVSQGKLRVVIDSRYPLSRAHEGWAKSMSGHATGKVVVDMGVADDTE

SEQ ID NO: 12996 - DNA, 2057 bp, Triticum aestivum
  misc_feature (1)..(2057): Ceres Seq. ID no. 14316029
gtgcagtgacagaatcacaaaaaatacagctctctgcgcactcgtccattcggcgactagtcgacgcagctgacgccaccacgcggcggcggcgcttgttcccatcgccgccaccggcatggccgagggcaccgacacggtgcgcgcgcccggcgacgcggaggagatggagaagggagagatcgcaggcgccgccgccggtgccgacggcgactccgccgcgccccagccggtggagcccacctgggctttctggatcggcaacggcaacccgcaggaggattccgccggccgggggaacaccgtccacaccttctccaccgtcgacgacttcttgagcctttacaataatatcctccaccctagtaaattgggtgtgggagctgacctccattgcttcaagaataagattgagccgaaatgcgaaggccccatatgtgctaatggaggtgcatggaccatcagttgtggcgaagggaaatcgcagccattgtggttggatacactactggcattgattggtggacaattcgaatatggtaatgaaatttgtggagcggtccttagcgtgtgtgggaagcaggaaacaatagctatatggattaaagatgctactaacgaagctgctcagctaagcattggcaagcagtggaaggaatttctggagtacaaggactcagttgagttcattgttcatgatagtgatgcaacggcagtacaatgctggtcttccacgtttcccgatgatccccttgacgtcatctacaacaaggtccccagtcactgcagccgcgtgcgctttgctgccgtctgcagatcgtggtgcactgcagcttcgcggcaccccgcgctgcctgaactcccgtggctgctcctctcaccacgcgaccgtgacacaacgaagcgcctctactgtcctgaggacagcaagatcctgtgcatctcgctcccgagcgatttcatcggcaactggttcgtcggctgtcatggtggtggctgggttgcatcattcgaaccaccaccgttcaggatcttgaacattttctccagtgttgaggttgcgctctccgagaaacagaaggggatcgtttgcccaggccgccttggccagatcatcatttggaaaatcatcttctccaaaccacccacctcaagtgactgtatcattgctgccatcaccgacaatcacggcatcgcgctctgcagggttgggtgtccgaacggtgggtggacaacaaaaggacatgtaagctacaccatggagcttgcagacatcgccttttgcaacggtaagctctatggtctcacacgggacagatgggaacttgtcaagtttgagatcggtgctgatgaagatggtgcgcccgtggtcacagccgttgatcggctagtggtcactgtcgagcaccagcagccccccagtgtctgggccaaccgggtggatgccagctacatttttgagctacacggcaagcttgcgacggcggtgaggtccccatggtcacccaacctcagacctttcttcaaagtgttcgaacttgttgacatcgacaccagcgaggggatggcacatggcacacacaaatggacagaggtgatgagcttgggtgactttgccctattcctgggtccaaacagctccaaggcggtgcatgtgtcagcagacaggcgcggcggtgtgaagagaaaccacatctactactcctaccatcgccgcttagcacagaaggaggtccttctcagcactgacctggtgttcctgacaagctccaacgctgatggtgattccgtgtactacagggaagatgaaagcttatccgcagccgtgggcggggttcataggattggggcagtaggatactatgtcaggggtagccctaatcctccagtgtggcttctccccctagcatagtggctttttatatacattgtattgcttagctgctgcacatgcctgaaaattgtaccgttagctgtataaccgtaaatgctctatggtttcaaccatgttgtatttagaacgaatgtacagcaattataattaatctgtactcatg

SEQ ID NO: 12997 - protein, 597 aa, Triticum aestivum
  misc_feature (1)..(597): Ceres Seq. ID no. 14316030
MAEGTDTVRAPGDAEEMEKGEIAGAAAGADGDSAAPQPVEPTWAFWIGNGNPQEDSAGRGNTVHTFSTVDDFLSLYNNILHPSKLGVGADLHCFKNKIEPKCEGPICANGGAWTISCGEGKSQPLWLDTLLALIGGQFEYGNEICGAVLSVCGKQETIAIWIKDATNEAAQLSIGKQWKEFLEYKDSVEFIVHDSDATAVQCWSSTFPDDPLDVIYNKVPSHCSRVRFAAVCRSWCTAASRHPALPELPWLLLSPRDRDTTKRLYCPEDSKILCISLPSDFIGNWFVGCHGGGWVASFEPPPFRILNIFSSVEVALSEKQKGIVCPGRLGQIIIWKIIFSKPPTSSDCIIAAITDNHGIALCRVGCPNGGWTTKGHVSYTMELADIAFCNGKLYGLTRDRWELVKFEIGADEDGAPVVTAVDRLVVTVEHQQPPSVWANRVDASYIFELHGKLATAVRSPWSPNLRPFFKVFELVDIDTSEGMAHGTHKWTEVMSLGDFALFLGPNSSKAVHVSADRRGGVKRNHIYYSYHRRLAQKEVLLSTDLVFLTSSNADGDSVYYREDESLSAAVGGVHRIGAVGYYVRGSPNPPVWLLPLA

SEQ ID NO: 12998 - protein, 581 aa, Triticum aestivum
  misc_feature (1)..(581): Ceres Seq. ID no. 14316031
MEKGEIAGAAAGADGDSAAPQPVEPTWAFWIGNGNPQEDSAGRGNTVHTFSTVDDFLSLYNNILHPSKLGVGADLHCFKNKIEPKCEGPICANGGAWTISCGEGKSQPLWLDTLLALIGGQFEYGNEICGAVLSVCGKQETIAIWIKDATNEAAQLSIGKQWKEFLEYKDSVEFIVHDSDATAVQCWSSTFPDDPLDVIYNKVPSHCSRVRFAAVCRSWCTAASRHPALPELPWLLLSPRDRDTTKRLYCPEDSKILCISLPSDFIGNWFVGCHGGGWVASFEPPPFRILNIFSSVEVALSEKQKGIVCPGRLGQIIIWKIIFSKPPTSSDCIIAAITDNHGIALCRVGCPNGGWTTKGHVSYTMELADIAFCNGKLYGLTRDRWELVKFEIGADEDGAPVVTAVDRLVVTVEHQQPPSVWANRVDASYIFELHGKLATAVRSPWSPNLRPFFKVFELVDIDTSEGMAHGTHKWTEVMSLGDFALFLGPNSSKAVHVSADRRGGVKRNHIYYSYHRRLAQKEVLLSTDLVFLTSSNADGDSVYYREDESLSAAVGGVHRIGAVGYYVRGSPNPPVWLLPLA

SEQ ID NO: 12999 - DNA, 1410 bp, Triticum aestivum
  misc_feature (1)..(1410): Ceres Seq. ID no. 14316032
tgagttcccagcgccctcagagccacagactcgagcgcgcccccatcctgctccccaaccaagaagcgagacgacggtgaccagtccccagaggccagagcgcactcccatcccatggatctgcagaccttcgtgctgagggtgaccatccactgccatggctgcaagaagaaggtccggaaggtgctcaagagcgtcgaaggcgtgcaggacgtgaaggtggatgcccagctgcacaaggtgatggtgaccggcaccgtggacgccgagacgctcatcaagaggctcaacaagtctggcaagcaggccctgccatggcaacacacgcctgccaagaatcccgaccctgcgccagccgacgcccccgcgccggccgaggacggcagcaaggatgctgctgtggccgacaagaagccggcggaggagccgcaggccgacagctcagacaagaagccggagcaggagacggcctcggagaagaagccggagcaggagacggcctcggagaagaagcctgagacggagaaggaagcagagtctgagaagaaggctgacaaggaggaggcgaaaccaagcgacgaggcaaagaaagacggcggcgagggcgcggcggccgagcccaaacccaaagcaaagggcaccgagcccgccgccgctgcaaaggaggccggcgatgacgagggcgaggcgaagaagaaacagagcaagcccaaggacgcggataggtccctggccccagcgccggcgccggcccatgcgccgaggtacgcgcaccaggaattcaacgcgccgcagccggtgatgagctacaacatggcgcagccgagagcgagcgtgtcccactacgcgccgcagccggagcagggctactcgcagcagcagcaggccgggtactcctcctcctcctccatgatggtgacgcagcacccaccgccaccggcgcagcaggcctactcccagcaggcgcagccaatgcagcaatggtcgccgtcctacctctacatgccgtacccgcacgcgtcgccggagtcctactaccaggactactacagcccgcccgggacgcacgcgtcgccgccgcccccgccgccgctccaggactcgtaccgcctattcgacgacgagaaccccaactcgtgcagcgtcatgtgatctgatcacggctccggccaccggcggaaaagtagaggcggccgtcctcataatcgtaatagagacggacctctctggttgtaggtagagtagcttgttactctcttcgattgggaggtcaaagctctccttgaccaatcctttttcttctcacttcttcctctttaatttcttcttttgttattgctactattactgttctaaatagagcatgtaattgtaatttacatgtagaatagtagcatcaatgagatctcc

SEQ ID NO: 13000 - protein, 345 aa, Triticum aestivum
  misc_feature (1)..(345): Ceres Seq. ID no. 14316033
MDLQTFVLRVTIHCHGCKKKVRKVLKSVEGVQDVKVDAQLHKVMVTGTVDAETLIKRLNKSGKQALPWQHTPAKNPDPAPADAPAPAEDGSKDAAVADKKPAEEPQADSSDKKPEQETASEKKPEQETASEKKPETEKEAESEKKADKEEAKPSDEAKKDGGEGAAAEPKPKAKGTEPAAAAKEAGDDEGEAKKKQSKPKDADRSLAPAPAPAHAPRYAHQEFNAPQPVMSYNMAQPRASVSHYAPQPEQGYSQQQQAGYSSSSSMMVTQHPPPPAQQAYSQQAQPMQQWSPSYLYMPYPHASPESYYQDYYSPPGTHASPPPPPPLQDSYRLFDDENPNSCSVM

SEQ ID NO: 13001 - protein, 302 aa, Triticum aestivum
  misc_feature (1)..(302): Ceres Seq. ID no. 14316034
MVTGTVDAETLIKRLNKSGKQALPWQHTPAKNPDPAPADAPAPAEDGSKDAAVADKKPAEEPQADSSDKKPEQETASEKKPEQETASEKKPETEKEAESEKKADKEEAKPSDEAKKDGGEGAAAEPKPKAKGTEPAAAAKEAGDDEGEAKKKQSKPKDADRSLAPAPAPAHAPRYAHQEFNAPQPVMSYNMAQPRASVSHYAPQPEQGYSQQQQAGYSSSSSMMVTQHPPPPAQQAYSQQAQPMQQWSPSYLYMPYPHASPESYYQDYYSPPGTHASPPPPPPLQDSYRLFDDENPNSCSVM

SEQ ID NO: 13002 - DNA, 1133 bp, Triticum aestivum
  misc_feature (1)..(1133): Ceres Seq. ID no. 14316043
cagatcaaacacctagggtttggttcgtgagagagaagagagggtgcgatgaagcttgcggggctcaagtcggtggacggagctcacgaggactcgatctgggcggccgcgtgggtgcccgctgctgaccaccgccccacggcgctgctcctcaccggctccatcgacgagaccgtccgcgcctggcaacccgacgacctcgccgccgcgtcccccccggcgggagggcacgcgctcggagtgatatccctcgcggcgcatcctgccggggtcatagccgccgcggtctccatcgacagccacgtccgcgtcttcgacgtcgactccggcgcatccgtcgccacgctcgatgccgcgccctccgaggtctggggcgtccagttccaccccaagggtgttgctctggctgcagctggtggtggcagtggatcagtaaaactctgggacacggagaagtggcaacctattgccagccttcctgttccgcgtccagagggagcccgcgctgataaaacaggcagcggcaagtttgttctttcagtggcctggagtccagatggcaagctcttagcatgtggatccatggatggcacgattgcggtgtatgatgcggtccgcatgaagttcctccaccacctggaggggcaccacatgccagtgaggtccatggtgttctcgccggtggacccccacgtgctcttgaccggatgtgacgactcccacatccacatctacgatgccaaggagaagggcctgatcggggccatgtcgggtcatgcgagctgggtgctgagcatcgacgtgagcccggatggcatggcggtggcgacaggctccagcgaccgcaccgtccggctctgggacatcaatgcgagggcgtcagttcagaccatgagcaaccactcagaccaggtctgggccgttgcattccggccgccgggaggggaaggagtccgtgctggccggctcgccagcgcttcggatgacaagagcatctccctgtacgattactcctagttttacagatttggcgagctgtgatacagccctctgttattgccgtctgttgtaccatgacctgtaccactgtacgatgctgactaaagccgacacttgcaagttgagcgggtttt

SEQ ID NO: 13003 - protein, 322 aa, Triticum aestivum
  misc_feature (1)..(322): Ceres Seq. ID no. 14316044
MKLAGLKSVDGAHEDSIWAAAWVPAADHRPTALLLTGSIDETVRAWQPDDLAAASPPAGGHALGVISLAAHPAGVIAAAVSIDSHVRVFDVDSGASVATLDAAPSEVWGVQFHPKGVALAAAGGGSGSVKLWDTEKWQPIASLPVPRPEGARADKTGSGKFVLSVAWSPDGKLLACGSMDGTIAVYDAVRMKFLHHLEGHHMPVRSMVFSPVDPHVLLTGCDDSHIHIYDAKEKGLIGAMSGHASWVLSIDVSPDGMAVATGSSDRTVRLWDINARASVQTMSNHSDQVWAVAFRPPGGEGVRAGRLASASDDKSISLYDYS

SEQ ID NO: 13004 - DNA, 681 bp, Triticum aestivum
  misc_feature (1)..(681): Ceres Seq. ID no. 15168852
acaaccgtaataacctcctcccctacaaatagcctcccaagaagccaaccaaggccagcacagcacagcacagagcaatagcaatagccatagccagcagcaatggagatagagtcggtcaagtgtgagtgctgtggcctgagggaggactgcaccccggactacattgcgagcgtgagagccggcttctacggcccagtggctgtgcgggctgtgctgcgaggccgtcagggacgaggccggcaggaagaagcaggctcacccgggcgtcgaggaggccgtgcgggcgcacatggccttctgcaagaagttcaagtccaaccccgccgtccgggtcgccgacggcatgcgccagatgctccggaggcggtccggtgacttgtccaagccgccgggctcctcctcctccaacaagtacggcactgcgcaggtcggagatgattcgcccgtgtcgctatattaattgaggagtacaccgttaccattctatggcttgtagaccatctagtgcttttttctcaggctcaaatctcctgtttcttttgtcatttttggcgtatgttcttattgtggaaagaacttggaatgtacagaaagtcataaatttctacgaaatagatgctaatagtgcttggctttgaaatgagactgtgttctttttgttcgttttaagaacgaagc

SEQ ID NO: 13005 - protein, 91 aa, Triticum aestivum
  misc_feature (1)..(91): Ceres Seq. ID no. 15168853
MEIESVKCECCGLREDCTPDYIASVRAGFYGPVAVRAVLRGRQGRGRQEEAGSPGRRGGRAGAHGLLQEVQVQPRRPGRRRHAPDAPEAVR

SEQ ID NO: 13006 - protein, 56 aa, Triticum aestivum
  misc_feature (1)..(56): Ceres Seq. ID no. 15168854
MAFCKKFKSNPAVRVADGMRQMLRRRSGDLSKPPGSSSSNKYGTAQVGDDSPVSLY

SEQ ID NO: 13007 - protein, 50 aa, Triticum aestivum
  misc_feature (1)..(50): Ceres Seq. ID no. 15168855
MACRPSSAFFSGSNLLFLLSFLAYVLIVERTWNVQKVINFYEIDANSAWL

SEQ ID NO: 13008 - DNA, 1055 bp, Triticum aestivum
  misc_feature (1)..(1055): Ceres Seq. ID no. 15168860
aaaataccaatcgctcccacgaacaaaagccaccaatgggctccacaaagctcatcgcagcgactcttctccccgctttcctcgccctccatctacacgccccagcagcaatggccaccgcggcaggaagctccaactccaacctcttccgcgactacatcggcgccctctacaacggcgtcaggttcgccgacgtgccggtcgacccgcgcgcccgcttcgacttcatcctcgcgttcgtcatcgactacaccaccgcgacggagcccccgtccccgaccaacggccggttcaacgtcttctggcaggacacggtgctcacccctgacgcggtcgccgaggtcaagcggcggaaccccaaagtgcgcgtggccgtcagtctcggcggcgccacggtcaacggcaggcccgtgttcttcaacgtcacctccggcgtcgactcctgggtccgcaacgccgtcgactccctcaccggcatcatccggcggtacggcctggatggcatcgacatcgactacgagcagttccaggtggacccggccaccttcgccgagtgcgccggccgtctcgtggcggcgctcaagagcaacggcgtcatcagcttcgcgtccatcgcgccgtacggcaacgccgacgtgcaacgctactaccggacgctgtgggcggcgcacggggccgcaatagactacgtcaacttccagttctacgcctacggtgctagcaccaccgcggcgcagtacgtcagcctcttcgacgagcagatcgccaactaccctggagccaacatcctggccagcttcaccacggcggcgacgaacacctcggtgccggtcgacaccgcgcttagtgcttgccggactctgcaggggcagggtaagctctacggcatatttgtctgggctgcagaccattccaggaaccaaggattcaagtatgagacacagtcgcaggccctgttgactgatgccaccacgtactagttacccacagcttcttggtttgcgtatatctatcttttagtgaaatcatatggaataaaacgagcatccgatttt

SEQ ID NO: 13009 - protein, 325 aa, Triticum aestivum
  misc_feature (1)..(325): Ceres Seq. ID no. 15168861
NTNRSHEQKPPMGSTKLIAATLLPAFLALHLHAPAAMATAAGSSNSNLFRDYIGALYNGVRFADVPVDPRARFDFILAFVIDYTTATEPPSPTNGRFNVFWQDTVLTPDAVAEVKRRNPKVRVAVSLGGATVNGRPVFFNVTSGVDSWVRNAVDSLTGIIRRYGLDGIDIDYEQFQVDPATFAECAGRLVAALKSNGVISFASIAPYGNADVQRYYRTLWAAHGAAIDYVNFQFYAYGASTTAAQYVSLFDEQIANYPGANILASFTTAATNTSVPVDTALSACRTLQGQGKLYGIFVWAADHSRNQGFKYETQSQALLTDATTY

SEQ ID NO: 13010 - protein, 314 aa, Triticum aestivum
  misc_feature (1)..(314): Ceres Seq. ID no. 15168862
MGSTKLIAATLLPAFLALHLHAPAAMATAAGSSNSNLFRDYIGALYNGVRFADVPVDPRARFDFILAFVIDYTTATEPPSPTNGRFNVFWQDTVLTPDAVAEVKRRNPKVRVAVSLGGATVNGRPVFFNVTSGVDSWVRNAVDSLTGIIRRYGLDGIDIDYEQFQVDPATFAECAGRLVAALKSNGVISFASIAPYGNADVQRYYRTLWAAHGAAIDYVNFQFYAYGASTTAAQYVSLFDEQIANYPGANILASFTTAATNTSVPVDTALSACRTLQGQGKLYGIFVWAADHSRNQGFKYETQSQALLTDATTY

SEQ ID NO: 13011 - protein, 289 aa, Triticum aestivum
  misc_feature (1)..(289): Ceres Seq. ID no. 15168863
MATAAGSSNSNLFRDYIGALYNGVRFADVPVDPRARFDFILAFVIDYTTATEPPSPTNGRFNVFWQDTVLTPDAVAEVKRRNPKVRVAVSLGGATVNGRPVFFNVTSGVDSWVRNAVDSLTGIIRRYGLDGIDIDYEQFQVDPATFAECAGRLVAALKSNGVISFASIAPYGNADVQRYYRTLWAAHGAAIDYVNFQFYAYGASTTAAQYVSLFDEQIANYPGANILASFTTAATNTSVPVDTALSACRTLQGQGKLYGIFVWAADHSRNQGFKYETQSQALLTDATTY

SEQ ID NO: 13012 - DNA, 1629 bp, Triticum aestivum
  misc_feature (1)..(1629): Ceres Seq. ID no. 15169507
aatccagagacaaactgttcgaacttgaaactccaaaagcgccaagccaagagcactgtcccgtgtcttcctctccactccactccacactctcgttcactctcactctcactccatggattttacactctcaccacctccattccccactctctataaagcatccccggccaagaacctccagtaaggtagaccacccgacattcccctcgaagccagccgagatgccgcaccgcggcggcctcctgcccctcctcctcgtcgccctcgcggcggcgccgctcgccgtggcgtggcgcccgtggccgccgcgcgacgccagcggcgccctggccggcctcggcgcgtccaagaagttcgaggggtcgtccgacttcgtcaagctggagtaccacatgggccccgtcctcgccgccgacatcaccgtgcacccgatctggtacggcgcctggcccgccgagcagaagcgcaccatccgcgccttcctgcgctccctctcgccgcagtcctccggggagaaggagggcgccgtcccgtcgccgtccgtggcggactggtggcgcaccgtgcggctctacacggaccagaccacggcgaacgtgtcggccgtggtggcgctcgggcaggagaagtgcgacgcgcggatgtcgcgcggcgcctcgctgacacggatggacatccagaccgtggtcaaggacgcggtgaccgcgcgcacgaggccgctcccggtggacgccggcggggtgtacctggtgctgacgtcgccagaggtccacgtggagaacttctgcgggcaggtgtgcgggttccactacttcaccttcccgtcggtggtcgggtacacgctcccctacgcgtgggtgggcaactcggcggggcggtgcccggaggtgtgcgcctacccgttcgccatcccggcctacgtgccggggcggcggcccgaggcgccgcccaacggcgacgcgggggtggacggcatggtgagcgtcatcgcgcacgagctggcggagatggcctccaacccgctggccaacgcgtggtacgccggcggggacccctcgttccccaccgagatcgccgacctgtgcgagggcatctacggcaccggcggcggcggcgcgtacaccggccagctgctcaccgacgggcggtccggcgcggcctacaacctcaacggcgtcggcgggcgcaggttcctggtgcagtgggtctgggacccctaccgcagctactgctccggccccaacgcgctcgaccaccagtagctagcagcttttcgttcgtttcaccgccgccgcaccctcgccgcatctcgcgctaccggtagaagtattcctcccactccctccagcattggtttccttcctcgggagttccatggccggccatgggagcgtgtcatgtatagagtcagtgagccgaagcatggtggtccggtccggtgagcccagcttggtcctcgggacatacggctggttcattgttggtatggctgcgtgcggacaatgttttggactttcaaatttgatgtcattttgtccatttccccgctcggtttcgttcaaatttgattagcattactacgtagcatgtttgaaacatgtagaacattgggagtacaattattgc

SEQ ID NO: 13013 - protein, 420 aa, Triticum aestivum
  misc_feature (1)..(420): Ceres Seq. ID no. 15169508
SRDKLFELETPKAPSQEHCPVSSSPLHSTLSFTLTLTPWILHSHHLHSPLSIKHPRPRTSSKVDHPTFPSKPAEMPHRGGLLPLLLVALAAAPLAVAWRPWPPRDASGALAGLGASKKFEGSSDFVKLEYHMGPVLAADITVHPIWYGAWPAEQKRTIRAFLRSLSPQSSGEKEGAVPSPSVADWWRTVRLYTDQTTANVSAVVALGQEKCDARMSRGASLTRMDIQTVVKDAVTARTRPLPVDAGGVYLVLTSPEVHVENFCGQVCGFHYFTFPSVVGYTLPYAWVGNSAGRCPEVCAYPFAIPAYVPGRRPEAPPNGDAGVDGMVSVIAHELAEMASNPLANAWYAGGDPSFPTEIADLCEGIYGTGGGGAYTGQLLTDGRSGAAYNLNGVGGRRFLVQWVWDPYRSYCSGPNALDHQ

SEQ ID NO: 13014 - protein, 346 aa, Triticum aestivum
  misc_feature (1)..(346): Ceres Seq. ID no. 15169509
MPHRGGLLPLLLVALAAAPLAVAWRPWPPRDASGALAGLGASKKFEGSSDFVKLEYHMGPVLAADITVHPIWYGAWPAEQKRTIRAFLRSLSPQSSGEKEGAVPSPSVADWWRTVRLYTDQTTANVSAVVALGQEKCDARMSRGASLTRMDIQTVVKDAVTARTRPLPVDAGGVYLVLTSPEVHVENFCGQVCGFHYFTFPSVVGYTLPYAWVGNSAGRCPEVCAYPFAIPAYVPGRRPEAPPNGDAGVDGMVSVIAHELAEMASNPLANAWYAGGDPSFPTEIADLCEGIYGTGGGGAYTGQLLTDGRSGAAYNLNGVGGRRFLVQWVWDPYRSYCSGPNALDHQ

SEQ ID NO: 13015 - protein, 289 aa, Triticum aestivum
  misc_feature (1)..(289): Ceres Seq. ID no. 15169510
MGPVLAADITVHPIWYGAWPAEQKRTIRAFLRSLSPQSSGEKEGAVPSPSVADWWRTVRLYTDQTTANVSAVVALGQEKCDARMSRGASLTRMDIQTVVKDAVTARTRPLPVDAGGVYLVLTSPEVHVENFCGQVCGFHYFTFPSVVGYTLPYAWVGNSAGRCPEVCAYPFAIPAYVPGRRPEAPPNGDAGVDGMVSVIAHELAEMASNPLANAWYAGGDPSFPTEIADLCEGIYGTGGGGAYTGQLLTDGRSGAAYNLNGVGGRRFLVQWVWDPYRSYCSGPNALDHQ

SEQ ID NO: 13016 - DNA, 1863 bp, Triticum aestivum
  misc_feature (1)..(1863): Ceres Seq. ID no. 15169511
ttactggtagtacatctgttccgtctttcgccgaacacgcctcgcgcgccgaagcacgctacctggaactggaaggtgttcttcctcctccgctctactgtgctcccgtggcgcggagatccaaccggagctggaccgactccttttgccgaaccagtgtgctagctactgaagcggccatggaagtggtttcttccagtcactcttgcttggcatttcatcaaacacctaccagtgctcggaggtctctgggcactggtcttggtctgcggcataccaagtttgctcggccaagaaaaagcgcagttctctgtgttgggagagcttcaaatcctggtgattcaggaaagctgcatgtcagccgcagcttcgatgtaagcgatgtcgatgctgccctccagggcatctccaagaaggtaggccagatcgagaaagtgtccattcctggtctgccagaagggccagacagttctcaaatcagcactggtttgtgggagtggaagccgaagctgacggtatactacgagaagtctggcaccaagaatagcaaggcgccagcagtgctttttctaccaggttttggggtgggcacgttccattttgagaagcaattgatggatcttggccgtgattacaaggtgtggacgatggattttctgggacagggaatgtcattggcgtgtgaagatcccgctcctaaggccatggcggaggaggatgaggaatcatattggggttttggacaagattcacaaccatgggcagatgaattggtgtactctgtagacttgtggcgtgaccaggtccagcacttcattgaagaggttatcggtgagccagtttatatcgtgggaaactctcttggaggttttgttgctctatatttagctgcatccagcccacaccttgtaaagggggtcacattgcttaacgcaacgccattttggggtttccttcccaatcctgcaagatctcctcgtttgtcaaagatttttccatgggctgggacatttcctcttccatcagttgtgaggaaacttactgaaacagtgtggcagaagataagcgacccaagaagtatacagaagatactcaggcaagtatatgctgaccactcaacaaatgttgacaaggtgttctcgcgtattatagagacaacagaacacccggcagctgctgcatcatttgcctccattatgtttgctccaatgggccagatatcctttcaggaggcactgtctaggtgccaaaggcaggacattcccatttcccttatgtatgggaaagaagacccgtgggttacaccttattggggtatcagagtcaagcaacaggtgccagaagcaccctattatgaaattagccctgccggtcactgtcctcacgacgaggttcctgaggttataaactatttgctccgaggatggcttaagaatgtggagtctgagggttcagttgacctcccatttcttgaagattccagctttcaagaacatggtgtgtcgaaggagctggagtttgtcaggacagggtccaagaaatcagttagtgtgcggctcttcggttcccaaatttccctgtggagccaactgagctcattcttgaagcggcatgcctccaacataagggtagtgtccagatgattcgtccgtagttcgttagatagtagaagcttcaattgtatattgtattcattattctttatgtaaagtagtcaggttgatgcctagatgtacgaaatagagacaagttcaaatattttagtgaatgtgaatatgtgtagtacagagttagcattgggcgtcaaacatctgtcgtggttgtattcataggaattcaagatcacatattttcctgctcggt

SEQ ID NO: 13017 - protein, 546 aa, Triticum aestivum
  misc_feature (1)..(546): Ceres Seq. ID no. 15169512
TGSTSVPSFAEHASRAEARYLELEGVLPPPLYCAPVARRSNRSWTDSFCRTSVLATEAAMEVVSSSHSCLAFHQTPTSARRSLGTGLGLRHTKFARPRKSAVLCVGRASNPGDSGKLHVSRSFDVSDVDAALQGISKKVGQIEKVSIPGLPEGPDSSQISTGLWEWKPKLTVYYEKSGTKNSKAPAVLFLPGFGVGTFHFEKQLMDLGRDYKVWTMDFLGQGMSLACEDPAPKAMAEEDEESYWGFGQDSQPWADELVYSVDLWRDQVQHFIEEVIGEPVYIVGNSLGGFVALYLAASSPHLVKGVTLLNATPFWGFLPNPARSPRLSKIFPWAGTFPLPSVVRKLTETVWQKISDPRSIQKILRQVYADHSTNVDKVFSRIIETTEHPAAAASFASIMFAPMGQISFQEALSRCQRQDIPISLMYGKEDPWVTPYWGIRVKQQVPEAPYYEISPAGHCPHDEVPEVINYLLRGWLKNVESEGSVDLPFLEDSSFQEHGVSKELEFVRTGSKKSVSVRLFGSQISLWSQLSSFLKRHASNIRVVSR

SEQ ID NO: 13018 - protein, 487 aa, Triticum aestivum
  misc_feature (1)..(487): Ceres Seq. ID no. 15169513
MEVVSSSHSCLAFHQTPTSARRSLGTGLGLRHTKFARPRKSAVLCVGRASNPGDSGKLHVSRSFDVSDVDAALQGISKKVGQIEKVSIPGLPEGPDSSQISTGLWEWKPKLTVYYEKSGTKNSKAPAVLFLPGFGVGTFHFEKQLMDLGRDYKVWTMDFLGQGMSLACEDPAPKAMAEEDEESYWGFGQDSQPWADELVYSVDLWRDQVQHFIEEVIGEPVYIVGNSLGGFVALYLAASSPHLVKGVTLLNATPFWGFLPNPARSPRLSKIFPWAGTFPLPSVVRKLTETVWQKISDPRSIQKILRQVYADHSTNVDKVFSRIIETTEHPAAAASFASIMFAPMGQISFQEALSRCQRQDIPISLMYGKEDPWVTPYWGIRVKQQVPEAPYYEISPAGHCPHDEVPEVINYLLRGWLKNVESEGSVDLPFLEDSSFQEHGVSKELEFVRTGSKKSVSVRLFGSQISLWSQLSSFLKRHASNIRVVSR

SEQ ID NO: 13019 - protein, 342 aa, Triticum aestivum
  misc_feature (1)..(342): Ceres Seq. ID no. 15169514
MDLGRDYKVWTMDFLGQGMSLACEDPAPKAMAEEDEESYWGFGQDSQPWADELVYSVDLWRDQVQHFIEEVIGEPVYIVGNSLGGFVALYLAASSPHLVKGVTLLNATPFWGFLPNPARSPRLSKIFPWAGTFPLPSVVRKLTETVWQKISDPRSIQKILRQVYADHSTNVDKVFSRIIETTEHPAAAASFASIMFAPMGQISFQEALSRCQRQDIPISLMYGKEDPWVTPYWGIRVKQQVPEAPYYEISPAGHCPHDEVPEVINYLLRGWLKNVESEGSVDLPFLEDSSFQEHGVSKELEFVRTGSKKSVSVRLFGSQISLWSQLSSFLKRHASNIRVVSR

SEQ ID NO: 13020 - DNA, 1259 bp, Triticum aestivum
  misc_feature (1)..(1259): Ceres Seq. ID no. 15169515
aaaaaaaagcagaagccatccccgttccccattccctcgccgccgccggccgccgccaaatctccccggcctttccgccgcggcgccatgctcctccggctccggtgctacatcctcacccagctcctatcgtctccctccgcctctcccgcctcccagctgcaccgcctcttctccgccgcagcgcccggcgcctccccgaaccctagcttcgccgtggaggagtacctcgtcgccacctgcggcctcacccgaccccaggccctcaaggcctccgccaagctctcccacctcaggtcccccgccaatcccgaagccgtgctcgccttcctcgccggcctcggtctctccgacgccgatgtcgccgccctcgtcgccagggacccgcagttcctctgcgccagcgtggagagaaccctgacgcccgtagccgcagggctctctggtctcggcttatcgcgttccgacatcgcgcgcctcgcatcgctcgccgcccacaaattccgccaaaaatctgtcctctccaagctgcagtactacctgcgcctcttcggcacctcccacaacttcctccgggtgatgaagttctccaatatcctctcacacagcatcgagagggtggtcaagcccaatgtcgcgtacctgcgagagtgtgggttgcaggattgtgatatcgccaagttttgcatccaaagaccgaggatgatcatcagcaacccggagcatgttcaggcaatggtggcgtgcgctgaaaacattggtgtgccccgtgcctctgggatgttcaggcacgcacttcaggctgttgcattcctcggtgaggaggagatcacagtcagggtggggtacttgaagagcacgttcaggtggacggatgctgaggtaggcatggctgtttctaagtttccaccgttgctgagggggtccgagaaatcgctgcagcgcagatttgagttcctcatctccgaggtgggtttggaatcggcgtacattgctcagcgacccgtaatgctaggtctcagcctagagggccggctcaggccccggcactacgctgtaaagtttatcaaggaaaatggattgctcaagtgtgacccaagctactatactgttttcaaggagtccgacatgacattcaagaagaagttcatacaccctcataaggaagctgcaccgcaccttgaaaaagactacgatgctgcttgtaaaggggaagtgcccactaatttcagattcacataagccaataacgggctctg

SEQ ID NO: 13021 - protein, 413 aa, Triticum aestivum
  misc_feature (1)..(413): Ceres Seq. ID no. 15169516
KKKQKPSPFPIPSPPPAAAKSPRPFRRGAMLLRLRCYILTQLLSSPSASPASQLHRLFSAAAPGASPNPSFAVEEYLVATCGLTRPQALKASAKLSHLRSPANPEAVLAFLAGLGLSDADVAALVARDPQFLCASVERTLTPVAAGLSGLGLSRSDIARLASLAAHKFRQKSVLSKLQYYLRLFGTSHNFLRVMKFSNILSHSIERVVKPNVAYLRECGLQDCDIAKFCIQRPRMIISNPEHVQAMVACAENIGVPRASGMFRHALQAVAFLGEEEITVRVGYLKSTFRWTDAEVGMAVSKFPPLLRGSEKSLQRRFEFLISEVGLESAYIAQRPVMLGLSLEGRLRPRHYAVKFIKENGLLKCDPSYYTVFKESDMTFKKKFIHPHKEAAPHLEKDYDAACKGEVPTNFRFT

SEQ ID NO: 13022 - protein, 384 aa, Triticum aestivum
  misc_feature (1)..(384): Ceres Seq. ID no. 15169517
MLLRLRCYILTQLLSSPSASPASQLHRLFSAAAPGASPNPSFAVEEYLVATCGLTRPQALKASAKLSHLRSPANPEAVLAFLAGLGLSDADVAALVARDPQFLCASVERTLTPVAAGLSGLGLSRSDIARLASLAAHKFRQKSVLSKLQYYLRLFGTSHNFLRVMKFSNILSHSIERVVKPNVAYLRECGLQDCDIAKFCIQRPRMIISNPEHVQAMVACAENIGVPRASGMFRHALQAVAFLGEEEITVRVGYLKSTFRWTDAEVGMAVSKFPPLLRGSEKSLQRRFEFLISEVGLESAYIAQRPVMLGLSLEGRLRPRHYAVKFIKENGLLKCDPSYYTVFKESDMTFKKKFIHPHKEAAPHLEKDYDAACKGEVPTNFRFT

SEQ ID NO: 13023 - protein, 220 aa, Triticum aestivum
  misc_feature (1)..(220): Ceres Seq. ID no. 15169518
MKFSNILSHSIERVVKPNVAYLRECGLQDCDIAKFCIQRPRMIISNPEHVQAMVACAENIGVPRASGMFRHALQAVAFLGEEEITVRVGYLKSTFRWTDAEVGMAVSKFPPLLRGSEKSLQRRFEFLISEVGLESAYIAQRPVMLGLSLEGRLRPRHYAVKFIKENGLLKCDPSYYTVFKESDMTFKKKFIHPHKEAAPHLEKDYDAACKGEVPTNFRFT

SEQ ID NO: 13024 - DNA, 1332 bp, Triticum aestivum
  misc_feature (1)..(1332): Ceres Seq. ID no. 15169537
gattcggaatacatgcagaagatcctgatattttctctctcctcgtgtcatctcatcactctccctctttctgaaaaccctagcgccgcagcccgagagagccatccttaggtttccgcgcaaggcgtcggggaattttcggctcgattggattggagatgacggagaaggaggtgggacggatcttcgtgggcggactgtcctgggacaccacggagcgcacgctggagcgagctttcggcgagttcggcaaggtcatcgagacgcaggttgtaacagaaagagacacaggccgctcccgtgggtttgggtttgttacattctcggaacctcgggctgtggatgttgcgatccgggaaatgcacaatggagaactagatggtcggaccatttctgtgaacaaagctcaacctaggatgaacagtgatgatggtggctatggatatgggggtagtagttactcatctggtgctagaggtggatatcgtggtgcagctgacatagtacccactgcaagtgatgattgctttaagtgtggacgccctggacactgggctcgtgaatgtctttattctgatggaggcaggcctggaaggtactctcccccttccaggtatggcaatggcgctggtgggcgtggtgaccgctttggaggatcagaccgttttggtaatcgctatgttgatgatcgttatgatggtggccgctatgctgatgatcgttatggtggtggacgcgatcgctatcctccagctgctgatcgtttttctggcgatagatatggtggtggtgatcgttatgcatcaggtggctttgccagggaaagaagctatgagagagatggagggcggccaggtggaagttattaccgtgatgaacctagaggcactggtgcttatggcaggggtggtccacgtgtggcgaatggtgacagatatgggagtggtggacctgctcgccttggcgcgagttaccgagataggcctgctccctatgatcgtcccactcagggtgctcgctcatatgatgaccgctactgatggaaggtcaccttggagcagacaggagatttgatacaagattcaattcccagttgctactacctcctttatttgtgtccactatgttgatgcttcaactctcaagtatcattctttcaagcagtttgtttggttacttcagtccatatggcagtacttaattattattattattattattattattattattattatggtcaaactgtacactctaggcaatgggcagacacttgttgcttattgttatggtattgtgtaactactctgcactctaagtttgagttgtact

SEQ ID NO: 13025 - protein, 293 aa, Triticum aestivum
  misc_feature (1)..(293): Ceres Seq. ID no. 15169538
MTEKEVGRIFVGGLSWDTTERTLERAFGEFGKVIETQVVTERDTGRSRGFGFVTFSEPRAVDVAIREMHNGELDGRTISVNKAQPRMNSDDGGYGYGGSSYSSGARGGYRGAADIVPTASDDCFKCGRPGHWARECLYSDGGRPGRYSPPSRYGNGAGGRGDRFGGSDRFGNRYVDDRYDGGRYADDRYGGGRDRYPPAADRFSGDRYGGGDRYASGGFARERSYERDGGRPGGSYYRDEPRGTGAYGRGGPRVANGDRYGSGGPARLGASYRDRPAPYDRPTQGARSYDDRY

SEQ ID NO: 13026 - protein, 226 aa, Triticum aestivum
  misc_feature (1)..(226): Ceres Seq. ID no. 15169539
MHNGELDGRTISVNKAQPRMNSDDGGYGYGGSSYSSGARGGYRGAADIVPTASDDCFKCGRPGHWARECLYSDGGRPGRYSPPSRYGNGAGGRGDRFGGSDRFGNRYVDDRYDGGRYADDRYGGGRDRYPPAADRFSGDRYGGGDRYASGGFARERSYERDGGRPGGSYYRDEPRGTGAYGRGGPRVANGDRYGSGGPARLGASYRDRPAPYDRPTQGARSYDDRY

SEQ ID NO: 13027 - protein, 207 aa, Triticum aestivum
  misc_feature (1)..(207): Ceres Seq. ID no. 15169540
MNSDDGGYGYGGSSYSSGARGGYRGAADIVPTASDDCFKCGRPGHWARECLYSDGGRPGRYSPPSRYGNGAGGRGDRFGGSDRFGNRYVDDRYDGGRYADDRYGGGRDRYPPAADRFSGDRYGGGDRYASGGFARERSYERDGGRPGGSYYRDEPRGTGAYGRGGPRVANGDRYGSGGPARLGASYRDRPAPYDRPTQGARSYDDRY

SEQ ID NO: 13028 - DNA, 1759 bp, Triticum aestivum
  misc_feature (1)..(1759): Ceres Seq. ID no. 15169577
acaacagaaacacacacatctcccagtctcaaccaactcaaacagcagtcgctgatatcttctacatgggtctcctctggatggtggcggcggccgtggcggcggtgctggcctcgtgggcgatcaacgcgctggtgtacctcgtgtggaggccgcgggccatcacccggcagctccgcgcgcagggcgtcggcggtccgggctacaggttcttcgccgggaacctcgccgagatcaagcagctccgcgccgacagcgccggcgccgcgctggacatcggcaaccacgacttcgtccccagggtccagccgcacttccgcaaatggatccccatccacgggcgcacgttcttgtactggttcggagccaggccgagcctgtgcgtggccgacgtgaacgtggtgaagcaagtgctctccgaccgaagcgggctgtaccccaagagcatcgggaacccgcacatcgctcggctgctcggcaaggggctcgtgctcaccgacggcgacgactggaagcgccaccgcaaggtcgtccaccccgccttcaacatggacaagctcaagatgatgacggtgaccatgtccgactgtgccgggtcaatgatgtccgagtggaaggcaaagatggacaagggcggcagcgtggagattgacctgagccaccactttgaggagctaaccgcggatgtcatctcccacacggcattcggtagcagctacgaacaagggaaaaaggtcttcctagcgcagagggagctccagtttcttgccttctccaccgtattcaacgtgcaaatcccagcattcaggtaccttccaactgaaaagaacgtcaagatatggaagcttgacaaggaggtgaggaccatgcttatgaacatcatcaaaggccgccttgccaccaaagacatcatgggctacggcaacgacctcctcgggcttatgttggaggcgtgtgcgcctgaggacaggcaaaatccgcttttgagtatggatgagattatagatgagtgcaagaccttcttctttgccgggcatgacaccagctcacacctgctcacatggaccatgttcttgctgagcacgcaccctaagtggcaggagaagctcagggaggaggtgctaagagagtgtggcaacggtgttcccacaggtgacatgctcaacaaactacagctggtcaacatgttcctcctagaaactctcaggttatacgcccctgtatcggccattcagaggaaggcgggttcggatctcgaggttggtggcatcaaagtgcctgaaggcacggtcttgacgatccccatcgcgacgatacatcgtgacaaggaggtatggggagaagatgccaacgaattcaagccaatgaggttcgagaatggagtgacgagggccggaaagcaccccaatgccttgttgtctttctctagtgggccgaggtcatgcatagggcagaattttgcaatgatcgaggccaaggccgtgatcgccgtgattcttcagaggttctcgttctccctatcacctaagtatgttcatgccccgatggacgtgatcacgctgcggcctaagtttgggcttcctatggtcctcaagagcctcgagatgtagaaaaatgtgtatggtgttaagtatagcacagggtttttgtattacttgactggaacttagcttatgttgcgcactagataagcttgtaaaatcatcgatatataatgtaccctatttgtaaatataaataataaagtgtttttattaac

SEQ ID NO: 13029 - protein, 535 aa, Triticum aestivum
  misc_feature (1)..(535): Ceres Seq. ID no. 15169578
NRNTHISQSQPTQTAVADIFYMGLLWMVAAAVAAVLASWAINALVYLVWRPRAITRQLRAQGVGGPGYRFFAGNLAEIKQLRADSAGAALDIGNHDFVPRVQPHFRKWIPIHGRTFLYWFGARPSLCVADVNVVKQVLSDRSGLYPKSIGNPHIARLLGKGLVLTDGDDWKRHRKVVHPAFNMDKLKMMTVTMSDCAGSMMSEWKAKMDKGGSVEIDLSHHFEELTADVISHTAFGSSYEQGKKVFLAQRELQFLAFSTVFNVQIPAFRYLPTEKNVKIWKLDKEVRTMLMNIIKGRLATKDIMGYGNDLLGLMLEACAPEDRQNPLLSMDEIIDECKTFFFAGHDTSSHLLTWTMFLLSTHPKWQEKLREEVLRECGNGVPTGDMLNKLQLVNMFLLETLRLYAPVSAIQRKAGSDLEVGGIKVPEGTVLTIPIATIHRDKEVWGEDANEFKPMRFENGVTRAGKHPNALLSFSSGPRSCIGQNFAMIEAKAVIAVILQRFSFSLSPKYVHAPMDVITLRPKFGLPMVLKSLEM

SEQ ID NO: 13030 - protein, 514 aa, Triticum aestivum
  misc_feature (1)..(514): Ceres Seq. ID no. 15169579
MGLLWMVAAAVAAVLASWAINALVYLVWRPRAITRQLRAQGVGGPGYRFFAGNLAEIKQLRADSAGAALDIGNHDFVPRVQPHFRKWIPIHGRTFLYWFGARPSLCVADVNVVKQVLSDRSGLYPKSIGNPHIARLLGKGLVLTDGDDWKRHRKVVHPAFNMDKLKMMTVTMSDCAGSMMSEWKAKMDKGGSVEIDLSHHFEELTADVISHTAFGSSYEQGKKVFLAQRELQFLAFSTVFNVQIPAFRYLPTEKNVKIWKLDKEVRTMLMNIIKGRLATKDIMGYGNDLLGLMLEACAPEDRQNPLLSMDEIIDECKTFFFAGHDTSSHLLTWTMFLLSTHPKWQEKLREEVLRECGNGVPTGDMLNKLQLVNMFLLETLRLYAPVSAIQRKAGSDLEVGGIKVPEGTVLTIPIATIHRDKEVWGEDANEFKPMRFENGVTRAGKHPNALLSFSSGPRSCIGQNFAMIEAKAVIAVILQRFSFSLSPKYVHAPMDVITLRPKFGLPMVLKSLEM

SEQ ID NO: 13031 - protein, 509 aa, Triticum aestivum
  misc_feature (1)..(509): Ceres Seq. ID no. 15169580
MVAAAVAAVLASWAINALVYLVWRPRAITRQLRAQGVGGPGYRFFAGNLAEIKQLRADSAGAALDIGNHDFVPRVQPHFRKWIPIHGRTFLYWFGARPSLCVADVNVVKQVLSDRSGLYPKSIGNPHIARLLGKGLVLTDGDDWKRHRKVVHPAFNMDKLKMMTVTMSDCAGSMMSEWKAKMDKGGSVEIDLSHHFEELTADVISHTAFGSSYEQGKKVFLAQRELQFLAFSTVFNVQIPAFRYLPTEKNVKIWKLDKEVRTMLMNIIKGRLATKDIMGYGNDLLGLMLEACAPEDRQNPLLSMDEIIDECKTFFFAGHDTSSHLLTWTMFLLSTHPKWQEKLREEVLRECGNGVPTGDMLNKLQLVNMFLLETLRLYAPVSAIQRKAGSDLEVGGIKVPEGTVLTIPIATIHRDKEVWGEDANEFKPMRFENGVTRAGKHPNALLSFSSGPRSCIGQNFAMIEAKAVIAVILQRFSFSLSPKYVHAPMDVITLRPKFGLPMVLKSLEM

SEQ ID NO: 13032 - DNA, 1727 bp, Triticum aestivum
  misc_feature (1)..(1727): Ceres Seq. ID no. 15169585
ttttttttcgattacactccgtccagtgcagctaggctagggcgctaggctaggcagcagacatgatgaccgtcccgcttgttgtcgcgctgttcaactcgcccttcgtcctcaccaccctcgccttcctcctcttcaccctcctcgtctccaagacgcgcagcaatgttgctgcccggggaacgttgcctccgtcgccgcccagcctgccagtcttcggccaccttcgtctactcgggagcctgccgcacaggagcctccggtcactggccgcgtcctacggcccggtcatgtacctacgcctcgggcgtgtgcccaccgtcgtggcgtactccgcggccgccgcggaggaggccatgaagacccgcgacctggccttcgccagccgccccaagctgttcatggtcgaccggttctactacggcaccggcggcatcggcttcgcgccgtacggcgagcactggcgccaggcccgccgcgtctgcgtcacccacatgcttaacccgcaccgcctcctgtccttcaggcgcgtccgggggcaggaggtcgccgccctcgtcgaccgggtccgccgcgccggtaccgtcgtgaacctgagcgacaacctcatcgtctactctttcaccgccatctctcgcgccacctttggcgacacggactacgggatcgacggcgaggaggggggagcgaggctgaggaaggtgttcgccgagatcgaggagcttctcggcacggcccccatgggggagaaggtgccatggctgcggtgggtcgacgtcctgacgggactggagcggaagacgaggcgcgcgttcgaggagatggatggactgctcgagcgggtcatcacggaccatcgccaaaagagcggcgccggggacaacgaccagcgtgacttcgtggacgtgctgttaggggccaacgagctcgacacgaacggcatcaaggccatcatcctggacatgcttgccgccgccacggattcaacgttcacgttgctggaatgggccatggcggagctcatcaaccacccgcaagaaatgcgcaagctccaggacgaggtccgcacggccgtcggcgacgccggccacgtcaccgaggatcatctgccggatctacgctacctgaaggccgtcgtcaaggagaccctccggctccaccctcccacgccgctcctcctgccccgggagactgtcgaggacacccagctgctcggctaccacgtcccggcaggcacgcgggtgctgatccacgcctgggccatcggccgtgacccggcgacgtggggcgaccgcgccgaggagttcgtgccggagaggttcttggagtacacccacgagatggggcaagacttcgcgttcttgcccttcggcaccgggaggagaggttgccccggggtcaagttcgccatgccgtccaacgagctggccctcgcgagcctggtgtaccatttcgactgggagctagccggcgggaggaagccgcccgtggacatgaccgagctgcacgggctctccgtgcgcctgaagacgcctctgcttctggctgctaaaccgtggtcaagccgtggtgtcgaatgagagaaaagcgtctctacatgcttcttctaagtagtacgagctagctcagagctcggatgatcattatcgaccaagtctagtaatgtactccttcatgtattgttcacttgttaatttccttacccgtatttgttgagcagtaacttc

SEQ ID NO: 13033 - protein, 505 aa, Triticum aestivum
  misc_feature (1)..(505): Ceres Seq. ID no. 15169586
MMTVPLVVALFNSPFVLTTLAFLLFTLLVSKTRSNVAARGTLPPSPPSLPVFGHLRLLGSLPHRSLRSLAASYGPVMYLRLGRVPTVVAYSAAAAEEAMKTRDLAFASRPKLFMVDRFYYGTGGIGFAPYGEHWRQARRVCVTHMLNPHRLLSFRRVRGQEVAALVDRVRRAGTVVNLSDNLIVYSFTAISRATFGDTDYGIDGEEGGARLRKVFAEIEELLGTAPMGEKVPWLRWVDVLTGLERKTRRAFEEMDGLLERVITDHRQKSGAGDNDQRDFVDVLLGANELDTNGIKAIILDMLAAATDSTFTLLEWAMAELINHPQEMRKLQDEVRTAVGDAGHVTEDHLPDLRYLKAVVKETLRLHPPTPLLLPRETVEDTQLLGYHVPAGTRVLIHAWAIGRDPATWGDRAEEFVPERFLEYTHEMGQDFAFLPFGTGRRGCPGVKFAMPSNELALASLVYHFDWELAGGRKPPVDMTELHGLSVRLKTPLLLAAKPWSSRGVE

SEQ ID NO: 13034 - protein, 504 aa, Triticum aestivum
  misc_feature (1)..(504): Ceres Seq. ID no. 15169587
MTVPLVVALFNSPFVLTTLAFLLFTLLVSKTRSNVAARGTLPPSPPSLPVFGHLRLLGSLPHRSLRSLAASYGPVMYLRLGRVPTVVAYSAAAAEEAMKTRDLAFASRPKLFMVDRFYYGTGGIGFAPYGEHWRQARRVCVTHMLNPHRLLSFRRVRGQEVAALVDRVRRAGTVVNLSDNLIVYSFTAISRATFGDTDYGIDGEEGGARLRKVFAEIEELLGTAPMGEKVPWLRWVDVLTGLERKTRRAFEEMDGLLERVITDHRQKSGAGDNDQRDFVDVLLGANELDTNGIKAIILDMLAAATDSTFTLLEWAMAELINHPQEMRKLQDEVRTAVGDAGHVTEDHLPDLRYLKAVVKETLRLHPPTPLLLPRETVEDTQLLGYHVPAGTRVLIHAWAIGRDPATWGDRAEEFVPERFLEYTHEMGQDFAFLPFGTGRRGCPGVKFAMPSNELALASLVYHFDWELAGGRKPPVDMTELHGLSVRLKTPLLLAAKPWSSRGVE

SEQ ID NO: 13035 - protein, 429 aa, Triticum aestivum
  misc_feature (1)..(429): Ceres Seq. ID no. 15169588
MYLRLGRVPTVVAYSAAAAEEAMKTRDLAFASRPKLFMVDRFYYGTGGIGFAPYGEHWRQARRVCVTHMLNPHRLLSFRRVRGQEVAALVDRVRRAGTVVNLSDNLIVYSFTAISRATFGDTDYGIDGEEGGARLRKVFAEIEELLGTAPMGEKVPWLRWVDVLTGLERKTRRAFEEMDGLLERVITDHRQKSGAGDNDQRDFVDVLLGANELDTNGIKAIILDMLAAATDSTFTLLEWAMAELINHPQEMRKLQDEVRTAVGDAGHVTEDHLPDLRYLKAVVKETLRLHPPTPLLLPRETVEDTQLLGYHVPAGTRVLIHAWAIGRDPATWGDRAEEFVPERFLEYTHEMGQDFAFLPFGTGRRGCPGVKFAMPSNELALASLVYHFDWELAGGRKPPVDMTELHGLSVRLKTPLLLAAKPWSSRGVE

SEQ ID NO: 13036 - DNA, 1966 bp, Triticum aestivum
  misc_feature (1)..(1966): Ceres Seq. ID no. 15169599
agcaaccaacaacatccgagcatcagcaccagctcaaacacacatactgtagtacattgcacgccaagctagcacccgcgcagagcacagcatggctgtctccgcgcgcagggtggccttcgccacggcagcctccttggccgtgtactggctcctcaaatcgttcctccacgcaccgcaccccgcgctgctgccggcagcggccgccctcgtcgccgtcgccgtgggagcgggagggaagcgtggaggccccggcgcccctccaggccccgcggccgtgccggtgttcggcaactggctgcaggtgggcaacgacctgaaccaccgcttcctggcgcggctgtcggcgcggtacggccccgtgttccggctgcggctgggcgtgcgcaacctggtggtggtgtcggacccgcggctggccacggaggtgctccacacgcagggcgtggagttcggctcccgcccgcggaacgtcgtcttcgacatcttcacggccaatggcgccgacatggtcttcaccgagtacggcgaccactggcgccgcatgcgccgcgtcatgacgctgcccttcttcacggcgcgggttgtgcagcagtaccgcgccatgtgggaggccgagatggacgacgtcgtgtccgacctgcgcgccgactcggcggcccgcggcgccggcgtcgtcgtgcgccgcaggctgcagctcatgctctacaacatcatgtaccgcatgatgttcgacgcccgcttcgactccgtggacgaccccatgttcgtggaggccaccaagttcaactcggagcgcagccgcctcgcgcagagcttcgattacaactacggcgacttcatccccatcctcaggcccttcctgcgtggctacctcaacaagtgcagggacctgcagacgaggaggctggccttcttcaacagcaactacgtcgagaagagaagggaggtgatggacaccccaggacaagacaagaacaagctccggtgcgcgatcgaccacatcctcgcagcagagaagagcggcgagatcacgccggagaacgtcatctacatcgtcgagaacatcaacgtcgcggccatcgagacgacgctatggtccatcgagtgggcgctggccgaggtggtgaaccacccggacgtgcagcgcaaggtccgcggcgagatcagggacgtgctcggcgacgacgagcccatcaccgagtccaacatcagcaagctgccgtacctgcaggccgtgatcaaggagacgctgcggctgcactccccgatcccgctcctcgtcccccacatgaacctggaggaggccagcctcggcggctacaccattcccaagggctccaaggtcgtcgtcaacgcctggtggctggccaacaacccagagctatgggagaagccggaggagttcaagccggagaggttcttgggcgaggagagcaacgtggacgccacggtcggcggcaaggtggacttccggttcctcccgttcggcgtggggcggcgcagctgccccggtatcatcctcgcgctgcccatcctggcgctcatcgtcgggaagctggtgaggagcttcgagatggtgccgccgccaggcgtggacaagctcgacgtgagcgagaaaggcgggcagttcagcctgcacattgccaaccattccgtcgtcgcattccaccccatctcaccctgagcaattgcatcttcaacccaatagcctgatccacaagcacaatttttcttcagattacaaatacagtagattacacgaaagtatgtcagttgatttatggggtttacatttttttttctttataaaaaggaggatcacgcgtggcctctgcataaggggtttaaaaaatgcttttcagctttaagaaattggtttacataacgcttttcagctttaagaaatgtatgtattttgcaaatcaaaatgttttttatgggtgcaaattgaaatgttattgcc
